United States Patent Application Publication US 2007/0054278 A1 - sequence listing, part 48

SEQ ID NO: 94771 - DNA, 90300 bp, Homo sapiens
tacttagtctagggtgactgggttacgtaggatggcttgaaagagataagccttggtggacatcttaaaaatttaactgaagtaaagagcaactggtttagttcccttcccctggagtgttgtggtgttgagaagacaaaactttgggaacaatcacagaggggctagatagacaatgcaaaattgctgctggagagactgagtgagtagatgttaaataactaagtgcgtgctggatgaataatgttctggatccaagaaagacatacacaggtaaaaaatgaattcatgccttttgtgttgttcaaaacttgtactttatttttctcaaatatttttacttatgctttttgtcattatccacagtgttttttttttaaagcctgagccactttgtggttttagcctcaatataataatcatccccttactcttagactaattccttttcccctgtcacttkgcctgtatactctgtaaaaatgaggaccttagaaaatcaacatttcctgtgaacttgagagactatacaagcagtgcccaaatcagtaggattaggcaggtaaaaccagttggatagcagatatattatgatctgttggacaaaggtatagttgtgtgcatgtctacaaggtcatcgtgattcgccattagcttaaggatcatgtaggttgaccagggtgaggtaggactatccacaggattgtgtaaattgtggtaggggatgcagtayacaatattcatgaattaaacacttagctaactgctttcctgaaaatggtctgtgttctaaaagacaaagatctaggttttttgctgttttttactttaacttatgaagattcaagtcactaatatgttacttgctctggtttaaaatgaaagcaactggctatggtaaggtagagaagacagctgaattgtatcagaatatttaagacttttaaattaagttctgagttacctcaccttataaaaatatatgtcaatatactaaatacccaacaaagatccaggatgtgggatatttaaaaatacatttctcttgtatcagcaccaaaaataccagtttctgtacaacccgtgtcaagtttttaagtatacacacattaaaattatttctgataaaaaaatcacaaactccacagaaataattaaagatatatgcaaattactttcaaatacattttgacatyaaagtcaggcaattcacttggaagaatgttataatgaatgtcactgaatttttgtagtaagatgtttgacgtcaactttgattatgggaatacatctcacacacaggaggcactggtatttagaaacttaggaaaattactagaattgttaagactgaggtgaagaatttgtacagccttccacaatttcaaagaggtagtgatagatacttgtcctcctggcaatatcaaatgcagtttcttccaagttgtttttcagccctggtttgacgtaacggttcatcaggaggagttctagggtatccttgctgtctctgttcccagcagcaagatgcaagggggtcaagaggccttttgtttgggcattgatatctgcatcatgctgcagtaagaaagaagccactctggtattattccacttacaagcactgtgcaggggcgtccagccatccacagtcactgcatgaacatcggccccctgtgcaatgagctcctgaacaatatctaagtgtccactgtaggctgctcgatgaagaggggtatactcatcttcatccctagtgttcacgtgagtggccttttcagaaagsagtctccgcactgtggtaagctgagaagaaaaaaaagaaatctttcaactcaactcaaaccaaaacaataactaaaacaaaattgtcttgtggtgttagatttaattaagttgaataaaaacttacttgttagtagatgactttaaaatgaaaataatttaagatctctttttggggaggagaggactactgatttaagaatgaacaagttagtgttaactacactttgttgcttctaagaatgagattctctgaatatcaaaccatacatttactcctggtccaactaaggtttattgcataaaagcttcagtccaatgaataacataggctttctgtttaatattttatgtgttatctgtgaagaaaacataactgcttgatttttctgtaggattatcacaccaatatacacactgtatgaaacttttaaaaataaaacttttaacagaagaataaagtattaataaggaattctagggattcaagagctcaattccttctcaatacaaccttagaaacaaccttttaggttgtaattttcagtttgttctatgggcctctggttaaatgtggcatgctcttgggttaaaaagctatttaaaatgcgagacccttttagttattagtttactaacacagacatggggaaacttagtaaaatgaggtggaagtggccaagcagagggaataggcttttgatgttcattccacttcgatgatcctgggcaaattaatattcctgaatctcaatttcttactctataaaagagaagaatattacttatagggatacatgatgattaaataaaataatgtaataaggtacctggtatagttagtttttaataaatgttagtttccatcctctctttcctaaatgatcctaatgactttatataaatgattttaaaatatagatgattgcttgctatctttatagataattatccttaaacccccaaataatacctagcatgacactttgcagcttaatatgtgctttcatgtacattgtctcatttggtcctcacaatcaagagataggtatgatggccataacagtaaaggcaggtcttctggcttgaacccagtgcttttcctactgtcacacttccctctgtaatttttttttttacccgatttttttcagcagcccaaagaagcaatctgcttgggtctttttccatttttttttcttgcaatcgataccactcttcatttttgtcatcttgctcctcatcttcatcagaattgcctacccaaagactttgagtaccagtaggaataaggtgtccatgtgtttccaacaattcaagttggttaaagtgttcagaaaaatccaaggaattctcttggtctggtattccatcatcatttcctttttctttttccattttttactactattctaaataaaaagcatttcaaatgccaggatataaatctttctagagatgaattatgactgctttgttcatcaagatctgaaaacacaaatacaaaagttattagtaaaacaataattcaggctttatcaactgcatagataagtcttgcaaacatatacaattaaaccctgtctaaactcttgtttttctcatgatatcccttacatacactaaatactgatgctgacagaaaacaacaaactatgatctaatagtggtctaatgcttcttacttttgttgttttcttctaagtcaattatattattataactattatttttaatctactggtttaggtatgatggtgttatgctaacagtgatgaatgcttaaaggttttgaagtataactaatacaatgaagacaggtgcattcaagatttttataaactagacacacagataatatagagcagaaataaaaacttctaattcctaaaaatactatttcgaagaatcagggattcttgaagatggaatagcccccaaaaggacatctgttccaatctgtcatcggtacatatatctttatcacagcatctacactaattatcctatttctactttgataatttcaggcctaggaaaattcactgctttaaaaagtagtcctgtttattgataggcaactatagttcttagttgggtccttgttttcaactgaattttggctgtcattcattccttcattcaactaatatgaatagaatgtctggtatgtgccaacttctgggtactgggattcaataatgagcaagatccatgtcttcacctcaggaagcttactctagtgtaggtgactggcaaagacatcatgtgtctggcaaagacaacatgataagtactactacaagaccttgtctagaaaccatgagtatacaggaggttcataattcccctagtcctaagggattaaagaaggcttcctgaaggaactgatgtttattctgctaagctgccatattaatttttaaaccaatatcagcttaaagggttacacaacatataaaccttaatcaattaaagaaaaggagaataaccaatagataatttacaaatacgaattcccagcctctcaactctatttgttgaaatataatcagtctttcaaggctcttctctgatgttatctctttcattctttcttgatcctctcatttagatcgctttctgctttctactttttttggtgctacatttcacctctaactttgttcttgttttagccccttaaaagattataagctgaaagataaggaccacatttaacttatatttatctcctacttgtctatagaaggcattaagaagtatgtgtagcattacatttaattaaagtcttgtcacttgattttgcctggaatggattctgagaagttccagagttaggcataaccccaagatactgatttcttgatacctaatctcacaagtttaacagtatacaatcttaatgtggtattaaactttattactagtggcaatagcactaaactcaagtttaaatgtattactcatgtccagtaacttttctggtcctgttactttattgtaaaatgtaagaattttactaaagtattcctaaggccaatccggcttttcagtcacccaatcagagacacccttggaatcagagatatccaatcagaattgctctgtgttttattaattctcctggagcttccactttttctttgattctcaaactaattcctgaaccttgcaacacaaaaatgaccatacatcaattcattaaacacttaacagatgctaataaataaaagttcacttgtaattatatcaaatatagtaaccttataccacagatcttaccctctcccccaacatgcttttcctttcaataaaaactccctttatataaattttgagtttacagatccagatacaaaaaattatgtacaaaattttactggtatatttagtttaaaaagccaagcctaggcgcatctacccgacttacagttaagaaacaaaactgatgacttgatgatgatattcctgatattccatcaggaatgtcagggtatgtttcctaacttaaagggcatatcctattttgagagagatccgaactatgtcaactccttacaaacaactcagtgataggcggggctataaaccttactggtgaaggaggttcagatagattaaaacaacttgccctagatcaaggacccttcaatggaactgaaagggcagacgttctaattcaaaagttctacattatttttcgctgcactatacatcttactgctctcagcacaaagcagtgcagatgtgctgaactcaaggacctaggggcgacacctgtagagggtctggcgactgggagggagggagaggggatccagctccggcactctgccaccagccgggagctcacaggcccgtgagctccgcctgcggccttccaaacagccaagagcggagaagcggcttcggtcctacctggggaccacgaagcggcctgacctgcagggctcggcctgtgtccacaggctacccacccccacgggctcaggagttcttagatggcgccggtccatcaaaaagcgaggtccgggacagggaataacaacccacctgacagaagggaaaatcgccgccttgcatctcacttccgggttcgtctcctagcctgctcaggattggctcctgcgtgagggcggggcctcgccgctactttmcccgccccctcactgcgtgcggtagccaatgagagccgaactggacttgaagcatctacgttatccatraagtgtcgcgagagaaacggacgccgttctctcccgcggaattcaggtttacggccctgcgggttctcagaggcaarttcagaccgtgttgttttcttttcacggatcctgccctttcttcccgaaaagaagacagccttgggtcgcgattgtggggcttcgaagagtccagcagtggggtaatttaggaatcgcattcgtctcctgtttctgcaggttcccaggcggaagcccagagttaactggaacctcgggaagagcgggccgagtgggcaggggaggggtcctggcgggctcagcgttctgattccgaggttccctgcggtgagggcgtgttgaggcttggaatcccgacggaatctggagctccagatgtggtgggggttktctcgcggtggcagccactcttccccaaacctggctattttcagtcatcctgctggtgcytaaaggtgttcctccgcagaccacstgtttgtttatttacactcgctttaaacgcgggcccgttcccttttccaaactagccaggtcctttaaaaaaaatcgtggggtttgaataggaaatacaggattgcctctgttctccagagtaacctatgcgtgcaacttaaaaatrtctgcacatctagagttgtttgtgtgttgaaccagaaccgtatgtgaccctttctrccyatttatttagcatacattaatttcccataagagcacgggaaaggaaaataggagtttaatcatcttggtgaaactaggaaacaggatgtacactggagatatattattttctatgctcagttcattaaaaaaaagtatagtgggtgcttagatgaaaatgagacttctaaatttgccagtctaattaagacgtctgtaccttgtgcagcgtaaatcatgttggttaaatacgtgcaggcttttaaaaaatgtgttttatgatgtaattttgtttttagaatttctagaatttggaatcgagtgcattttctgacatttgagtacagtacccaggggttcttggagaagaacctggtcccagaggagcttgactgaccataaaaatgagtactgcagatgcactgtaagcacctgacttctggaatcccttrttatttggggtttctaaagctcgtcaactgtgatcacagtaaaagaaaacttatttaataagcagtaaataaggaacctgtttatgaacagaaatattagtcatcaaaaaggrtatttggaatgttttaaatatttatctgtttgttaactggaagctaatatgcagctatagattggagtcttgcagtaatttgatatattgatatagtattgtttatgttcttaggcttcatcttaaattattgaagtgataaatattcttgaattttcctgacaaattcttattagtcaatgcagttctgtttaagatttttagagtaaattcctctagtattaaataagctggaaatgaatttgaatggaatgggaataaataaaaggactgtaaaagttatgtgcactttgggaggycgaggctagcgggatcatctgaggtcaggatttggagaccagcctgaccaacatggtgaaaccccgtctctactaaaaatacaaaattagccaggcgtggtggcgcatgcctgtaatcccagctactcaggaggctgaggcaggagtatcatttgaacccgagaggcggaggttgcagtgagccgagatcgtaaaaaaaaaaagttatgtgggaaagactttagacttggagtcttttaccctagtttcaagtccttggaccctactagctgtgtgaccttgggcaagtcagcagttctctgagccttgcctcaattttgccattggtataattggaataattatacctttttcagattaattttgaggcttaaatgagagaattcatgagaaaatacttcataaattgctacagaaacatgtagtattatgatttgaaaagtattctgacctaccttcttggatatatcagtgagaactgtgtgcatatcatttttgaagtttttgaagagaaatcgtttgtggaaatatcttttgtttgtaaagatttgaattttggagatatatacagagatttttwaaaaattcattgtggtttattgaaaatagcctgagttttcatcatgggttttagtcctgtttctgtcactagttatgtgataaagcagttaatttctctgggtttagccttctcatttgtcagagataataatgcctgactctttatctgtgagggttgagatgagatcataaaaataaaagtatttcatacaattaaatttagtgtaagagtattaataactattacattgctacttcacattaaagtacctttgaatattaccaaattcaaattgaaacaattctgtgttggccaactttattaatgaaatctaactctgtagagagtagagtcatgcaagtgtcttcaaggccctgaatgtaaattattgcatattagtataaaattgactcataaacttagaggaaggctttttaaattaacttcgattttcctggaagagtacgaagtcagataaataacaagtttatttatctgaggaaaacaagcaaacttttgggcctgggttacatgagtttgtaaaactggttataacaaggttataaatttttgaagcagttatagaaccttgtaaagatttatgtacatttgttctgtattgaactagtggttaggaaaactgtaatgttaatgataacgttgaatacttcasattttcagatgaactctaaggctaaaaaaaatgattttactctataactgttattatttattttataagtttgtctcaatttgtttgaatatcctttaatgaattattaatatattgaaatgtttcttctttcttaatatagtgatgatgaaaacacatttaaaatattagttgcaacagatattcatcttggatttatggagaaagatgcagycagaggaaatgatacgtttgtaacactygatgaaattttaagacttgcccaggaaaatgaagtgagtgtggtttgtatttgtgcactatctaccatattcccttggttaacaagttatttttccttctaaagttagagatttgttttataagctcaggtgcttaccttgcctgcttgaatatcaatatactgaaagctcaaagcygattttgtatgctttgtgtcttaaattcaagtaggagctacttttgtaaatagtctgttaaaatttacaaatgtttttggggtgtttactgaatgcaggatcctgtggcagtgtctattcgaaatgtaaggtgactgtcaaagcttctgctttcagataacgtagaagaaaactggtgtgaaagacaaatatccacaatccacagatgcaaggttgtatgtgataggagccctaagaaaattctaaataacatttcctttgagtttagaggcagaaaaaatcacgtttagattatagcaagatgagtttaatgaagaaggttgtgtttaacttgggctttggaggaagggtagacttttggccagtggggagcatagagaatgtacatccatgtgaagcaggagtgaggaaacccgtgagacagtataaggtatgttaggggccctgtagtcaatttggctcaccagcaggtcatagttagcaagcatgctgagagactagaaggaaggatttgagctgcattaatgaggacttcaaatatcagattgagaaatttgtatccagttcaagagaaagtcttttggcagcggagtataataccatgaattggagaccagttagaggctttttttgaagtattgaccttagggatggaaaagaggaaatgaatgcaagggatactgcaaaaagaggatttgtgtactttggttagttgtagcggggtggggatgagggcaaagggatgacagtgactctgaagtgtgtggagtttgggtgaatagttgtaccaaaaatagaaataggtagataaggaagaggtactgcttcatgtgggaaggtgacaaattctttgtttgatttcgacaaacttagagttggagactgcaatgggacattcagggaaaaatttcagcaggcagttaacacgccagcccaggagagagttggagaataaatgtaaaaattgacttgcaaattaacaccgccagccttgacttttctggagagttctcttaagtttatctgctaggtccttagttcttcctcccaaatatatatggttcctctctactactcttttcacactaataaacttagtccaaaacttgatcacatttcacatggcctgcaggaggtccccttccatctttctgcttctattcttttctgctacatctactcagcatagcagccaaagtgaacttttaaaataataaatcagatcatggcactctgttgcctaaaattttccaagtgtccttccattgaatctagtataaaattcaaactacaaggttcgacttgatcttgacccctgccatgaaacttcatctcctactactctctgcctgatttacagtgctacatccacaccggcatgttctactctgaggcccttgcacatctagttctttctgcttggagcacattgatcttggtggggccgacttctgagagttcaagtcttacctttttggagacgtcttccctgatacttccaagcactgttttatcacattactctgctttttttcatagcatatttttaatagcactatctgaaataatttattgaattatttacttgtttattgtctgttgtcttcactagaaggaaaactccatgagagtggaaatcttttgtttgttcatgctgtatcttagtgcttagaaagaatcagaaagcagtgggtatacatattttaaatttcttaattaagtgaggcaatggctggattctttcttttattttaggttcaggggtacatgtgcagktttgttacataggtaaactcatatgacagggattgttgtacagattattttggcacccaggtattaatcctagtacccattcattatttttcctgatcctctccctcctcctatcatctgctctctggtaggtcccagtgtctgttgttcccctctttgtgtccatgtcttctcatcatttagctcccacttacaagtatttgatttttctgttcctccattagtttgctaaggatgatggcctccagctccatccgtgtccctgcaaaggacattatctggttctttttaatagctgcatagtattccatggtttatatgtaccacattttctttatccagtctaccattgatgggcatttaggttgattccatgtctttgctattgtgaatagtactgcagtgaacatatgtgtgctgtgtctttgtggtagaatgatttatattcctttgggtatataccaagtaatggaattgctgggtcaaatggtagttccatttttagctctttgaagaatcgtcacactgctttccacaatggttgaaccagtttacacccccatcaacagtgtataagtgttcccttttctccgtaatttcaccagcatctgttcttttttgacttttcaataatagaatgtaaggtgcatttttccttccttgaaggcaaaaaaacttgtggccaaaggaggtctgtttcctgccagagaatcctgyatgtgctctttcttttttaactcttgagccctaaaacagaatcttctcctgagtgtaagctacttaattctactttgccctttccttcacttctgcttctactgtttctcttccctgcgtcccttaattgtaactgttccaccccccataaccccaggwagggacttctagatgtgtattatatttactcattctcttgatttgtatttagtatttcttattattgaatctaaagtcttcctgacttttaagtcccttattatgtgggcccatgcccactaaccagtcttagttctgttccctagtttcttggagtctttttttaaaaaaactttttattttgaaacaacatcagtctcacagaaaagttggcaagaatagcgcatagaattccttacccgtcacccaggttttctaacattttgtcacatttgctttatcttctctttacaaatacacacgatttttttcctgaaccatttgagagtaaaccgcatgtataatcatagaaaaccagaaaattagtattgattcagtgctattatataatgttaagatgttgccaattgtccctgtaatgtctgttacagcactttggaggctggttggtggtgtccaggatccagtccaggtttacatattgcatttagttgccatgtctctttgtctcctttaatctggtacattttcctgcatctgccttgcctttgtttttcatgaccctaatattttgaagagtacacaggccagttattttatagaatcttcctcaaattggctataagtggtatttcctcatgattaggttcagattctgcactttcggcaagaataccacagaagtgagtcgtgttcttttcaatatttcctggagtcactgccagccagtttaaaaaatttttttaaatgtttgaatgatggcaaaatatattaaatacataacataaaatttcccttgttaaccatttttaagtgtatagtacagtagtgttaaatatgttcatattgctgtgcaaccaatctccagaattactctcatcttgcaaaaatgacacccattaagcaacaacttcttttcgccccagtatgtttttcatttggtttgttgtttttgttttgtttcttccatgcctttgattgagatcattttcttccttttactcaaatagtgttcattctggaaggcctagcttaaacctcacatttttattaaagttatcctaactaccatacgcacagtgatctataccttgtattcttttgtgtgattaagaacttaagtttctttaggtgcatcgtatacgtcttgaaagcctgtgttagactttttctgtatgatttccctccttcactgaagttattcctagaattctcttcctcacaatcatttatctttcctagtgcaactaacatgccaccatgttagttcattccttctagactttctgtcctcaggcgaattgtcctcccttgagttcaaattcatcgtagtgtcatctctgctgctggttgcttacgtgtccattctagtgcaccccagagtttgacttatgtttaaatgtataacagtttgcctcttccattagagtttgaacatatttaggatagggatcatattttattcatcattgtatcctcaggactcagtagagggtcttgcatagagtcagtatttaatgagggcagggatataatctattttgtagattgctattttttgagcttctagaacctgtaggaattctgtaaataaatgctgaatgaattaaatgaatgatttggattgaatttggtatctcttcccatacgttctgttaaagtgctaagtttatgtttgattcaaataatagaaaaaatatgatcaccttgtgtggcctgaatcagagacttggtgtaattggaagatggcttttttgaagatagcttagtcagctaaattagaaccagattaattaccagattgaaagtccctttgaataaataaaatgtaaatttttaagttgccatatataatagtgtcttttgtgagtttttttttatctctttcatctgtagtttacaaaaattttacctgtaaaacatactaattttaacacctttttctgttgatcaggtggattttattttgttaggtggtgatctttttcatgaaaataagccctcaaggaaaacattacatacctgcctcgagttattaagaaaatattgtatgggtgatcggcctgtccagtttgaaattctcagtgatcagtcagtcaactttggttttagtaagtaagtatatttatttacttgagtgagtgattacttgtgtatggtatttgctgtataagacacgtaaacacacaactgttttgccttccatataagctattttcttagtaaatatcattctttgaatttttttgtacatcattgtattaatttatattttcctaattaatagtggaactgacccagctactcgggaagctgaggtgggaggattacttgagccccagaagcagaggttgcagtgagccaaaattgtgccattgcactccagcctaggtgatagagcaagactccatctcaaaaaaaaaaaaaaaatacatggtgggactgaatatcttctcaggtttatattgtacattttggtatcctctcctgttcatatcctctgcctattttaaaaattgagatttttttgtttgtttttctacctgaattgcagaagttacttatatattctaattagtaaacctttgtgatacatatattttttccmaatcaatggcttgtcttttgactttgtttatggactcttgttgacagaaatatttaatttttatgtagttaaatctattggtttttctttttttccatttgtgcctttgggactatttatgatatttgtcaatccctatattataaaaatatcatcatgtgttttttctttttttttttgatggagtcttgctctgttgcccaggctggagtacagtggcatgagcttggctcactgcaacctctgcctcctgggttcaagcaattctccctgccttagcctcctgagtagctgggattacaggcgagtagttgggattacaggtgagtagctgggattacaggcgcccatcaccacgcccggcaaattttttgtatttttagtagagacagggttttgccatgttggccaggctggtcttgaactccagacytcaggtaatccacctgccttggcctcccaaagtgctgggattatagacgcaagctaccgcttctggcccatcatgtcttaaacattgtacaggatctcacattgcatttagtagaaacgtttccttaatttcttcagcccatgtcaggttttctgtctttccctgtctttcatgaccctgatacttataaagaggtcaggtattttgtagaacgtccctcaatttggtattttctcctgctttctatgattagattgggattacaggttttgggggagaatattcaagaagtgaagtaccctttcagtcgcatcatatcaggaggtgcgtgacatcaacctgatttatcactggtgattttaaccttgatcacttggttaagctggtctctgccaggtttctccagtgtaaagtcattattttttcctttccatatgctgttggttagaattgagtctctgagtccagcttactctcaaagggcagggagttaagtttccacttctgrtggacataagttaaaaccaccaaagtaattaataaatattttagggtagatattttgaggctgtgcgacttttctgttcctccttaaatttgttcattaattttagattcatcagtggatcttacctacaacagttataactgtgatattctaattgtgattttccatttcctatattctttctacatgtattaattgggattcttttgtaaggaagatttgtcccttgtcccacatttgtttattcaattgtctatatcagtagaaacccatttttttttcctttgggttataatttattactatcataatttacttgtggcttaaattgttccagctttagccattgggctccttttgagattggctcctgtatccttttgatatatcccaccttttcttctgattttttactttgtctttcttgtcttcagactcagccatttcttcaaggaaccctggttccttttggagaatggtatttggaaaccaagatctggatgttacatgtgcacattactattgtattgttgcttctaggctctcastggacagagctaagaaaaatatgtgtacatactaacccatgagaatagacatactcatgtttatttatttatttatttatttatttaatttttgcttttgagacagggtctggctctctttcctatgctgtagtgcagtggcatgatcatagctcactgcagcctcaacctcctgggttcaagccatcttcctgcctcagcctcccaagtagctgggactatatgcatgtgccactgtattagtccgttttcatgctgctgataaagacatacccgccaagactgggcagttcacaaaagaaagaggtttaatggactttcagttccacctggctggggcggcttcacaatcgtggctgaaggcaagaggagcaagtcacgtcttacatggatgatggcaggcaaagagagaggttgtgctgggaaactcccatttttaaaaccatcagatctctttagacttattcactatcaccagaacagcacaggaaaggcctgcccccatgattcaattatctcccacgaggcccctcccataacacgtgggaattatgggagctacaagatgaaatttgggtggggacacagagtcaaagcatatcagccaccacacccagctaatttttaagaaattatttttggtagagatggggtctcactgtgttgcccagctggtcctgggcccaagcaatcctcctgccttagcttctcaaagtgctgtgattacacttgtgagccaccatgcccagcccatatttatttcttatttagtttttaaagtgtgactttatattgggaggtaaatttttttttgagattttgtccacatgaaaatgtttatgttcactttccccttgattgatagtttggctgcatatataattgagttttaaaagatttgtataatactttgtccttgtttttcaaaattgtgatcaatgtctttaccctccttctattcaaatctaaaacttggsacattttttattttttattttttatttttgagaaggagtcttactgtcacccaagctggagtgcagaggcacgatcttggctcactgcaacctccacctcccaggttcaagcagttcttctgcctcagcctcctgagtagctgggactacaagtgtgcaccaccatgcccagctaatttttttatgcgtttttagtagagacggggtttcaccaggttggtgaggctggtcttgaactcctgacctcaagtgatcctcccgacttggcctccgaaagtgttgagattataggcgtgagccaccacacccagccgggacattttttaacttcagtattttctttctttcatcttatttttaaattgcattctgttttgaaaactgtttccccaccctatatacatgtttacctatttctttgctcactgttgttccttgtatttcatttcttttgtgtagattcagtttccttctttctgaagcacagttttcagtagttttttcatggagtgtcagtgagtggtaaactcttattttttgttgctgttgaggagtctactgttaggtgagttgctagaaagtttagcatagtgattaagagcatgggttccggtataaaacagctggagttcaaatcctggttctgtcatttagtagttgtaaaattatgttagtcacttaactactctaccttagttctgtccttcataacatgggaaagaaatgtgccaatcttacagagttgagaagattgagatgataagaaaaatggctagagtagtgaccagcataaagacaatacttgggtaacttaagattttctcrttgktcttaacatgttgcagtcttatttagctgtggatttaattctgtttgttccgcgtgggctttatcatatattctaatgtaatattgtttttcagcaacttggggaaattcccattctattcattatgttttcaaatattgtttcctttctctttctgaatatcatttatatagcatactattaaaaaaaatattgcccataactttacctctttgtgtttcattttggataatttaatcttccagttcacagttcatgtagaaaataggcaaagatagggaaatcccaaaaaagaagactactaaggagttagtagccaattagatttgaagtataacaatgctacaataattgaaaatgtggtatggctcatgaattagtagataggtaagtgaaagagaatagaaactctagaaatagcctcaaatacatgtaggaattgagtatttgatgaaggtcaccrtctcacaatgtaggggaaataatggattcagtaaaactgctaggagaaactgttacacatattttaaaaatctaggtgtggggaaggcttctaagtatgacacaagacccagaagtcataaaagattcatacatttgtctttgcaaaaataaatttctgcatgccaaaaactgcctgaagcaaagccagaagtcacagttcaatcaggaagaatatttgcaaccaattgcaaattaaggttgaattccccaataagcagttctttcaagacaataaaattcatgagttagtaataaataaagaatatggacatacttcacagaaaaggaaataacatgacatttaacttttatttttttttttcgagacagagtcttgctttgtcgcccaggttggagagcagtggcgcgatctcggcttactgcaacctctgcctcccagattcaagcacttgtcctgcctcagtctcccaagtagctgggactacaggcatgtgccaccatgcacggctaatttttgtgtttttagtagagacagggtttcaccatgttggccaggctcatctcgaactcctgacctcaggtgatctgcccacctcggcctcccaaagtgctgggattacagatgtgagccaccgcatccggcctaaacctatttttaaaagtttgatttcactcataagaaaaagacagagctatactgaaatatttttctcctataaggttggcataggtctgtgactctcaatcctgagtgcacagtacagttacctaagaacctttgaaaatatggatggccccctctccaggccaactaacttagagtctctccaagtatgtcatgggcattggcatttcttgaaagatccccaagataattccaacatgctgctagcattaagaactgctagcatagatttaagagctggatgacmtactgtgttagtgaggtaggggaaaactgtccctcttgtgcactgccattgcattatgtgtaaatctctatggtgggaaattggcagcacctatcaaaattacaaatacatgtactctttgacctaacaattcccttccaggtattcctttacaggtcgactcaccagggcaacaarattactcgctgtagaagattactttgtacaagattactgactgtagcattgtttgtaaaacaagactgccaagaatctaaatgtccattggtagggaactgctcaaacacattgtggtgatccatgcaatggagtactgtgtggctgacagagcagaagaaaggtcttcatgtactgatgtggaatgatttctaaaatatgttgagtgataaaagcaggatgcagaaatgtatatttttctatcatttatgtaaggagaaagaaaaatctgtttatttgtgtggataggtataggatccttttgaaagatgcactagaaattgctaacattatttgcctctgagaagaggagctggatggctgggggcaggggctgacaggagactttaatttgaacaggcaataagtgatagagctgggagttttaatctacctctttgggattctaaagtatatggattttcttccctccccccactacgaataaaaaccatatgctaagtttttaaaattttgaaggcttattaacttttcattaattagatatactactcatacataccacaagcactgtttattatagttggggtttctttaaaatgtagtgctttgagatattttcaaactaattgaaatgaattgtcgcctatgattttattttttaaagctctaaactagtggtcatatgccaatgtagattatgcagtttgcctatgattgcattaatattttggaggagaatcttagggaaaacagcttttgtcccgtatggaaattttaagtaactttttttttttaaggtttccatgggtgaactatcaagatggcaacctcaacatttcaattccagtgtttagtattcatggcaatcatgacgatcccacaggggtaattattgttttcttagagtttgttggaattttggaaatgatcagtttagtttgtctgtggaaagcatgccttccctttttctcattgtgtagtcaaattgagtcaaaagtcaagttgacttttcacattcatacaagcttttatactgctttttagattttttaaaaatctgaaataagaattggtgtatgagctatgcttttatttcattaatactgatgttaacaataagaagccaggagtaggagtgaacacctaacatctgtatagtggtttacagtttgtcagtgtttttataactatcttataaaatctcacttttaggaaatgattgttcawgaccatctttaaatctaaattagattatcttattacctgtttgatatggaagtaagactagagatcctacaagtattttttcattttatctggtcattaatattatgaatcactgattatctatggtcttttttccccaggctttaagacggttgcttaatattacaaagcatttatctcatggctaatttttatttttttgtggccaagacatcataagttttgatgagatattaaccttgcctttggcatgtgattccagttgctgtaggtgatttgtagtacaaaaatgtagcaaatacttttactattgtaattttgttttgagaagacactatcctcayctatrtttttgtaagtagaatatggagtatgcttttaacaggtgatacgatattcatgcagatacctacttttacatacacactaacattctttgaaattattttrcataggcagatgcactttgtgccttggayattttaagttgtgctggatttgtaaatcactttggacgttcaatgtctgtggagaagatagacattagtccggttttgcttcaaaaaggaagcacaaagattgcgctatatggtttaggtaagacagttttattttactgtttatgtccatgtgtgattctttaaacaattgagaaatttggagataagtttgtatctgtttggaaaaaatggggcaaaccttattctttattggtgactataaaaaatgatggatggttttggtaaaaatttttggtgaaaaaatgtcttttcgttactatttattattttgggttttttttagactcaggtgtagaatcctgaatgttagaattatagaataattagcaaaactgcactttgatatcttggaagtctttgaaaggtctaatgcttcactgtacaataccgctagcttataattttgtgcagctttcataatacctctggcaagtagaaaagcatcatggttatttatattttagagataaggaaaatgaaatctggatgttatatctgattctgcaagtgaaagagcaggaagtgaaatatacttttcttaaaaaagctattaacagttgttttaatcactgcagtgttattagggatcatatctccagaaaattgcctttcctcctccattcagactaaggacagattccattatgcctcagtcaccaccagaagcacatctctccagtcatccattttctcccaaactcttatcttatcctgttctattataccttccttaactggactctgtctccaccctgcacccctccctgtcccccagctcttcattataaactctagaactctttttataattatcagattcctcattattatcagtctcttctctgaatgttacctccactttctaaccttcagtgaagcccagctgtcccctgaggttcctgtgtcccatrcagttctcttacccctgggcttttggaaagaagcggggatcactgttctccttgctccacccactgcttccttttctgcctgcaaacacactgttccctttaagcttctgccatctggctaaaccgcattgctttttctctcagactttttacctacttacctaccttcaattttgccagtgtttttagtgtttcaacactcaagtagattaatcttctaatgccttgggctttgtgtgccttgacttttttgtctccagttacatgttctacattccacctcagccatgtattccattggccactcctgtagcattctccttgggagctaggccacttctaacttctagacttctacattgttggcttttcttctgagaccctctctaatccgtatataaagtagcagtgttgtccacccttttaattccatagtgttaattcgccatcttagcatcctggctttttctccttttataatatttaatatttgtaactattttgttgacttgtttttgttagtttctttcactagatcaaggtgaacctgtggagtatgagaattgtttgaaagtcattgagttatttaaaaagcacaatatattaaaacaatgtaagaatattgtttttaaatacacttttatcatcccttttaatatttatttctgcacatgttataatgtatatattagatcaaaagtatatataatttataacaaagggatggtgaaaaatagtattactagaagttttaataagaattttaccatagaaaactcacatttttattctacattttgctggttttgaacatgtatatgtctgaaatggaaaatgtttttcaaatgcaactaactactgttatcaagaacctggaacaggccaggcgtgctggcacacgcctgtaatttcagcactttgggaggccaaggcaggtagatcacttgaggtccggagttcaagaccagcctgtccaacgtggcaaaaccccatctctactaaaagtgcaaaaattagccagacgtggtggtgcatgctgtaatcccagcaactcaggaggctgaggcacaagaatcccttgaacccaggaggtgaaggttgcagtgagctgagatcacaccactgcactccagcctgggcaatggagcaagactgtgtttagaaaagaaaagaaaagaaaaaaaaccctgaaacagctaggcatggtggcttatgcttgtaatcccagcactttgggaggctgaggcgagaggattgcttgagcccaggagtttgagaccagcctggacaacatagcaagaccctgtctcagttaaaaaaaaaagataaaaaaagaacctgcaacatacccacttataaattattccagaattcaaatatatctcccaacagtaaagtgaaatactttgagaaggacataatttagaagcaaaatagattcattttttaagccgaagtaagaaaacaatttaaaaataatgtaatgtccatttcaggatccattccagatgaaaggctctatcgaatgtttgtcaataaaaaagtaacaatgttgagaccaaaggaagatgagaactcttggtttaacttatttgtgattcatcagaacaggtaaaacttttctctgaaaaagtttgagcsaagtgctgaggcttcccaaatctgtttctgagcttacctattttagtgaaatgcccttaatctttcaaggttgtcaatgcaagatcagacaaaacatagatttgctttgtgtgatttcattttgaaattgtttttagtatatattaatacctacaagaatatttgtaacataaggataaggcatacacatgaatactcctcaattcaacaaaaaggtagaatctttttgttggattatccattcctttatcccattccttttccctgatcccacctgcttccccctatcccaaagggaagcattattaattttgaattaattatttcattgcttttctttgctgtttaatcacatgtatactcatattatgctatatttacagccaacttatgttcagcattacattactgagatccattttgatgcttggatgtgtaatttatttttactgatgtgtacagttatgctttgcctcctgtcagtgaacaggagttttttgcttttataaaccttgctgttatgaacattcttagacatgtttcctgctacatatatgcaagtgttcttccaggatatacaaatatagctagattacctttcttttgttagtagttttaagaaatttaatctgttggcagggtataggattgattgaaaagaagacagacttgaagaagcaagatttattatctgatcactgcagtaaaaatgtgaggtggtgacagtgatggcaatgaaacagaaatgggagggacacaccggagaagttgtcagggaagaactcaaaggatttggggcctgattatataatttattacagttgtcccttggtatccacggggggtgttcrgtccaggacctaaaatcctgggatgctgaaatcccttgaataaaatggtatagcatttgcatataacctacatatatcctcctatgtactttaaatcatctctagattacttgtaatacctgatacaatgtaaatactgtttaaatagttgttatactgtattgctttaaaaatttatatttttcgttgttattttttattgtttttttcctgaatatttcgatctttagttggttgaatccacgaatctgccaatacagagggccagctatatttattgaacacatttattgaatgcagactactctgtgcattcagtgaatgcagacttaggttaaatactcggtaaaagaaagggtttaagaggctgacttgtgttaccttatgtgtgagttcttgaataaactgtgagtttcaaaggaggggcaggccagagtttagatatgtgtgtggtcttcatataactttgcaccactgggatttgttccttctcttccatagagcttcccaggtctaccatttttttgtactatgccaaagtagggatgatgagttgaaaggaaaactcataagtaattctaagaatttaagccaaatgaaaggtagaatagcagcattggtaaggggaatgggtagtcaccatatgatgttgatttttctcattgcccccctcatcatttgattaagggaatgtgtaacagctttctctgctgtaaagttcccattttctacttttcaattaataaatatttttgggaaaatactttgagactatgcaaatatcctgtttcaycttaaacttttactcgctaattttagcatccatgggtgatcttatttccagtaattaatactgtggtattttaattgtaagttttgatttccttcattctttctatatttattaatggaattcttctgtaaggaaaatttgtcccttcttctctatttacttacttatttatgtcattatggacttgaagatccagtactatcagttttttggttgctactgttcctctgattgttgcagctttgaccattgcattctcttttatgttggcctctgtgtcctttcaatgtcttcccayctgttttgaggtcatgaccttagttagctttttggcacctcaagatggtctaggctcttggctcttgtaatggcaaaaatcacaattacttttgcaccaacctgatattttcctacctagccctggaatcaaccatttctccaaggtgctctgattctttttattggagagtggtattcagaaatccacaaatgcgtactaggtgtgcttactgctaccagggcttgctcagcactctgaatgaacagagttatgggaatagatatatgtgtatatagtaacccatgcatacatacatgtctatatatgtgcttaaaaaaccaatgataagttcagactgattctaatccagccctacaaggtccatttttgtcttctccctttccttacttgtgacttctttgtctaacagaagcctggatcatattataaatatatatgtttacttattttttcaatcttggtttaattatatttccaatcctggtataatttgaaattataaagtaatttcaaaattgctaactcatacccctgtgcaaaacaactttcccaactaggttacaatgtttgtgtaagttattttagtctttagcctttctgtatctagttgaaacctaatttttcaaacttacttagctcattttctccccacccccttcactgtggttatgtggttctttggtaatgctgttagattcatttgtcaccctgtgcattctcaagatacttctgctttcatatttaaaacaaagaaggttttcacagattgggtgagaatcttgagccttctgcattttgccttatttcccatttgtttctctacatcaactgtttttttctcttgtttcaaagaagaaagaatctgaatttggagatgacttggtcatgcaaaatctttcaacaaggatattgtgatcacttctaggtcacaaattacagtcagcctaccagcatcatcctcccttcttcttccgggaaagaaccagcactcaatgaaggcacaatggcatcatgttgtatttgggaattattctgcttttctttagtagttgtgataatctcataccttagatgtatgttttttacataaaaacattcctggatacacaagcctgtatattctgtcttccctgcatttattctgcttagcccttctgttctccttgctgttccttgaattcactgaacacattcccactttagcaccatctgctcttctactgcttaggactttctctctccgcgtactgatgcttcatctcagttctctgctcatttgatgctagtcagagaggtcttcctgactaccctgtgtatgtagagaggagtatggcacttctatgtcacttttccctttatttttctttacagcacctatcactaactgacaagttatacatgtgcatacttacacacatgcatatacatcttgtattagagattgagtatcccttatctgaaatgcttgggaccagaagtgtttaagattttggattttttggattttggaatatttgcacatatgttggggatggaacccaagtctaaacatgaaatttgtttacattttatatataccttatacacatggccttaagttaattttatacatgttttaaaataattttgtgcatgaaacaaagtttgtgttaagtatttatgtgtggaatttaccacttgtggtgccatgttggcacttaaaatattttggattttggattttcagattaggractcaacctgcattgcttgtttcccacactagaacaaggactttgttcactgctgtgtcttccatatctagaagaagcctgggacatctgacataaagtagacagtgtttgggtaacagtatttgttgggtgaatggaagaatattggtttggattaaatgaatgcttggttaaactatgtgaacacttttacttgaatctccaatgatgtaagttaatattagggaaaactattccttcttgtcttctatcaccttgcatttcatgtatctttaaataataactgatataggtataataccatagtttgcatatcacttgtttatttaatatttgatattgaaaactcttagcacttatgkgagattgatgtttttactcccattatatttattagtaaaaagataatgttaagaaattactggacatatttatacttacttgcattttctgtgtgttttctctagtatatagttagactgatttatagatttctactattgatagaattcrtgcttttctgattgaccaaaggggaaatccttcctatgtaaaacctttcatgatcttcctccaaatatagaattgactgctttctcttttcgggtttccacttgtctgtgtccaataagtttgtaaagctctcaaggtcaggagttagcattgatgatctttacattcccaatcctgtgcacactttctggtacatagaaggatgcaataaaatctttagtgaatggagaaagaaagatctgtatagacttcaataatatgaaatttttctaatcaccgaatttatatttttcaaaatcttgatacaggagtaaacatggaagtactaacttcattccagaacaatttttggatgacttcattgatcttgttatctggggccatgaacatgagtgtaaaatagctccaaccaaaaatgaacaacagctgttttatatctcacaacctggaagctcagtggttacttctctttccccaggagaagctgtaaagaagtgagtgttatatattttgagccaatttttaagaaatctttgctataataactaatcatctcataggtttaaggcctatgttaaggttaccgctaactggcagtattgtcatttatatgatagctttatttttgaaaattgatcattctgtgtagtcttattgtttttccagattttaagccattttcaaaaagagagcatccaattggtgttattttgctgctcattaggcaaattcaagatgcacatttttattatatttcaaggtagatgttttaggttgatgattactaatttcacaaagttcattataaaaaattatcctaaaaccatttaattgaaaattttctgattataagtgcagtataatagatctcatttttaaaacatttttgggggaatgatatgattgtaagaagtagttaacagtgattaaactcaatttttattatgggttttatcttttgaatcacttgagttctgattgttacaatgataatagggttaaagaatatggtagtagaatctatgttggttggttttttttcttcatgagtccactgcaaaatcattttgtctatatgtgtacatgtatgtacatatacataggtatatagatgtaatactatagtctacatatgctaccatcatagtcctgttaacatttttttatgcttattatgtctatcttacaagactgatcagacagggataataatggatgagttgattttactctggggaaggaaaatgtctaccatcttttcctgtgatgataacattaaggttaaattagcagaaacatttatttttaagagtatgattttataaagaagcatttttagaaactaagaaatatgaaagctttcgtwtgcacatcaccctgaggaaatttacactgtgactcggtgttcatttctctccacttcagacatgttggtttgctgcgtattaaagggaggaagatgaatatgcataaaattcctcttcacacagtgcggcagtttttcatggaggatattgttctagctaatcatccagacatttttaacccrgataatcctaaagtaacccaagccatacaaagcttctgtttggagaaggtaattctttttgataaagtcaatgagatctactttagttgaagaattattcaccttcaattaagtaatttaatagagtagagggaagcctttatgttgattacattctcatgaagcctgtaaggacactgttcttcagtgaatgtgtttaattgtgtccaagatttttttttttaagtcattgagagagaggaatactggatgttaaaaaaaattaaatctctctcctagtttctttcttccttttcaaaaacataatacataatcttttctcctttttaatyctgatttgatgatttgttcattttatttatgaaagcaggcagtaactttgattgaggaatgggagactatcgtgtgtgagaaaagccttagcttctaataatctgtattaggcgtccctttcaccctgaaagctaccccaaatgaaatgtgaaaaatgtgtttgctatccaccctattgctgcaatgtaagtcccaaacctccctctctatgcacattgccacccctaaatctctagaaaatttcagccactactaaggttgggtggattaatgcatttaataatatgtggtttgacagcttaattagcatcacttgctgacgctcagttcttaactctgtgtcagctgtcctactatgttttcttttcatgaaaaatcaggtaacatagtaacaatgataataattatgaccagtgatacttactgatttactgtatgtgatgtgcactgttgacagcatttaatctagccaacaatactatatgtgagtagtttctaccatctatagtttagaggaactgaaccttagataaggtgactcattcagtgtcacagctttttgagcagtgtgtagctcacgtaaccaaaagtgtacgcttgtttcaagatgattgactctagaaactcaaacatagattaagattctggcatccctaaatccaatctctcaagccaaagagatagaaaatgcattaattgcttttgcattgattgatccaggcctgagtcatgtgcccttccctggagtcagacctgggtttttcaactttggcttagttgacattttgtactaataattctttgttgtgggaggcagttctgtgcactctgggatgtttagcagtattctccctggtttgtacccactagatgccagtagtaccccttctaactggtcgtgatgatcaaaaatgtttacagaccttgccaaatgtccttagagaagcaaagtcacctctggttgaggtctactgtatgaacttcacctaaatcctgtgggctttggtgacatgaatccagagaggaaagtagacgctggtgacacaaagtaatagaggttcattttaaacaccaggtgtgcacataactttctgttatctctgtattttatgtacatttctgttattgtacttagttaagttatattattttttataagcatgtgagtgtcttctgaactctttgaggacaggacccatatcttacttttctgtctcagcacttgacctagtacctggcaaaatgatgctctataaatgcttgttggattgaaataattgacctaggagatcatattcttatagattttctctgtgctgtctgatatgtattcactagcacatgtggctgtttacatttaattatttacatttaaatttaaaattcagtttctcacttgtactagccacatttcaagtactctatatccacatatggttttggcaaccatattgaatatgcacatagaaaaaattattgcagaaaactcttttggacttcattgttacagacagtttaaaggacaagattataaagtcttagatgtgaaagaaatctgaggacaaaaacacttgttctgtattgttcttgagatcaggaccaagttataggaaggcagtttttgttccaatacaagaactttctaagaactagaattgttcagctatgaagttggccatctggagatatctaatcactgtgcacacagccatttatgaaaataatctagtgctgtctccttgtaacttggttttacccttaagaacaatatagaacaagtgcttttgtcttcagaactctttcaagtctaagatgttataatcttatcctctcagagtatgagacaactccacatatttgaaaayatcagtcttattttcttttaccttgaactcttccaagataaataatctaaagtccttgcttatwgatccctaaatcttctggtgagtctsccatggatcatatgactgcaaaaactagacttacttggttttaagttggtaagctgaggaaagccttattgaaacatgagtagtaatattttaagttttattctaaaagaattattttagagattgaaaaattatgaagaactttcatgaaaggaaaacattaaggaatagtattaaaggagcattacaagaaggtatatttgaaaaggtgtcataaatgacctaggaaataaagatgattatgtagttcaggaaaattcctgtggtaataagctgctattcagccaagttaaactcagtttactacgttgttttttaatctttttaaaaattttgagattgaagaaatgctkgaaaatgctgaacgggaacgtctgggtaattctcaccagccagagaagcctcttgtacgactgcgagtaagtcctatttatayagattgaatattattaattttcaaagcatagtaatgtacagtttacatggtttctttgaaaagtagtgaggagagtgctcatagtaataagaagagcaatcaccatcggaggcaaaaacaaagatataaggatttgagttaatcacagtttaagtgataggtttggtaacttatttttctcattttctaaataatttgttgttatatttaatagattggctgagctctctggcttcatctttaactacctcctctactcacttcattccaggcatcttggccttctcgcagtttcttgggcatgtgggatgtgctcttatctccctttagtctgctcccgtgtcacctcactgcagccctatcatcaagattgcagcccctaccttctctccagtgccctgatttcacttaccttcttctgcttcctcttttcttcttatttttttccccgtaacacatccttctaatctatgtacggtttatttgttttggttattattaggattgtttcctgtgcctataaatctgcttatcctttctatcgtgttataaacaaagaaacaacaacagacttcttctttaccactatgcttttcccttttccaaactcctaccccatgttgcttactctctttaaaagcccctaaaagtatataacctatatctctcttaactttctcttcttcagttcactataaccaaggctctgacttcaccataaccagtggaaaagatgacctttaattgttcaatccaatagatcgtgtctcatcttgctgaattactcttgggcattctctgagttatttgtatccgtcccgtctcatagttagccctcttttcagtgtaggcatacagctttaatgaccaccaatagagtgatgacttcaaaatctttacgtagacctccttcttgttctgtatctccaggagtcccctgaggcctggtactgaggagtgtagtctttaaaccagcagtgttgttgttgcctgggaaattgttaaaaatgcagagcctcagaccctgcatcagaacccactgtattttaacaaaaatctccaagaaatgtatatgttcatgaaaatttgagaagtactgggatgtagactgtggaggtaaagagtacagtgtagagccagacttcctgagcttcattctggcccaaccactagttgtatgaccttgagcaaccgcatcccttatcccttggtttgtattaggttggtgcaaaagtatttgygggttttgtcrtagaaagtaatggcaaaaactgcagttacttgtgcaccaaccaaatgcttcgtagatttatgagatctaaatggattaaatagtgtctgttgcacagtaggtaatctgttcccgtttctttatcccactgtcgctggcatagtgaagcccttattaatacttcctggcctattgctgcagcctcctaccaggactctgcctccagtttccttctctctccacactaatgccaaaatgatctttgtaaaacacagttttgcatgtcttttctgctaaaaataacttaattattccccagcactaacaggaaaaagtctaaacttttttaggttagcattcaggggtctacatgatgtggtctaaaccaaaaaagctgccgtcccctgggtgcagtggagtttatttcactggaacctttgtccatgttgatcctgttgygtgggacatacttctctcctcctttctctataccttcttcagcacccacctaaagcctctgtcttcaaagaagcctttcttgacctgcccacagagaacatgcttcttcctttgtgtcctcatycaactttgtacatacctcttatagcaccactcacagtctgcttccagtgatctgtttacatgtttttcttcccagtcagtttgtgaatttcttgacagccaagattgtatttatttatggttgtatccctggccctgaacagcatacttagaacattgaggacatccaataaaatttgttatgaccaaacatttataaatgagaagtttgaaggagagacctaatagctttagcatttagtattttgtcttttataacatggtagctgtagagatgatctgggtaaggctgggcatggtggctcacgcctgtaatcccagcactttgggaggccgaagtggctgaatcatctgacgtcaggagttcgagaccagcctgggcaacatggcaaaaccctgtctctactaaaaataaaaaaattagccaggtatggtggtgcatgcctgtaatcccaactacttgggaggctgaagcgtgagaatcgcttgaacccgggaggcagaggttgcagtgagctgagattgtgcctctgcattccagcctgggtgacagtgagacgccatctcaaaaaaaaaaaaaaaaaaaagagagagagagagatggtctgggtaatacaaaaataattactttaagggaatcacatagttctcttcattatggcaaaagatcccaattttctcatctgtgtctgcctcacagcattaaaactaaccagactttaatagaaaattggcatttcttttcctaagcacagtaaattacgaattcattcataaaacagcacatattgtcatataagtaatattacaaaactacattgtastgactaaaagacattcattaattcattgactaaatcttactgagtacctgctattrtggatgctgcaggatatagggatgataaaacagatgaggttttgaattcgtcgagcttacaggaggtggaggtgcaaagagagacatgatacacaaatatcaaataaatgaacaaaaaaccttagcagatagtgatgatgagtgaaagtgggagcactttagttagggagcattctggataagctgtgaggtggtgcagtgctggtccccatagcgtactttgggaacagctagttgagaagaacatatctctgagaaagaaaggtggtatttgtctttgtaaaggtctgtttaccactacagacttctgtagaaagagtctaccttgagagaagttctcagtttcagtgagataccatgttttggaggtaatcatttctcaaggctcacagatttgattctttattacctggatgttcctagcattcatctttctcttgaggcacatctctaagatgatagaccaatttactaatgcatttaaggctagtattttattttggtgtgtgtttgtttgtttgtttgttttgaaagttcagaaaattgttttcagatggtttgcttggtaggtacctagactattagtgttatcagggggagatgtaatcattctgcattgtggaaattattgcaataccttgattccatcgaacaaagtattttgcttatgcttataaacttttcaaacattagtttctcartaggataaatgatatagctccatcatgatctactgtagaaaattaattcataaatttcaaagtatcaagcataaacactgtgaatactgaaggattagtgtgtgttttaaaaattggcaaattgttgtttcctagcgttcatagattattctgtgttttcaggtggactatagtggaggttttgaacctttcagtgttcttcgctttagccagaaatttgtggatcgggtagctaatccaaaagacattatccattttttcaggcatagagaacaaaaggaaaaaacaggtaagctagttatttttaygaggtaaaaaaatgttcttataggatttgtgaaggaatctttattaaaaactgtaacataataatggaagatgttttaatatgattgtaatgtcttaaacaaattgacagtgggaataattctcttgtcttctaaaaattagatagcaatcttttttattattattataccttaagttctagggtacatgtgcacaacgtgcaggtttgttgcatatgtatacatgtgccatgttggtgtgctgcacccattaactcgtcatttacattaggtattgctcttaatgctatccctcccccctcccccaaccccatgacaggccccggtgtgtgatgttccctgccctgtgtccaagtgttctcattgttcaattcccacctatgagtgagaatatgcggggttcggttttctgtccttgcggtagtttgctcagaatgatggtttccaccttcatccatgtccctacaaaggacatgaactcatcattttttatggctgcatagtattccatagtgtatatgtgccacattttcttaatccagtctatcattgatggaaatttgggttggttccaagtctttgctattgtgaatagtgccacaataaacacatgtgtgcatgtgtctttatagcagcatgatttataatcctttgggtatatacccagtaatgggatggctgggtcaaatggtatttctagttctaggtccttgaggaatcaccacactgtcttccacaatggttgaactagtgtacagtcccaccaacagtgtaaaagtgctcctatttctccacatcctctccagcacctgttgtttcctgactttttaatgatcgccattctaactggtatgagatggtatttcattgtggttttgaattgtatttctctgacgggcagtgatgatgagcattttttcatgtgtctgttggctgcataaatgtcttcttttgagaagtgtctgttcatatccttcacccactttttgaaggggttgtttgattttttcttataaatttgtttaagttctttatagattctggatattagccctttgtcagaagggtagattgcaaaaatgttcycccattctgtaggttgcctgtccactctgatggtagtttcttttgctttgcagaagctctttagtttacttagatcccatttgtcaattttggcttttgttgtcattgcttttggtgttttagtcatgaagtccttgctcatgcctctgtcctgaatggtattgcctaggttttcttctagggtttttgtggttttaggtgtaacatttaagtctttaatccatcttgaattaatttttgtgtgaggtgtaaggaagggatccagtttcagctttctacatatggctagccagttttcccagcaccatttactaaatagggaatcctttccccattgcttgtttttgtcaggtttgtcaaagatcagatggttgtagatgtgcattgttatttctgaggcctctgttctgttccgttggtctatatctcttattttggaaccagcaccatgctgttttggttactgtagccttgttgtgcagtttgaagtcaggtagggtgatgcctcgagctttgatctttttgcttaggattgtcttggcaatgtgggctctgttttggttccatatgaactttaaagtagttttttccaattctgtgaagaaagtcattggtagcttgatggggatggcattgaatctataaattaccttgggcagtatggccattttcacgatattgattcttcctatccatgagcatggaacgttctgccatttgtttgtgtcctcttttatttcgttgagcagtggtttgtagttctccttgaagaggaccttcatatccttgtaaattggattcctaggtattttattctctttgaagcaattgtgaatgggagttcactcatgatttggctctctgtttgtctgttattggtgtaggaatgctgtgatttttgcacattgattttgtttttattttcatttttttgagacagagtcatgatctgttacccaggctggagtgcagtggcgtratctcagctcactgtaagctccgcctcccaggttcacgccattctcctgcctcagcctcccgagtcgctgggactacaggcacctgtcaccacgcccctgctaatttttgtatttttagtagagacggggtttcaccgtattatccaggttggtctcgatctcctgaccttgtgatccgcccrcctcggcctctcaaagtgctgggattacaggcgtgagccaccgcrcctggtctgcacattgattttgtatcctgagactttgctgaagttgcttatcagcttaaggagattttgggctgagacgatggggttttctaaatatacaatcatgtcatctgcaaacagggacaatttgacttcctcttttcctaattgaataccctttatttctcctgcctgattgccctggccggaacttccaacactgtgttgaataggagtgatgagagagggcatccctgtcttgtgccagttttcaaagggaatgcttccagtttttgtccattcagtatgatattggttgtgggtttgtcataaatagctcttattattttgagatatgttccatcaataccgaactaccttgacgtcacaaggcaccagcagtacccatgattgcttttgcatcgtcagtgtagcaatgatggcagatggcaaaatggcaaataacatcttaggattattatgaaagtatttttgacgttattactccctgaatgggtcttgaggacctccagaagtctgtgcttcacccagtgagaacagctacaagacacctatcctggaggtatgaacgagaaatactgactgtggggaaaagaccgtggctattaacaaaaatggcttgttttgcctcaaaatttaccatgttgagcaagctggcagttgmtaaagtttggccttaccttctccactgacaacttgcaatgagtatgcrcattttaacattatgatagaagctattttttgatatacttctttttttctaggagaagagatcaactttgggaaacttatcacaaagccttcagaaggaacaactttaagggtagaagatcttgtaaaacagtactttcaaaccgcagagaaggtaatttcttacagttcacattttgaataatggctaccttatagtaacagattttaatttaggatatgtttagttgatagtttaaacaaaatkaatccwcaaaatgtttctatgaagtaagtagggtgacaattaattacattcatttgcagttgctgcacagcagggaaaattagtgtttaattaatgttagttattagtactgttattaatatagctgttattgttgatgttgttattctctttctttgtatctctgttgcaattattaaactgaataattttaacttaaatcagggacattcttaagtgaaacttagaagtaactagggtgacatttacattcatttgtagttgctgcacatcaaagaaaattagtgtttaattaatgttaattgtgaataccattattaacataactgttattgttgttgttattttcttactttatttgtatctctgttacaaagatctcaatccagatttagttttctcacatttggatgtaatttcagaattattctacaaacaaagacagccaaatgatggtgaagccactgaaacttacgtcataagtatatgccactctaagatcctccggttgtattagtttcctatgggtgctgaaacaaatttccacaaacttagtggtttaaaacaacacaaatttattatcttacagtcgtgtaggtcagaaatcgtacacaggactggaatcaaggttttggcatggctgtcttcctttttggaggctctaagggagaatccatttycttaccttttccagcttctagaggtgcctactatgttccttggctcttgctctccttttatcttcaaatcctgcaatgttgtatctctctaaccatttccccagagttatttttccttccagctcccatctgcctccctcttgtgcttttcaggacccttatgattacactgggcccacctggatagtctctgatactctccctattttacagacagctgattagcaacctttgttcctctttgccatgtattcacaggtcccagagtttaagacgtggacatctttagggggctcttattttgcctaygacactggttaatttcatctctattaatcatagctgccatttttggactccatatcctagccatcaggcctctacatttcacgtgtcctgtactcctcccccatttctggttttgactttgctttttctggttcctgatattagtaggcttaactacagctgttcactatattttttctctggtaacatatttggtaattttccttgctcatctataattattttgtaaggaataaaaactatttctgcatccagtgatttgtatcttacagaatgtgcagctctcactgctaacagaaagagggatgggtgaagcagtacaagaatttgtggacaaggaggagaaagrtgccattgaggaattagtgaaataccagttggaaaaaacacagcgatttcttaaagaacgtcatattgatgccctcgaagacaaaatcgatgaggaggtaagtaactaatttgagtgtctaggtctatttaaatagtctgtctttaagagtagctctgagatttttttctggtaaatcactatttaacctctctgatttgtttagtttttctcatctataaaattgaaatgataaaatgaaggttaaattagaaaatgtagaaaatgcctagaacagagtcttgcatatggttggtactaaagtgttttgttccccatggatagtatcttctcttaaagatcctttgaaagggctttaaagtgaaccttgtaggatggtaatttttgttcattttaatttttttagtaagttttgattgagatcttgaatttcatttagaaaatttctgctaagcaagaagcagtggaaaaattacaggaaaagctgtctagacttgactacatagaaattataaatgtttgcatatcacattgtcaaaaaacaaaattaaaagatattgacatgaamatatttgtatgtgggcagaaaaaagtttaatattcttaatattaatgagctcttagaaatcttaaaaataattaaacatttgatagaataatgaacaaaggacatgaataggtggttcataaaagaaatataaatagctaataagcatatgaaaatggtgtttagcctaggataatcaaagaaactcaaatacatcttttgtttgtcaaattggcagcaatttgagaaaaatagtatctagcacactgctggtagtagtattacgtttgaatagctttactgaaaagcagtttggcagagtatattaagaggcttaagatttaccctttaactcagcctgggaaatttccctatgaaaatagtgaggtagagatttgtgtatggagtgattcatcttagtgttgttcatagtggggaataattggaaatgttttgatacaataaatgttggtacatataccatataaaattttacacagcttaaaaatgacattttggaagaagaacatgagaagatatttctaatctaatgttaattgggaaaagaatttcaaagataaaaaactgcgtagtataatctcaattatttttattttatatgtaattgtgtatgtttatgtaaataaagaaaatatcccagatatattatcaacagttatgtcaaggtagttatattacaggggatcactttctctatttcccagattctccctaagcagaagaacaaaacaatgttatttaaaaaaaaaaaaaaaactcattcccttattttagtgcttttggttaacatggttctcttaaagccttatggtgtcaatgtgtaactaatattatttaataccaagtacttccagaggtaggacaggcagttcaccctctaaaaccattcactctatggactctggatgtgttgggtttgctaatttatagcataaatagatttctcaggtacataccagaaataaaacataaccatccccacctggagtgacatcatgactcctgagcagcaaagtctgtgtggggtgtgtgtgtgtgtgtgtgtgtgtgwgtkagagagagagagagagagagggagagagagaaagagaaagagtgtgtgtgagtcatggtggctctgaccagacacccgtgttcaaaatcaaaacccttattagctgtgtacccatcattgagttatctaaacccacctatccctcagtatcctcatctgaggataaaatggtgatgataataggccctccttcaaggttgttgtaaggattagaagaattaatccatgtaaaatccttagaatactgtctgacacatagtgcctgttcagtgttcccactctgactctcatttctcttctgtgaatggcttagcacctttggtatgctacttatcacctagggcacgattacatactgtctcatcttttaaaatattgttattcttgtatttttcctctactgaatcataacaaacatgctgttatttctttcagcttaagaaacaaacaaaactctcgatcccattttcctttagctactgctctctgttcctcttctagagcagaatcgcttcaaagagttttctgtatttgctgactcattcttctctctccattttctattaaatctatccactcaggctcctgatcccatcattctagtgaagctgcacttgtcaagatcaccagtgactgccattgctaaatccactgtcagttttctatcttacatctcacttgaccttctttgaaacatgttttttattggatttcaggataccagactcttgttatcttcctgcctcactggctgcatattttcagtgtcttttgttgattcctctaattgctccagcctcttacattggagtcttatttgctgttccctctcccatatcatcaattgattatagattccatgagagcagctttttgtctgttttgttaataactgtattctcagtttctacgataatatatggcacattgaaggtgctcagtaartatgtgctgagtagattattaaataaatgggcttaaagaacatatacatagctgtataataagagccttgtgagcaggaaccattaaaaaagaaacctgtagtctccttcttgataccaggaccatgctcagcaaaccttcatgagttgactcttaataaaaatggatcttcaggggccacccacttcagatcccatttcacagagcctcctggatgtcttgcagcaaggtgcacaagagtgatttgcaatgtaataaatatttcaagccttgtcaaggagatatttttgtttttaactagtttactgaagtgtaatacccatagggtattagaatttttcctgtacagtctgaaagactttttcagtgatgtgaaacattttggcagcaggtaatataattttgcttcgggtcaatatgagttttttttttaagagtacattgtgcaattttaacgttaataattggaaaaatatgatttacttttgtgagacattgttaaatttgcaagttttataacataaagcatttcttaattgtagccccttgttttatatttacataactggaataggcaacatgtttgtgatttactctgttatgatctaggtacgtcgtttcagagaaaccagacaaaaaaatactaatgaagaagatgatgaagtccgtgaggtaattattctgctgcaaattcttgtgtttatatatcactttcttaaactagaataaccagtaggtttagttagaatagtcagtccataggtctaggggataggagtgagctggggttggcttaggatggctgcttttggttgatttcagttcagcctacaaatattctgctcattgctctttttttccattttgttcttgtctaaaacctgtttagcaagtgcagtgactcacacctgtagtcttggctacttgagaggctaaggttggaggggattgcgtgagcccaggagttcaaggctgcagtgaactatggctgcaccaccacactctagcctgggcaacagagtgagaccctgtctctaaaataaataaataaaaataaataaaacccatttaattktatgtgtgtggggatatatacaacaaaagcccctattactcaaaataatatctctttgttagcagagcatcttatagataaaatcttatcttactgagctgatattattttgggcaaaaaagaaacttaaagtgttttggttagcaatgttaaccataagtaagcaagcatgggcaaatagacaatttctattatctattctaaaatattaaaattagcttaagcaccatcatcactgtcttctcagtctcattgcaggtttgaatctacaagttagcaaccatttacttaaatttggggcctctacctggtacttgttgaatttatgattgaaatgtattttcttattttctgattgcccttagtgttttatgattgctatctagtatttaaaagttataaactatgtactgttagttttgtcttgattgctttcattcagcaaacattttatattgtccctgttatgggttagatattctgctttatattaggactgtacatataaaaaagctgaggtctgtagccacaagattttctcaatttagtagataagagacatttgtgtaaggaagatatttattgaattatttttcctaggtgcccattttataaatgaggagacagaccagactcaaggtcatggagtggsgctagaatttgaacatatttctgactccaagtgtagacttttctatcatcctgtgtcctatcaaaattttagattattataatattaattcggtgcattgcaaatggatggttttctaaaaatgaaaaacttctaaaagtgtcatgcaacacatcagaatcactgttgaaatacacatagttgcaaccactgtatcttttacaggttgttttttggaagctaaggaaaagaagctatagattagaaatggcttaacacgtttattatatttctatttatcttataaggtgcatttaaaatagaaatagtttgccaaattgcaagaataatgctaggaagaaatgattcctgattcttaaatatctagcttaaaattgattaaccctttcaatttaacagggtacagaaatatttctttacgtttgagtgagttcttcatgtttgaagcgacaaacctcaatttttcattaagcttttaaaagagttaagagtgaacgtcttatacaaggaaggtgggagaggctgtgacaaatttcatatgggagttttacagaagaaataacttacaagttcagatattcagctatattttaagactaaaatgtaattggggcttcctaggtaatttttcagcatatcataagatattatatattttttcattttcagcatactatttagaacttaggtaatggagtctgaaactctgccaagctgtaattcacagctttgcagaatcatttggcttagaatatgaatcccagcgccatgcttaaattacttatactgacaaacaagactattagctcttctatttggagaaaaaacagtatgctttaaagtctttcaggctgggcattgtgacttacctgtaatttcagcactttgggaggccgaggcaggtggatctcttgagctcaggagtttgagaccagcctgggcaacatggcaaaaccccatctctacaaaaaatacaaaaattagccaggcatggtagctcccacctgtagtcccagctactcaggagacttaactgggaggatcgcttgagcccaggaggcagaggttgcaatgagccgagatgacgccactgcactccaacctggatgacagagcaagaccctgtctcaaaaaaaaaaaaaaaaaatcttttgttcacatagaaaaactctcaaatcttttctttaatgataaattcatatttgaataaaagagcaaacagtaaccattaggctttgcgggacatgtgtggtctctatcacatattcttgtgtttttttgtttgtttgtttttttattaatggccctttaaaaatataaaaactattcttagtcttacccacagtcgttagtttacctggcctctgatttcttatgttctacctcaatttgaggtgggttgataccctctttcaaaatataataccaggcrctatcaatagtgaagaagtgacccacagaatgrgagaaaatatttgcaaatcatacatctgataagggattaataagcagaatatatttttaaaacttctaaagctcaacagtaacaataacaaaaaaacccaatttttacaatgggcaaaggacttgaatagacatttctccaaagaagctttacaaattatagcacatgaaaagacactcaagatcaccagacattagagaaatgcaaatcaaaaccacagtgagataccacttcacacccattaggatggctgttattaaaacaccataaaataacaagtttcggcaagaatgtggagaaattagaaccatatacattggtggtggggatgaaaaatgggtcagctactgaggaaaacgatagcagttcctaaagtagttaaacatagaattatcatgtartatagcaatttcacttctaggtacataaccaaaagaattgaaagcaggaacttatttgtacatcagtgttcgtagcagcatgattcacaatagccgaaaagtggaaacaacccagttggtcatcaacagatagatggataaacaaaatgtggtatgtgcatgtaatggaatattattcagtcttgaaaaggaatgacattctgatacatgctacaatatggatgaaactctgaaaacattatgagtgaaaaaaaaacagttgcaaaaggacaaatattatatgactctacttatatgaggtacctagagtaatcagattcatagaaacagaagrtagaatagtggttactggggagagggaggaatgtgaagttactgttgaataggtatggagtttcagtttgggatgatgagaaagttctatagatggatggggggatgattgcataaccatgtgaatgtacataatgtcactctactatacctaaaagtggtaaaaagagtaagtttatgttatgtatatttcaccacaaaaaaaaagtgtttaacagtaggatagtatgttttcaaatctcacaaaatrtatatggaaacatttttgccattggctctagacctgcactcatgagttaagctcttagaagtaatacattccaaagataacagtaaactctgtttttcataggaaaggtagagttaaaatacaatttgaatatacaatttgagatgataaaaatgaagatacagtatttagacaaagggaaaatacaaagtttagaaatgatggttagtaattgattccaagaagtaatcataatagggcatatttattttaaattttgctacatactgccacattagtccaaagatgtcttaactagtttatattctcaccattagtatttgggagtgcttgtttcctcacatctttaccatcgtgatgtattactgtatcttttgatctttacaagtctaaggggtaagaaattatttcctactgttgttttcagttcatactacttttttttactaatgagtctgcctaatttttatgtttwtaaatcatttgtatttatatgaaacacatggtcattttgtttggccacattttctctttcgagtagggtattggtctttctcttttttttttttttttttgaggcaaagtctcactctgtcacccaggctggagtgcagtggtgtgatctcagctcactgcaacctctgcctcctgggttcaggtgattctcgtgcttcagcctcccgagtagctagcgcgcgctaccatgcccagctaatttttgtatttttagtagagacagggtttcaccatggtggtcaggctggtctcaaactccttaccttaggtgatccacccgcctcggcctcccaaagtgctgggatgacaggcatgagcaaccgcgcctggccgggtattggtctttctctaattgatttgtaagagcactcacttgaacacatttgtgtgtgtgtgccctctctttctctctctggatatatacacatagtaatatagcatatttagggttttttgacacataaagtatccacttattcatcagcttatttgtttaaatcaggaatgattggtgattacatggttctgattttatgaagatatacatttgggttttttctttctttgttccattaatatagtgagttatattattatgtacatagcttattgacccatcctggtaatatatccattaccccctggtaatggatatattggtctttccataagcttctggagtctctatttgctttcataattataaataagattctgtaattttctttttgtgcacgcagttctttgtcagtactgtgtcatactggcattgtgaaaacagtttggaagctgtctttctgtatgctctggcactattgaaatagcagtgggcttatctgttttttgaaagtttggtagaatttacctacgaaactttctgattgtggtccttttttgggagtatttttcttttaataattttctcaaaattttctttgataattggtttgttgaacctgtttttttccyaccttggatcagattaagttattcattttccagattatttagaattgagcattctctcataagtcttgggtcttccctcccattcttccttctttctttttttcgagacagggtcttgctctgtagtgtgctaccactcccagctaatttttaatttttttttttatatagacggagtctcgttatgttgcccaggctggtctctaactccagggctcaagtgatcttcctgacttggcctcccaaagtatagatgtgagcttctacacctgtagtgctagtattagagatgtgagcctctacgcccgtccctcttatttctaatgatgtatatttgtgttttcttcctttctttaaagctttgtgatttttattaatgttattgttttgtcccaaaggaccagtgcttatatttattcattctaatgtgtttttgtttaaaatctattaatatatggtttcatcttcattctaatacttggataggctttattttgtttctcctagcttttkggatacagaattaacttatttacatttattcttagcaggctataggctttcttataagcattgctttagctctctcatatgttgtgatgttcagtattcttgttatgattttctagatgttctgcaactttcgttttgttttatagttttgactctggtttgttttcaggaggcaggtttttgctttattattaattttttattttattgcatgatgattagacagtgtgataaatttatttctcctatcaaaaatgtattgagatttttgtttgcaccctgttatgtatcagctaaaaagtttcatggggtcttgaagtatattattaattttcagtgtatagaattcaacatttatcaattagatctatcttattaattatgtgatttagatcatcttttttctcttaagtctgctttctaaaagcatacagctggttccttttatttgtggtagttatgtcgtataaaatcacttccagcacagaattagcaaatggtgaatcattgctcctaggggaaatacaaaattagctttctatgagccactgataacgtttttgtcagctgatcaatacgtaatctttttaatgtgtttctgtttaaagatactgtatttaacatttgattcattagcattgaactcatagccagtagcactttaacttatacttgaattaagtttatctaatatacattttttctccaaaagtcatattgcagcctttttgcatgtaggaatgaacactaaacatgttgagggggtcatttgaaaacaccacattaccaaarcaaaagtacaaaaatgcagaaaatgcaataaatatgtagtcatgtgccacatacaacattttgatcgatgtcagactgcatatccagtggtggtcccatgagattataataccatatttttactatatcttttctattaagatatgcttagatacmcaaatacatagctatggtgttataattgcctgcagtattcagtacagtaacatgttgtacaggtttgtagccaaggagcaataggctatctcctatagtctgggtttgtagtagactgtaccatttagctttgtgtaagtacacactatgatgtttgcacaataatgaaatcacctgatgacacatttctcatgaggcatccatcattaagcaatgcatgactatcacagaaaggacactttaaagtacacaagtggaaacaagaaggcagagtggctcattgttcagcctcagctgggaatrtgtgtgtcaggcaattcaaaatatttaccactctgcgtctccataaatgatgccaaaagtatcgtgagtgttgatttttagggttacagagaaattttggcaagtcggtgaatttgcaaatataggattaatgaataatgaggattaactgtatttcatgtgggacaggaaagatgaattgaaatcactgttgtttcttatattttttgttgtatttcctgaagtgttttctttttgcattgtaatgctgtattgaaccctgcatgcagtgagttagctgtgatttcacctcagctgagatcatctcatcatgaagttgccacttcagtcccactttatgctgcctgccttgttcacatctcctcatttagccctgggtctccttactttatggtatcacagagcttagaaatgttctggtcagctattcttagacccagaactgccattccaagcaagagagactgttatcatgtcttcttgggatttatacatcagttttggagagctgtataatacctgaaactcttctcacctttctcccttagctaggtcaaatatttatcatattcattaactcttctttatagtttgtgtgtttgggggtttggaactattttttaattttatggaaaatgtattttgtttttgttctcttactaccttttgattggtttaagggaagatcaagrcaaaattgcttttatttatattttattttattttttggtgacagggtctcgctctgttgccaggctggagtgcagtggcacgatgtcttttctaaatggattcttaycaaattaaaaatgcgtggcatgttcttggtcctaaggtgtttattccttcttaggcttaggctttcagttgatatattctccttaattcttccgtttcttttcattttttttttaggcaaggtctcactgtgtcacctaggctgaagtgcagtggtgcaatctcagctcactgcaacaactcccctccccactgcttcccccaggcttgagcgatcctcctacctcagcctctcaagtagctgggactacaggtgcatgccatcacacctggctaattttgttcttttgtgttttttttttgtatttttggtggaggcagggtctcgccatgttgcccaggctggtccctaactcctgatctcaagcagtccatccacctaggcctcccaaagtgctgggattacaggtgtgagccactgcgcccagcccttaattctctttaccatatatttgtgagagattgttactcatgtttttttctgattataaaactaattttttagaaaaagtgtaatatagaaaatatgtaatattcaagaacaaaaaacaaaagcaccctaaaatattagtgcccagagataacggctattttttgtaagtttttttcttattatttcctaggagccgattctaaaaagtagctcaaatgatgacagtctgttactgtcaaatgtggcattgaattagggatgattgccagtattccttctagttctgaaaattttgattctgtaaaattttatttttcttggtaaaccttttcaaagggtctcattttataggtagtatggtagattggtctgacagataataagtattaaatttgattggtggggaggttctcctttacacatatataaatattttttgtttttatttttatttttgagacagggtctctctttgtcacccaggctggagtgcagtggtgtgatcatagctcactgcagcctgtatctcctaggctcaagtgatcctcctgcctcagcctcctgtgtagctcgggactacaggtgcatgccaccatgcctaattttttttttttttttttttttttgtagagacggggtttcgctgtgttgcccaggcttgtctcaaactcttgggtgcaagtgatcctcccgcctcggcctcccaaagtgctgagattacaggcgtgagccactgtgtcagcctcctttatgtttttatagtatgattagttcatgtcaatgcctaaattaatgatttttaggatggtacgttatctcattgtgtgtactttctccttcttctccctcttaggctatgaccagggccagagcactcagatctcagtcagaggagtctgcttctgcctttagtgctgatgaccttatgagtatagatttagcagaacagatggctaatgactctgatgatagcatctcagcagcaaccaacaaaggaagaggccgaggaagaggtcgaagaggtggaagagggcagaattcagcatcgagaggagggtctcaaagaggaagaggtgagcactgagttcagtcctgtgcacattcacacttggcagttgagtggaaaatacagaattagatcttgtcagagttgaattataagttttatttctaaaacacggttctttaaaamtctatttttataatatataaagacagtctttaaggcagttctgacatgtgccttttacttaaataaattttgaatggccacatgcacttagggttttaattgttcttagcacataccttataaaagcttcactgtgtttgtcacgtagtaccttttggatacatttaatgtcatatgtattttcacatgtgcaaagtaataggcaaatatgagttgttaaagaaaatagctaaaagcctttggcaacaggaggaaaactccagatcatacaattattatttttgttactgtcataagatacaaatacacatatgcttatcaagtagtctttataaagtcagtttaagaaagaaaactgccccccaatttgattcctaaaactagtcattaacatagtcaacattgtatttactgtgagactattgtcattgaatagttcacgccaatagaaattggtcaytcagtgactttctcacacattatgtcagttcatctctaaagattttttaaaattgtttttattaaatatgcatccataggaattttaagctggtgaaatgaatattaatttggtttaaaatctccagggagagaaatcctcatcttttaatgatgattattttcactattcttacatttacaaaatttttccttaaaaatttttatttttgttttttaatttttcttgagatggagtcttgtctttgctctgttgcccaggctggagtgcaatggtgcgatttcagctcactgcaacttccgcctcccaggttcaagcaattctcctgcctcagcctcccaggtagctgggattacaggggcccatcatcatgccagttaatttttgtatttttagtagaggtggggtttcaccatgttggccaggctagtcttgaactcttgacctcaagtgatcctcccgcctctgtctcccaaagtgctgggattacaggcgtgagctaccacgtccagcctatttccttacattttaattggataaattaaattggataaactgaagtgtggcctaaaagaatagtctctgaaaattggtcagactctagatgtttgttcttatatatatgtctggctttttacagacaaactatttgacataagtttatttagctttcattttttrgtgttgtatgaaataaaccttagctgctgataggcttgtacattgactgttcatttttctaacagcagacactggtctggagacttctacccgtagcaggaactcaaagactgctgtgtcagcatctagaaatatgtctattatagatggtgagtatagactgcaagtgattatttataaattccaacattagaaagaccaaggtaatcaccattggtagcccttatttgtgttgcaatcattgggaagttataagggcaattaggatcacaggataaattattttttaaaagatctttgctatgcattagagttactgaagagggtaagcttttaaaatcatgttttataggccaggcacagtggatcacacctgtaatcccagcactttgggaggccgagacaggcagatcacgaggtcaggagatcgagaccagcctggccaacatggtgaaacccggtctctactaaaaatacaaaaatcagccaggcgtggtggcacatgcctgtagtcccagctacttgggaggctgaggcaggagaatcacttgaacccaggaactggaggttgcagtgagccaagatcatgccattggactctaccctagcaacagagagagactccgtctcaaaaacaaaacaaaacaaaacaaaaattatgttttataatttcttactttcagacaaatgctgtttctgtttggcagagagaccctggaaacaggaaagtgaagtagttggtcactatatggacagtggtcgaaagagagaggaactgtctctactgtttccttgcttcccccatactgccctgtcagtctctgctttccatatagagaagtcatgtgacctatatttaagagaaattatggctaggcccttggaattaatttgtgtatatcctatggtctaaaaattggcctcaaggggatctgtttaactatttttaatattatagatgatgagatcagcctaaaatgttagtcatatttacaaaaagtatgcattaagataggtggtgatacttttttctacctagcatttagaatatattcatatgtatattatttatattatcagttatttgaggttattgtttcacttttataattataaatattttttaaatattataattgtaatatttataatcttatagctaggattaattgttgacacactggggagctgaactaattctcagaagatgaagtttatcaagggtaatataaaccacatttatgtccaaaaggacagctgcacaagtagagttgtgagaggtatgtgagtttaacagcaacccaggtgaaaaagacttaggtcagtaagagttatgcaggcatacccaactgtccaaatctattgatattttaaacagcatttaatgagtcttgcagaggtgtccaagggagagaatacagtcatggattcttagtttctgtttctggttgggccagtaaagcccttttctcatccttcttttcctcatatcactagcgacagaaactaaaaaccatggcttcagctgctaaaagcctaaaacaaaagaaaacagaacaaaaacaataacaaaatgaggtgggttggacaagcttgcacagcaaggaagttctctctgtgtactaaattggccataacatgccaaggatactgtactcctctttggaattatatttcaaggagactgtcaaytatatatgatcattcagaagagataccaaataatataaaaaatggttggccaggcgcagtggctcatgcctataatcctaccactttgggaggctgaggygggyggattgcctgagctcaggagatcgaaaccagtctgggcaacaaggtgaaaccctgtcccctactgaaaatacaaaaaattatccaggcagggcggcgtgcacctgtagtcccagctacttgggaggctgaggcaggagaatacttgaaccgagaaggtggaggttgcagtgagccgagatcatgccactgaactgggtgacggagcgtctccaaaaaaaaaaaaaaaaaacaattggttgaaggaacttaggatttaggatatctaacctgggaaacattcagatctttatgtagattatgttctatcgtgtaaaatgtggaatgaatagatttgatctgtttagtcccaaaggcaatgctttttaatctattttggcttatggattctctaaaaatctgatgaaagctatgtcttctctccttaaataagtactcacatgcaattgcacccaatttcaaagggttcagccactcccatgaggcgcattcgtgttttccagcttaagaactcctggcccaatggggatggatgggaatagctagaaacatactgatttaagtttctcatctgatagaatggacctggaagatttaagaacaactttgttcccctgttttatatgtgagggaactaagccaagcagttttgccctgagttgataaaaccactaatagtagcaataatagctaatatttatgaaactgcatgcctcttaacaggtctgtggggtaggtacttactatattatttctgttttacagaaaaggaaacaggctttaaaaagataggtagcttaycctagatctcataacttgtcagtaccagatctgggaatgatctcacattctctgcactctacaaccagtagttgaccactgtactagtttccagagcaaggtaagattagagacctagctactagttctccatagaataatttttgcattatgcagaataacctatgtaattaatataaagatggactaatttgccttggaagtaagtatcactccattaaaggaattttcaacatttatcaaatgacagctgacattgaagaaaagatacaaaatcaggttgattaaatgactcttaaaccttacaaaaaattccattgctatatttttactcaagtattatttagtacttcagaagagctagctaagatccttagctttttgcttcacaaacatgttgtctttattgccatttagggagtggtatctggaaagatgctgttccattcttggtaggtttratataaaagcagagaggaagaaagagagaaaaggcagcctggaaaattgtaaaggattcatgctgagttcaaccttgcattcaacaaatgacagctttgtgacttgagacaaatcagtcactctcctagtttgtttagatatgattggaaataataatctctattgtattgggttattctgaagattaaatgatcaaaaagcctggcacagtaggcatttatcaagtgttcttttaaaaatgagaaaacaggaacatagaaaaagagtgaataaaataatgaacacttccatgttaaaccaccaaaattggttagcatgcaatcgacagagtcatagatgtagattacccacctttaccttagcccaaatcgtctttttttgtcctgtcttgttttwtttttcttttttgtttttgtgtttttgtgtcctgtggaatccagtgtcctggcttgttttatgttaagctttccttgactccagtgggtagaattcatcacttaaaatgagtcgtctttgagtttccactgtaattaagaaatcagatatcagttaagcttgttggtttttgttttttaaaaaataacctgtttttctctcagcttgctgtttttggtgttctgcagtttcactgtgatgaatctaaagatggtactcttgtttagcctgcttagcaattattgggcttcatgaatctctgaactgctatcttccgtcacttctagaaaatccttagctattatcccttcagatgttacctctatgctattcttattctccttctgagtcttcagttaaataatgataagayctctttactctctcctcacatgactcttgtattttctgttttctctttctgtgctacattctgaataattatttctgatcactttttttttttttttttttttttgagacagagtctctctctgtcgcctaggctggaatgcagtggcatcatcttggctcactgcaacctctgcctcccggggttcaaacaattttcctgtcttagcctcccgagtcgctgggattacagatgtgcactaccacacctggctaatttttgtatttttagtagagacacggttttactgtgttggctagtctggtcttaaactcctggcttcatgtgatcctcctgcctcggcctcccaaagtgctgggattacaggcatgagccaccttgcccagcctatttgcttcctttaaaatatgctctgtcacttttaatagtttttagaagttttctgaagatatttttaggcctgttttaatttttcgtgtgtacacagtaaggacttcttttattttgtatctaataacctagtgtctgaatgtctttggcctctttctgttgtctgtttctgtgggttcttatttatggtgacttatttccttccatgctttgttacttactgtccctagaaaattatcaacaggaataatttgagaccttggatgaagccatcttccttcagagaagattcacgtttgtttctctaggtttgtagggcaccacaagtcatagaccactttaagctaaatttgagggtttcttggaccagtcatttgatacgtacttgtaactaaaatgcaggttcagtcacttgctgcttgcaaagtccaattaacaagagcaaggtgtggtataaagaaagtgactttttattccaaagcgaacttaggggaagaaatacaggcttcctaccttaagggtactgcttccccctttgcagcagaaagtggactcttttaaaggggacctatcaggagtggcatgcaggggaggaagcgagcaagtggggggtttgcattctagtttggtgtcttatctaccaggcagttgaattggcatcttcatgggtagaaataggctataaaggtggccgaatactctctaggttggcgagagtttcatagcaggactttggattgtgaattgactgttatctctagaggcaaccccctggtgggtgatagttcaactctggagcttccaagcacatagttagatgaactccccttttagggagtctctgatgaagaggaagtaaaagactatagttgcatttctaaagaactaagtagaaagtgggggaaaggagaaaagaagagagagaaaaagtaatgaactacctcttagaaaaatgagggtactcagttacatgcttatgaaatcctgtttacctctgcttctctcttcaaccactggggctccaccttaggaagggaaatgcatcggggttttcactttgggcagccgtgggctgtggtagccctctctatttttcttcaggattctcaaaaccaatgttaacattttcccaattgaaaagtgaactcagggaaaggactctgcttacctctctgagttctagcttttcttcagttttggcctggtaattccttggtatgtgatcagctcttcaawgccattgagaatttttttttttttttaaatgtttgaggtactaatttggattgttgtcagcagaagtgagtttgaagacaatgagaggtcattttgtctgaataacctagcctgcaatgactgttacccattgacaacatagaataaagcttctatttgtgtagaaagactggagaccagttatgatgccttaaaagttttacagaatggcttgactaatttttttaaggaaacrgtattcatctatgaaaagaggctatgtaaataaactaaatacgaaacgtcagatttcctgaattatgttgtaagcaaaaatcttattatggtaccttttgcagcagagcatgatggttaagaatgcaggctctggagtcaggtccattgggtcagtcacagccagctctttactgctggcttagcacccttgcactgtaagtgctgtgagaaaggggtctgcatcattcctcctcatcactgtatccactatatttggcacataacatagtagatgcttgttaaatacttgacaatgactgagtaaaaattacttggagattgtgtagcgtaagggtgaagaccatggttctaaagtgaggaagatcttggtttggatcctgacttctcaattttactagttgtgtgtcctccagcaaatatgttaagtttttcatctttaggaatgagtgttctcatctgtaggatgggacaatgattgcgtccacctcattgcgttattttgaggattaatgagaaaatgcatgtgaagtatcaggcagtgtctatgcatattaagccctcagtaagtgcaaactggtgttattctacaagcatcagatcccttagctataaaatttgacaatgttgtactgacttcagagtaattttattaaatgagcttaagtatttacagtactgatcacagcacctggtaaaaatgcgacagatgatagctgttattaatattagtggtagtgttttgcaataagattatgaagatgaatattatgtgaatcattggtctaaatttgtcttttatctaattgatttgatataatggtttcgctaacttaactgattacctccagtactaggcctttttttgaaaaatgaactgattttttaagtataaatttgtgaaacatttttatcaggttggatttgktgggtttttttttaagtctctgacagaatacctgtgaagtagtaactatacttgtcatcactttgggacagaagcaacaaattaagactgtaacttctagatctctgttttaaatggaggagtgaagagataaataaaggtcaaattctcttataacaaggtccatggagtatggaaatttattattgtgctgcaattttattggaaaagataaaaattacacttgtagccacrggagttgtaaataggagttgacagcccagatttttccattgaagttagtcagcagaggatagtggctaggtgaataaaagtacctctgaagtcacggcctttacatttcatttataccactatgggtaccactgctgctactatgtttgctacccaaacagctacatgtatttgaatgctttctatctgctagacacttcctcttaccctctcagcagttttctgcatgaagtattaacactgttttacaggcgaggaaattgagttttaaagaagccaaggagcttggccatagtcaagctagtaagtcaaaatgagtctaactccaaaaccagagcttttaaccaccacactttattgtcttcctaacagaacatattgcttagttttctgataaaattatttcacaacatcactcatcttttgccttccagtgggataaaaagaaaggtatcttgttttctaggatctcagagttaaaggagtcagtgaataaatactgaacagaaatattctttgaaatcatcatgatcactggattttttattcagttgctctgtctagccttttgagtagagtaggatgtgaaaaaagtaactgagtaaagcagataagaacactgtttctgcctctcgtttctcctcttagatattacaagtttggggacagaacctagaataggaaacatgtgcaaacacaataaatttaggttagatagaaagattcgttagttttctgactaggagaattttggactttgcaggattttttgagtatttgtttgtttttctgtgccctatttagtttgtgagttatcttggggaagatatttttgatattagcaaactggtaaggcataggagaaaataaacctaaattagacgtttgaaatttattgtaggttttgttttgttttgttttgttttgttttttgagacggagtttcgctctgttgcccaggctggagcacagtggcacgatctcggctcactgcaacctctgcctcctgggttcaagcgattctcctgcctcagcctcccaagtagctgggattacaggcaccygccaccatgcctggctaatttttatatattttttagtagagttggggtttcaccatgttggccaggcttgtcttgaactctggacctyaagtgatccgcccgcctcagcctcccaaagcactgggattacaggcgtgagccactgcgcctggccttattgtaggtttcgatgtcaaggaaaaagaaagggaaagataaagagctagctaaacttcaagtatctaaccaagtttaaaaggaaaaaaggtatggatacaaaggaatttttatcatagaatgctgttttctagaattctcctctggaatatttcttagatattgaatatggctactaaggtagaggaaaatgagaaactactggaaccccatggctcctaatgtagcaacagggataaaggtatcgtcaacaacaaagaagggattaggaggctttccttcaatacatttgtagttcatttggttaggtgattagattttatccttcaggtrtttttctatgaaatatttttagtgtgtgtatttataaacactacagtatctcaataagctgggaaataatgagactgacagttgggcattgagttatgcgtacctataattctatctcyctttagatttttaaaaatatsaaatagttttataattaggcatcattcagttttgcagataggactcagaaaatctttagctaaagaagtatgcaagtttttctaagttattttaagaataacataatgcacatttcatctttttcattctagcctttaaatctacaagacagcagccttcccgaaatgtcactactaagaattattcagaggtaagaaaaaaagttttatggttgtgtattaataatttatgttttctgcattatgaattgtcaactctctgatttacaaagtaaataaaagaagaaaaattatggaacattaaagctggaaggagctttaccaattatctctagggcttctaggatttgattttttttttcttggttgctctctttttttaaataatggttattatagaaatccataaatgttatgtatacagtaatgttttcaaggataacagtgttgaaccaaaagagctcatacatggaatactaatattgaaggtgagttcaatggttatagaggttttttctatgctggatttccttttgttacttatcttcccaaaatactagctgtgccttaacagctgttgctagacttaagatgaatgaaaaggctggagtccagcgatccatgtggtttgccctaggtttagcctggkccttctgctcttcctttcgattccaagaagagtccaatatgggcttgattctcttattacttcactttcaaaactgtgtgtcttaactcccgagccaatactcttccctttacatcagggtttctccatagtagcactgttgacattttggactagataattctttgttgtgaaggrttgtcctatgcattgtaggatatttaacagcatccttagcctcaggggctgttcgttcagtatttggtctttggcttcatcctcatctgtacttaagttagatgaagatatggcaaatgtatgtatcaaatgtcaagataacaaaatgtagagaaatagtattttgggtggtagaatcaacagtcagaaatatctttattgggtcttaacactaacaaatggtatttaagagggacagatttaacagaaagatatctagtatttcccacatggtctgatacctcatttaaagttggagatggaacactgatggtctcacctctcataagaaactaagaggaaagtcataaggtctgcatatgagcctatgcaagtcattcaccagtgtaactgtgttcccttaggtgctcaggctcctgggatggccaggagagaggtgagcaaaaagtaacatttgtgaatgaagagggacattggagggaggtcagactgagtgttagttttaatggttatggctttctgtctccttttttgtggctcatatataacttaagatttaatcgtgtaattcatttcttcattttcatttttattcagagtctattctcacaaaaactgtttgttgctttgtttccttgccaggtgattgaggtagatgaatcagatgtggaagaagacatttttcctaccacttcaaagacagatcaaaggtaggtgcartgattttctgcaaaagaaacatctgaaaaaaattaaaaattatccagaattccaaagttacacatttttctatgccatgtaagtttaacagacttattttcaactagtaaagtatgtagaggaatgaaaacagaccaagggctagtttatagagttgatgcagcattagtacaaggattttcagtgaaaattgaaatagcctgtaatttttttccttttgactttattagtgcttttctttctttttatttatttatttattttttgagacagtgcctcattctgtcgcctagactggagtgcagtagtgcgatcttggctcactgcaacctccactttctgggctcaagcaattctcccacctcagcctcctgaatagttgggattacagacgtgcaccaccacacgtggctaattttttgtatttttggtagacacagggttttgccatgttgcccaagctggtcttgaactcctgagctcaggcgatccacccacctcgacctcccaaagtgcctggattacagatgtgagccagtgcgcttggcctcagtgcttttcttaatggaagactgtgttctctccaaataacagaaaataattttgtattttgctatcatttgatttcagctttttgtcattgtcttatttttatattcttaactacacatggtactgtactaaacacttaaaaggggatcacgtagactcagtctgccttcagaggacttgcatgctcttcctgtgtgttttgggattttttgcctattgctgttaagcttgacttgattcactattaccatttgcttttatacgttaacattttggttgaatactgcttaactaaagctcgaataatgagaatttctacttaataaagtaatcaactgccttattttgtacttattttctgtttgagcattatattaggtctgatgagggaggggcataacgaatgttttaatatggcctctgccttcaggtaacttcaattatagtggaaaagagaaatgaacatatttgaattcatcaaagaatgaattagtacataattaggtgtagaattttatattacagacccataagtgtgagtgcttatgggctggtgaaaaaaggaacaaggaatgtgggctagaagaagcagcttcatggagggartaaaattgacctgaggtttcaaagataagatttggcttagtagggtggaaaayggtggtcccagctgagaataagggcatgagcaggaactccagaaagaagggtgattgaggaaaaagccttatatcagtgtttctcaagctttttttccattatctcagccatttcttgattatccaaggagaagaattaagtaacttagatgtaagtcaatttctccctaacgttagaaattaaatacttaaagaatgaaatttttttgggtatggttgagtctgagagggccaaaaaccgtagctttttcatcccactctatcccctggagccaatttttgttctttatgatactgaccccactgagaatataagctgtatgtgacttaaaggttaatgttagagcaagtgtaagtatagttccacgttcacttattagatccttcaaacatcatgctaggttctggggatagaaagataaatgtttcttccttcaaggaatttacactttagtggtatgctaattacagggcactgctaatccaccaagataaatgttttcttcaggtgtaatgaaayctaagggacgtgccagtatcttcctgggaaaggtcattgaaggttttacaaagaagataggtgacatttgagctggtgatcagccgatcagttagcatgyattaaaggaaatgatctggtgtagagagaagaaacagtggcacaggacgggcatctactttgaaggatggtcatggaaagcctctgaggaagctacatttaagcggaaattttaataagggaaatgtggccttgcaaaaagcagagggacaagtgcatgcagcctgtattagtccattttctcactgctgataaacacatacccgagactgggcaattacaaaacaaagaggtttaatggactcaaatttctacatagctggggaggcctcataatcatggcagaaggtgaaaggcatgtctcacatggcagcagacaaaagaagagaaaaagagccaagtgaaagatcttgtgagacctattcactaccacgagattagtatgggggaactgcccccgtgattcaattatctcccaccaggtccctcccagaatacttaggagttacgagagctacaattcaagatgagatttggtagggacacagccaaaccatatcacagtctattgaagaagcaagtttaataatgttatttaggagccaatgactaatgtgtggtggaaaaggaggttgtttgagatgagaatagaaaagagacacagggtaaatcatgctgcaggaacaggtgagcactacaaaggtattggatgttgttataaatgcagtgggaatccacagaaagattttaagagaggagtggcaccttgtgatttacrtttacaaaggatcactgtggttgcagaacaagtgtaaacaagcttatctgaaaggagggtgctgcaggtagtctgagctaagagagacgatggaggcttgcacaggctggtggtaggtgaaatggaggaaacagatggtttcaggatatattttgaagatagacatgacaaaacttgaagatggattaaacatttggagtaagggagaataaggaatcaagactgattttctggtttcttgctggagcatttacattgtgccatatattgagaaggggacaaaagaaaggacagatgtgttgtagggaatgataggcatataattaaaagttccactttagatgtgaaaagtttgagatgcctagaaacttacatgaagggaagttataggcaattgaatgtgtgaattcagaactcagataagggtttttgttttgttttgtttcgttttgttttgttttgttttttgagacggagtctcgctctgtctcccaggctggagtgcagtggcgcgatctcggctcactgcaagctccgcctcctgggttcacgccattctcctgcctcagcctcccgaatagctgggactacaggccctgccaccatgcccggctaattttttgtatttttagtagagatggggtttcaccgtgttagccaggatggtctggatctcctgacctcgtgatccgcccgcctcggcctcccaagtgctgggattacaggcatgagccaccgtgctcgtcccagataaggggtttgaaatggtacttacatttacctctggacagcgtgcagatggtacttaaaaccattgggatggataggatcacctcaaaaaagaaggcagagcagaagagtgtttgttttcctagcctgcagttttaaccttactcagcctttgggtagagtagaaaaaaacaataaagacatgagaaaaatccgggagagtatagagttgcagaaggcygtactggcctttataggagtaaaaaataccaagatgggcgcagatgcaaatcagtttatatgtctatggtaagtagtggagggacttattttagctcacgaaggtttacttgaatttctcaggctcatttatgtgtatttaacaggactcctttggttccagctgatagaaacctaactcagattctcttacagaaaaggagatttattggaagattatcgggatacctcaggttttggaaggaagtaagggcccctttctgagtccttgtttggttgttcttgtctttgtaaattgaagcacacacmaatcagatctagctttctaagtttttttttttccagaaatggatcaaaatgctattctgatatttttgatatatgcttaaggatattaaagaaaaaatagtttgcttttgatatcacagtagattgtttacttttcagctgtataaatgtctgccgatttctttagacatgaaatagtaatataactcacagttgtttggtacttcctatgtgccaggcacttctctgagcattttacatgtgaattagcttgcgtggtgctcacaacttccccaggagatagattatagttataactttatcatccccattttacagatgaagtgtgaagcacagtggctaagtaacttacctaaggtcacccaactagtcatacagtccaggcattctgaccccaaactcatctctgttgttgcttcttggtatggtaactaacttctctgaccattgtgcaagcaataagaatcatttaagttttgagaggctgtttaacattttagaggcaatttccaaaattgacattttggaaacacatcagaaatcagctttggcagattggtgtttctaattacagcatctaaatgataatttagactgtttttgcagaatgttttagtaattgcaggttatgcatggtgttttatttataatttaaactatttaagctctgccacttaccagagtggaccttgataattgtgctaatctgctacctctgaaccttagttgctcttcaagtttgcctgataaatccttctgtcctttcctttagtgcaaaggacctgtgaatttttctatttacttctgacataagatctcgtgattctcattcttttttccagataaaacctttggacatatttcttttgctataatgacatcccaaagcatgttaataaaattgtagactaagaatttataaacactacttttattgaagacgggaatcagcagactttttcttaacaggccagatarggagtattttaggctcggcaggtcaagaggcaaaaccggggatattatgtaggtagacacttgtataaccatttaaaatgtaaccatttcaaaatgtgaaaaccattcttagcttataggccataaaaaaaacaaaacctggtggtgggctagatttgcttactggccccgatctaaagtgacttaaatttcttattaattaaaagacataggaatttactgcaagttaagctttgtaagagtaggaatcggctgggcgtggtggctcacgcctgtaatcctagcatttgggaggccgaggtgggcggatcacgaggtcaagagatagaggagatagagaccatcctggccaacctggtgaaaccccgtctctactaaaaatacaaaaattagctgggcatggtggcatgctgagggggctgatgcaggagaatcgcttgaactgggaggtggaggttgcagtgagccgagatggtgctactgcattccagcctggtgacagagcgagactccatctcaaaaaaaaaaaaaagagtaaaaagagtaggaattatgattttcttattaactgagatttgaatagaaaatatttcaatgttcccatggttttcagaagtggaagatggtaatgtatacattttggtacatgataagtactataataatataagtaagtattgttgtagtacttaatatgtgtcaggcactgttctaagtgtttaagcatattaacacatttagtctttataaaaccattatccccgttttacagatgaggaaattgaagcacagagaggttaagtaacttgctcaaagccacataggtagtaaagggcaaaaccagagttcaaacctcggccccagagtccttttccttacagttaagttttattgccgctaatgtagattttaagggaattgtgtgttatttatattcgtggcagctgctggattgaaaaacttagccagaaaggcacacttgatgaattatgtagttcattgtgtttgtttttgtttttgttttgcctcaggtggtccagcacatcatccagcaaaatcatgtcccagagtcaagtatcgaaaggggttgattttgaatcaagtgaggtaaataagtaatattgttaaattttaattaatttttaactttataaaatttaaatagagactgccagctagttgctgaacttttttttctttgataaataacttcatcttttatgttcagggagtacatgtgcaggtttgttacatgggaattgcgtgatgctgaggtttggtacagatcccatcacccaggtagtgagcagtaggcagttttccaacacacatcctactctcagcctccactctctagtagtccacagtgtctgttgttcccatcttcatgtccatgtgaactcagtgtttagctcccacttgtaagtgaggacatgtggtatttggttttctgttcctgttaatttgcttaggatagtggcctccagctgcaaaggacataattttgttctttttatggctgcatagtgttccatgttacatatgtaccaccattttctttatccaatccgtattgatgggcacttaagttgattccatgtctttgctactgtgagtaagtgctgcagtaaacatgagtgtatgtgtctttttggtagaatgatttcttttcctttggttatatagccagtaatgggattgctgggtcaaatcgtagctctgttttaagttctttgagaaatttccaaatggcttataatggctgaatgaatttacattccaacaatgtataagcattcccttttctgacaacctcactagcatctgttgtcttttgactttttagtaatagccattctgactggtatgaaatggtatcattgtggttttgatttacatttctccgatgattagtgatgataagcactttttgtttgttggctgctttgtgtgtcttcttctttgtaatgtgcctgttcatgtcctttgcccattttctgatgcagttatttgatttttccttactgatttatttacattccttttagagtcttgatattagacctttgttggatacgtattttgtgaatattttctcccattctgtaggctttttgtttactctgttgatagtttcttttctcttttttttttgacatggagtttcgctcttgttgcctgggctggagtgcaatggtgtgacctcagctcactgcaatctccgcctcccgggttcaagcgattctcctgcctcagcctcccgagtagctgggattacaggtgcgcatcaccacgcctagctaattttttgaatctttagtacagacagggtttcaccatgttggccaggctggtctcaaactcctgaccttatgatccacctgcctcggcctcccaaagtgctgggattacaggtgtgagccactgtgcccagcctgatagttttactgtgcagaagctctttagtttaatgaggtcctacttgtccatttgtatttttcttgcagttgcttttggggacttagccaaaaattatttgccaaggccagtgttgagaagggtattttcwtggttttcttctaggattattatagtatgaggtcttactattaaatctttaattcatcttgagttaatttttgtatatggtgaaaggtagggatccattttcttctgcacattgctagccggttatcctagcaccatttattgaatagggagtcctttctccattgcttgtttttgtcagcattgtcaaagatcagatggctgtagatgtgcagctttatttctgagttctctgttctgttccattggtctgtgtgtctgtccttgtaccagtaccatattgttttggttactgtagccttataatatagttcaaagttgggtagtgttatacttctggctttgttctttttgcttagggttgctttgtctatttgggttcttctttggttccatgtgaattttagaatagttttcttctaatttctgtgaaaaatgacgttggtagtttgatagggatagcgttgaatctgtaggtagcactgggcagtatggtcattttaatgatactgattcttccagttcctaagcatggaatgtttttgcgtttgtgttatctgtgatttctttcagcagtgtttcatagttctccttgtagagatctttcacctccttggttagctatatagctatgtatttaattttctttgtagctattgtaaatgggattgtgttgttcttgatttgactctcagcttgaacgttattggtgtatagaaatgctactgacttttgtacactttttttttttattctgaaactttgctgaagtcgtttatcagttctaggagcctttkggcagggtctttagggttttccaggtacagaatcatatcgtcagcaaagagagagtttgacttcttttcctgtttggatgycttttctttctttctcttgcctgattgctctggctaggacttccagtactatgttgaataggagtggtgagagtgggcattcttatctttttccagttctcagggagaatggttctagcttttgcttgttcagcatgatgttggttgtggattttcatagctggctcttattattttgaggtatattccttcagtgcctagtctgttgagggtttttatcatgaagggatgttggattttatcaaaagctttctctgtgtctgttgaagtgatcatatcgtttttgtttttaattctgcttttgtggtgagtcacatttatggatttgcatatgttgaatcaaccttgtatcccaagaataaagcatacttgatcatggtatattaactttttgatgtgctgctagatttggtttgctagtttcttgaggatttttacatctgtgttcatcagggatattggactgaagttttctttgttttgttgtgtctctgccagattttggtatcaggctgatgctggcttcgtagaatgagttagggaggagcctcccttgatttttttggaataatttctgtaggattggtaccagttctttgtatgtctgatagaatatggctgtgaatccatgtagtctagggcttttttggttggtcagttttttattactgattaatttcagaatttattattggtctgttcaggttttcactttcttcctggttcaatcttgggaggttgtgtgtttagagggatttatccatttcctctagattttctaatgtgtgtgaatagttattcatagtagtctctaaagatcttttgtatttctgtggggtcaattgtaatgtcatctttgtcatttctgattgtacttagttggatcttctctttttcctttgttaatctagctagcagcctatcaattttgtttattattttaaagaaccaattcttgatttcattgatctttggtatggatttttgcatctcagttttgttcagttcttctctaatttatttcttttcttctgctaatttgggggctggtttgttcttttatttctagttcctccaggtacaatgttaaattgttaatttgatttaaattaacaaattgttaatttgattctcttaatgaagrcatttagttctgtaagctttccttttaacagttttagctgcatccctaagattttgtaagttgtgattctatttttattttcattaatgaaattaatttcattaattaatgaatgaatttttattaatttcaaagaatttttttatttctgccttaatttcattattgacccaggagttatccaggaataaattgtttaagttccatgtatttgtgtagttttgagagatcttcttaatattgatatctctttttattgcactgtagtccaagagtatacttggtatgattttgatttttttgaatttatttagacttactttgactgaacacgtgatctatcttagaatatgttctgtgtgtagatgggaagaatttgtatcctgcagttactggatgaagtattttgtagctttcaattaggtctgattggtcaagtgtcaagtttaagtcctgaatttgttagttttctgcctggatgttctttctaacactgtcagtggggtgttgaagcctcccactattactctgttgctgtctgagtctttttttaggttaagcasaacttgatttatgaatctgggcatgtatatatttggcatagttaggtcttcctgttgaatcaaaccgtttatcattatataatacctttctttgtccctttttactgttggttggtttaaartcggctatatctgataaaagaattgtgactcctgcccttttttgtttttcatttgcatgttagatctttctccatccctttactttgagcctgtgtgtgtcattacatgtgaaatgggtctcttgatgacagcagtcaggtcttgtccttttatccaacttgccactgtattccttttaagtagtgacatttagacaatttatattcagagttagtattgatatatgagatttcgatcctgccatcgtattgttagctggttgttttgtagacttgattatgtagttgctttatagtgtctctaagctatgtccttaagtgtgtttttgtggtagtaggtggtggttttttgtttccatgtttagcactctattaaggacctcttgtaaggctgatctagttgtaatgaattcctcagcatttgcttgcctgagaaggattttatttctcctttgcttatgaagcttagtttggtgggatatgaaattcttggttagaatttcttttttctttaaggatgcagaaaataggtccccagtctcttctggcttgtaaggtttctgccgagatgtccgctggtagcctgatggggttccctttgtaagtgacctgacccttctgtctagctgcctttaagatcttttctttcatgttgaccttggtgaatctcatgactgtgccttggggatggtcatcttatataatgtctgataggaattctctgtatttcttaatttgcatgtcaacctttctagcacgattggagaaatttttctggactgtatcctcgaatatgttttccatattgcttattctctcttctctctcaggaatgccaatgagtcatargttttgcctctttacataatctcatatttctcagaggttttttttttccattcttcttcattctttttcctttatttttctctgaccaagtagatttgaagaactggttttgaagctctgagattctttcctcagtttggtctgttatgttgttaatactttcagttgtattatgaaatccttgtagtgaaattttcaattccagaagttcagtatggttctttcttaaaatggctattttacctttgtaaaattgttttactggattcattggattgggttttaactttctcctgaatcttgatgagcttccctgccatccagattctaaattgtatgtctgtctttcagtaacttcaatctggttaagaactattgttggtgagctagcaggctcatttggaggtaaggggacattctggctttttgaattgccagaattcttgcactgattctttctcatgttagagggctattgttcctttaactgcagtgtaagtcgagtatagtcaactggccttgtttctgggtgctttcagagggccacagctctatatagatctttactgtgcctagattcttgccctgggtgtcacagagatgtatattggcagaattattttggtgttgtaattttggctgtgatccagtagctggcatttaacattagtgtccagtggataggctcttactcagctgcatagttcttttgtatttctgtgtgttcacagcygtgctctgtggtggggttggggagagagatgaccactcataagggccactcctggaccatgggtgaggtccctcctatcactggcactgtacctgcattactgttgtttggtgtcttgggttgcagggctcccttagacagaggccatggctgccagacaggccacacccttcccagaccagcactrtggaggaaggcatgtcccattcctgcactggcccacgaacccacgtgtctcactcctttcagtgttctgaaagtgggatttctcccctacttgagtgccagccccagctcttagctcgacagccccagctgtgtgctgtagccctgtagcactgggaccagcctgtggctccatcgtctggaccctcagggtcaggcaccagctgtgctggggaatctgaaatgctcccaggctgccaggaaggtactcaggtggaaccaccagcaaaaaacaaggctaggcagcagaggctgccctgtgcacacattcctgcagggcagcttggcaggggccctggaaggggctgtaggggaggagggcctgcagaacagatgttcctctgtcccacagggaagctggccccaggctggcctgccccagcattcaggtggggctagtcctactccaggggaaataagaagtcttaggggatgggcgcctatggccaccttctgctgcagctgccttagatatgaaaacccctgggctccatgtattctggagctctgtctctgcctactgtttgggccaatccccctgccagttgaaacgtctccagggggcatggaatcttgtagctaggatctctgaggtccatagtgagagtgtgctgccccatcatccattcactcacccctttctaggagcctttcaaggccaagaaccagccctggcattgggcaacccccacaaggttaccagcttcctccctcttcagcttccagtttgtatcacctctctatcagctcttggtgctttttctccmaagatctgctcaaaatatgttggcttactcgatattttggtctttattagtggcagtggtgcttcttggccctgtctagttggccatcttgtccttcttccactaaaaattatttttaaaaatagtttcaggctgggcgcggtagctcatgcctgtaatcccagcactttggaaggctgaggcaggcggatcacctgaggtcgggagttcatgaccagcctgaccmacatggagaaaccccgtctctactgaaaatacmaaattagccggacatggtggcacatgcctgtaatcccacctactcaggaggctgaggcaggagaatcgcttgaacctgggaagtggaggttgcagtgagccaagattgcaccattgcactccagcctgggcaacacgagcgaaactccatctcaaaaaaaaaaaatagtttcattgataaccttcctttgaactatagttaatgttaagagttaacaagtaacatatgttgagtgcccatcagtgtaatacctcagatataaaagtcctgtagatttttaaaatatgatattcactcagttcttatttgcccagttaacagtgggatcggaattttttttagcttctaccatttacttatatttggagaaatgatgatgatgatgatgatatcccaagagcttttaatattactttaaygaatatttattaagtactcactatatgctctacatgtgtcatgtagagggtggygcatggtggtgatttcatgacatacaggtattcaggcattgtccgaaatgttctctgggaggatgtctggaaaaaactccagttccagatcgcgtctgcaaccatgaaatctccccaccatgaatgaggargaggaggaagaggaagagttataagtcaggacttacctcttgcctttattaatttgctgtttcaattaagtttaaataaaactacatgactgaaggatactgcccttcccctttccttcaaggctgccatttgaagggcctttgctagtttttgttgatttgcttgaaagtgtttctcttaggcccatgacccctttcatttatttttttatttaaaaaattgttaattgtagcaaaagcataacataaaactaaccattattaagtgtacagttcagtagtgttaaatagatccatattaaacagatcttcagcactttttcattttgcaaaactgaaaatctatatccctgaaataacaagtctctgtttccccttcttcatcccctggtaactaccattccactttctctttctatgaattcaactactctaggtacttcatagaagtagaatcatatagtatttgcctttttgtgactggcttatttcacatagcgtaagtacctgaaggtttatctacgttgtagcctgtgacttacayctttcatttttagctttggctgctgctgccatgttccctgtatttaagctgtggtttaaaacagcttgagaggactcaactcaggctgccaagaaaaatggcagcaagagctcattctacctattaaatactaacatgttgcttccaggagggaagtgagcaattattgtttattccaaaacatctggatatatatgcggttatatgttacagttaaaaatttgtatactarttcatgttaactgcaaagacaaactattagcaaattatctattagacttcatttggatttgtctctggtttatttaagttttgtctttgatagcagcagaaaatgaatcaataaatgaaaatgaatttatatttcttaaggcatccattactcatcagagatagttaatttagctaacatttggaagtgctgataccaccaacaaagcctagcatcaaataatttcttttaatttcttttaatgtcttaaacacaaataaaaaacttataaacaaatttgctttattttctgaatatttatagaatacgtaagaattggttttatcttcataaaattatataattgggcttatctgaggtttgttttcattctctttaattaaattattagttaatatctgatattcctatttattcttaccatgcatacaatctatagcccaatagcatgggaactcttttttttttttgagatggagtctstcgctctgtcgccgaggctggagtgcagtggcacgatctcagctcactgtaagctctgcctcccagtttcacgccattctcctgcctcagcctcccgagtagctgggactacaggcgcccgccaccacacccggccaatttttkgtatttctagtagagacggggtttcaccgtgctagccaggatggtctcgatctcctgacctcgtgatccacccgcctcggccttccaaagtgctgggattacaggcgtgagccaccgygcccggccagcatgggaactcttgaaataactgcatgtatttctttttttatccaaaaaactatttgaaagcttgctttgctaggttgttttttgcataagtgtgagagtagctagctatttctagtattaaatggtaatgggaaataaaattacagctgtttctgagttggatctccatgtggcttcattattttttcgctgtgaatttccagaagagtagatacaactgtaataaaatgtaaatgagaaaatatattcaaaaaccaaatataaaatgacttgaattatttttctggcttacctatacttcatttatctttattaaggttagtaagggaaatgtgtgtggtttatatkgtagatacatgcacacacagcaggataaattttcattttaatgctcattaagaatttaattgtacttaatatattttgcagttataaaggaaatagaaaaataaagtctatcccatgtgaaatgactctcactggtattgttttgcccataagaacttctgtcttgtttcagtgaagcagggaacaatcactaatacaacatttgtatctcatttcaggatgatgatgatgatccttttrtgaacactagttctttaagaagaaatagaagataatatatttaatggcactgagaaacatgcaagatacaggaaaaatgaaaatgttacaagctaagagtttacagtttaagattttaagtattrtttcctgagcataactccataagtaagaaatttctagttcacagacatacaatagcattgattcaccttgtttttttaacctggttgttgtartaagagctttgtttcaatatcastcttgagtaaagattaaaataaagctaccattttacatttctatttcataatgaaaaactatgtcagtattttaatatggttacatttagccaaagttgagggaaagagcttataaaatttaacttcttcataattttagtaatttcctagaggttctgggttttctgaaagtaaaacaatttatgcgaacctatgtctaaattcactgtttgttactatgtatgtttttttccartgcttcttataagactaaatgattagaagtacctaatagtttgaacagatatgtttttatttaaaagagtagaataacctttcagaattactgagttttttattccagttgtagcaaagatttcaaaagattgtgttcccattaagtggtagtaatttcctttattattctgtatccttaatggtgttctctctctctctctctctctctctctctcyctctcccccccgttccccactcttcctttctcctttgctttttcttctctttcatacatatatgcgtgcctagttctaggaggaaacgggttaaaaattgttttaaactacatcttgaaaatattgaagaatttgttttaggtagagtggtcagttgaaccttacagtaaagtatagaaatatatttaatgtggaatgtcaatgccaggatttctcattaacaatattttatctcaactttggttcctgtgatacatttctgaatgggcaattccagaaatcttagtagcccatgttaagcttctattttttacttgttttcggggagaaataagaattagacatcttcagatttaagttaaataatcccattctttataatcctctgtaaaaagatccctgagattattccttcttctagttttatgcgacagctttactttaaaattcaagttatacatcttgggagtacaatggcccgacatttcttcataggtagaaacaaatacttgactcagtgatactcatgaccattagaatagtcatacctggaatgtgtcaaattataagagacagacacttggttagtggctgcctcatatagcacttttgaagaggcctaagtcaaaacttgcaatataacattctattgactttcttaaaaatattttttctgtacctaacttgagcataagggttatttgagcaagtaacattaactcagtggaaggcattgtcctgtgaaatattcttaggcagatctgcccacatctttattgaacttgaaatctaatatttctagtatttgaacaaagcagaaggttaagtcagggaagagcagtgctgtccatgatgtaatggaagctaccaggggaggcagtgtctggatgatgctgtgctacctacccctgcacaagccatgctggctcagtctgagctgtgggccacatcagctagtggctcttctcatgcatcagttaggtgggtctgggtgagagttatagtgagggaatggtcactaaagtatcctgacaagttcctaggaaaaaaggaataaagtttttttccttaaaaaaaaaaaaattgctcttggctgtgaaaagaggtactaaatgcgattcagttcaccgctaaggaaagtgatgacatagcagttacagagggtgataaatctctccagctaattcaggtcattttgtgaatactatgtatcaagccctgaaaatatggtaaataaaacgtgacagggaaacctttttttgattgaatattgttacatagttaaatgtgctatatatccttaatattttatattgatcctgcaaaatctgttggttttaggggagttttgttttttgtttctaacaattttcagacctgttggtataggaatgtagaagtctttcagatgatttgaaagcagctgcatttgctcttggaggctttgggagagcaggaatgaaaacattcagaggaagacatctgtagggaattcttctgttacttaccaaagaataagtgtctttctggtgttttatttcctatcataaaaatacaacagtgcatttacaaggttaaagattcctcgaagttctaggaaattcttgaaaatataagtggtgcttagaaaattcaagcatttaggaatgtgacctttaattcaggtatgtaaaagacttttttcccaaacttttaaaagtaggaaatacaataaatacagaaaagtcatatggttgaataaataattataaattgagcactgatggaatccctctacaggtcaagaaatagcgcagtgtcctggatgcccattatattgttttctcctttctgggtaacargccctaacttctgtaatttaaaagctcctacttttgccacaaggtggtgcttctgccattagacgcagttaggaggatgcaactgcaaatctaaaattacgaagttagtgtagttgcaataaacttagaacatatgcattaatactaaacctatgcagtaataccataattagccttctaatcatgtaatttgctttacttaggtatttcatttggttcagcctgttatggaatttaccagcttgataaatttgcctataaagttttataaagaaaaggaatattttgttttcataaagaggaaaatccattcttagaaaaaaactgagtaaaaaagtatctcaatgggctgggtgcagtggctcatgcctttartcccagcactttgggaggccgaggagggggttcacctgaggtcaggagtttgagaccagcctggccaacatggtgaaacctcgtctctactaaaaatacaaaagattrgctgggcatggtggtgtgtgcctgtaatcttrgctrctcrggaggctgaggcaggagaatcgcttgaacccaggaggcrgaggttgcagtgagccgagattgtgccattgcactgcagcctgggcaacaagagtgaaactcaatctcaaaaaaaaaaaaagtatctaaatgtaaaatatcttttttggaaatatagaatttaaaagcgactttcccccaaagaaatctgatgtcctttttgtatctgtcataaatttaattcatagtattttgtgttttttttgttttttttttttgagacggagtctcgcactcttgcccaggctggagtgcagtggcaccatttcggctcactgcaagctccacgccattctcctgcctcagcctcccaagtagctgggactacaggcgcccaccaccacgcctggctaatttttttttttttttttttgtatttttagtagagacagggtttttctgtgttagccaggatggtctcgatctcctgaccttgtgatccacccacctcagcctcccaaagtgctgggattacaggcctgagccaccacgcccagcctattttgtgtttttttaaagctaactaccattaagatcattatagaagtttggtataatgaagatttgggtttttcagtccaatgagtttccatattcttgaatgaaaaagatccacatttcatcatttgcctgtttcattttcttttagtacttttgaacttagtttggtcagaaaatactagaattttagtttgatctaaagaaccagcttatataacttgctgttgccatgtacatttgtatgtctttgctgtgtcaaataactggatctgattttagctctttttaagtggtgaaagcaatgcatttttattcttcaaattcagacattgaatgtgtattaaaatgtgtgtgcttacctttaatcctctccccaccracaattaggaacacgtttctccaattactgttggcaagactaccaagaaaaattgttgaattagaatcccagcaccgggcacggtggctcacgcctgtgatcctagcactttgggaggccaaagcaggcggatcacctgaggtcaggagttcgagaccagcagggccaacatggygaaaccccgactctactaaaaatacaaaaattagccaggcatggtggtgggcrcctgtaatcccaactactcaggaggctgaggcaggagaattgcttgaacctgggagttggaggtcacggtgagctgatatcacrccattgcactccagcctgggcaacagagcaagactctgtctcaatcaatctatccatcaatcgataagaaccccagattgtatagctacatgttttagcccccttttcaaagtatatgttctccttgvtacttattttgacattctgacttttctacatatgctttatcaacctcttaattaaaccatcattgtctattttgagagataactgcgctgcttcccrttgtgtgttttaaatgttattgttcagtttgagtcaaataaaaggatatttaatctgtggtgccttgacattaaaagtggtaaagtgatttttaaagggctcttggctggcttttgcacattatggctgattaacaaaagaggtttaatggatattaggctggttggcccatgcaaactttgttctgcctctgagccactgtgtagtcaagatggttcatgtacaaatacccaaaactagtgcataagtacccttgatcacagtgcctgttcaatatcagtaccaagtgtttcgtgtttatattttatgtaaaaatcagaattttctacatagaagcttataactgcagtctacctgttagtgcatttgaactgatgggatggtatatctgactttgagtacattttgctagaggcaaaaggccattgcttaataggctgagaggcccaactgcatttccgttggttcttgggtagtctggaaatgaaggcatccattttacactcattaaagtgttttaccataaacgatgagataaataaataaacccatcataggtatcctgaaagtttctagtggtttgtcattccagtactgatttctgaggtttttagtagttttaagtccagatcatatttttaaaacttgaaagagtatcaactttacagaaagttgcaagaataatggataactttttatagtttattcagattaaccaatttttgacattttgtcattaaaaaaattctatatgtgcatatatgtatatgttatatacatatattttcatgtcaaatgtgaacacacacataaaatttctcaatcttttgacactaggttggaatgtcatgttcctttactctttaatacttcattgtatgttccctaggaacaagaatatccttttataaccaccatactgttaatctacagtccattttccaatttttttatttgttccaatactttccttatatagcatgtttttccctctagtctaggtttagttttattctgtgaatatgtagagtatcaacgtgcttcctgaagtctaaatcattcaaatgcacactcaagtcttactcccttccctattcctttcatccctttttgccccacccattgtaggtaaccaatttcatttttgtttattcttttcaccaaaatrtgcaaatttgtacattttttcatgtcccctattttcttacataaaaggttttatgctatatatactctttttgtctgaacaaatggagttttttgtcctacaaactactccatgtcattttatggagatcttccttttttatagcctcatggtactccattgagtttaaatgccatagtggattctgtcctcctatatttgtgccttttggtagttctgatatttacaattacaaataatactgcaatgctaatactagtatttttaatactgcaatactaatactagtattttaaaatttttagaagtgttatcttcagagtaaattcctggaaatgtgattattcggtaaaagagtaaatgtacatgtagttttgttaggtgttgccaagttcctttttataaaagtggtattcccaccaacaatatgtggactacctatttctctatagcctcaccatcagaagaatgtattgtcgtcagatttttgattgtttgccaaactgatggacaagaaatggcatcttagtgtaattataatttgcatttctcttatgaattaagttgaatttgcaaaaatatgcttaaggcacatttttacacccatttttggtgaattgcttgttcgtgtatcttactcatttttctagaatgtctagtcccctttttcttcactcgatataaaaagtattttttaaatattagatattaaccctttgtctataatatattgtaaaattttttcccaacttcttgtttgtatttttattttgcttatggtgactttttttgcagtgcaacagtttgtttttaatgtagtcaaatttatctggttttgcatctggagttggtttttgttgtataaatggtgtctaattgaacagagggtcttttaaggaacataacttttttatttttataattgcataattggactttatgaagtccaacttacattgattaaggtgtaatgtttttgtgttctgttcaagaaaaacattgcttaccttaagctcatgtaacttctgtgttatcttcagaactttatgttttgcctttccaattcaactccacagtccagctgggaattgatttctatgctcttaattgctattgggctatttttttctattttgtttctgctatgtgctttgtttcaaatcagatcctcagaacatgaaagaaaataattatctgttaatttaagctattgattaatattgcatcttacagatggggaaataatgattaaagtggattgtttttgttttaacaacaataccatgtaaaaatatctttaaggatatttctagaaaacatggccagatcagcaactcattttcacaggatgtaagcaatagctatcattgatcttacatgcttttaaaaaatgcttctaataagatttttttaattgccatttgaggccattatttttgagcaccagagaaagaaaagttgtattttttcatactggctctaactgccttgtgtttcataaagttcatgctatgataaagacaaattctagcaattacagttgaagatgcagcttgcaggcagtggaacagggaaggttgtgatgatcatatatctcaggggaaaagtctgtacacagtgaaggaaacatgtaggatctgaaggtgaaagtccgttcttgacccaccagttagactattcgacaaaatcatacgatattataaaaggctgaaattaagggtagagtgataaaaatcgaaattgtgtgaagaaaatgaccatgtcttttttttttttttttttaagttcgagagagttttgctttgtcgtccaggctgaagtgcagtgatgtgatcttggctcactgcaacctccatctctcccagattcaagtgattctcctgcctcagcctcctgagtagctgggattacaggcacgagccatcacacccagctaatttttttctatttttagtagagacgagacgggttttcactgtgttggccaggctggtctcgaactcctaacctcaggtgatccgcccacctcggcctctcaaagtgctgcgattacaggcatgagccaccatgctcggaccatgccatttatgctgtacttacaagtttaattcctaaataacaattcttaacagcaagtgccttctggcaggctgtggactcccagcctgggttcatcctgaattcacctcttccacaaccttttattatgtgatgccataactctcgacactgcctttcccattaaattgagtttccttaagggaatgccccttgctgtttttgtctctgaaccaagcctagcatggtgcctggcatagagcaggctcttagtaaatacttaatgcatgactatgtgaagacataatagattttgttaaaagaaaaaaattccaaagcactcacagaaataaagcagagctgttaatttccccctcactccttgacaatggaaataactctcgtaaacacaaatgactgtgctatgcagtagaggcattagagtcttaagttatgaagtcaatgacttgatttccaaacaccttcttacccaaaattgccaccctagtcagattggttcagttggctgatcagaccagtgactcatctgtgacagtggcaataattaggaacctgttacagataaagatggactgttgtcctctgtaaactactgagttttttccgagtataaatagtatttgtgaaaaatgcaaaagaatatgaagaaaaaggatatcaaaatcctgctattaacatttcactgtgcgccctttaacgcttcacataattgaagtgaaattgtatcagtttgtgtcctgcttgtgttattctgaaagcattttctgtgttactaaatttttctcaaaaacatttcttttaatggttgcatagtgttttgggtcatggaataccacagcataatatatttttcactataataaataatgcttgatggagtcatctttttacataatatttttatactttttatgtggagatagggtgtgagaaacctacatatatccatcatcctgcttcaatccatttctcttccccaggtccagatgattttgaagcaaattccagacattgtgttatttaatctgcatgtatatatgcacatgcgtatatataataaacaacaaggactctttttaaataaaatatgctgtcagttgtacataaatctttgaccacattttaaaaattatatccgtaggctaggatagagtaaaaaatagaatttcaggtaaaggagatgaaaatattttaaggcttatgacagttttaccagattcctttgcagaaaggatatatccatttatactcccaccagcaacatgagagcacctccttcactgcaccctacccaatacctagtcatttatttgattttgtgaacttcacagtaaaaggtttcttccatttggttttaggctttaacagtactcttcacccagaagctaatgataagattgttgatcagtcagacctgggcttcaatctttcagtccttttagctgtgtgacttatacaagtcagtctcagaacatctgcttccccattcagtagataaaaatgcctaccttgtatgttttgtgattagatgcaatgatgcttatgaagtgattagcacagtcccggcatataaaaccttcgatgattccattggctgctagctgcatcttcaactgtaattgctagaatttcttttatcatagcatgaactttatgaaatagaagtcagtgtaaaattaatatgaaaaaagacttctttttctgatgctcaaaattaatgacctcaagtggtaattcaaagaaataaaaaaaatcctattaaagcattttcaaaagagcctaagatcaatgatagctgttgcttacatcctgtgaaaatgagttactggtcctgtgatgctttctagaaatatccttaacaatttttttacttggtattgctattttttaaaaaaacactttaatcatcattctccctctgtaagatgcaatatcaatcaaatagcttaaatatggctaattatcctctttctcgttctgaggatcggattcaaaacaaagcacacaacagaaatgaaaaagaagtagaaaaaaatagcccaatagcaattaagagcatagaatgagagctgatgttaagaaatgtgactcaacctatagaattgtagaaaatccccttgaaacatttaattgcacggctctactctttagaggaactgtatcttccttttgccccctctgagagctaatgaagaaattctcattttatgagaacacttggacacagggcggggaacatcacaccccgaggcctgtcgtggggtggtggggaagggatagcattaggagaaatacctaatgtaaatgacgagttgatgggtgcagcaaaccaacatggtacacgtatacctatgtaacgaacctgcacgttgtgcgctagaacttaaagtataattaaaaaaaaaacctcattttaagtggttatccagcaacagaaccagaaaattgttacttttacagaaggtaggttttattgcatatacaaaatggatattgttattttaaattagatatgtccaaggtaaacgatcgtatcagcaaacaagaacagtttgacttcctctttactgatttggatgctctttctcttttgtctgattgctctggctaggacttctggcactatgttgaagaggagtgttgagagtgggcatccctttcttgttctcattctcagaatgctttcaacttttccccattcagtattatgttggctgtgggtttgtcatagatggcttttattacattaacgtatgtcccttgtatgctgattttgctgagggttttaatcataaagggaagctggattttgtcgaatgctttttccgcatgtattgagatggtc

SEQ ID NO: 94772 - DNA, 95375 bp, Homo sapiens
  misc_feature (1)...(95375): n = A,T,C or G
tcatgtactgatgtgttaactgctctgcacttaataaaaggatagcatctatgagagaaaaggcaactacagttgtccattcactgtctcctcattttccacccacaaatagtactttattttctgattacagcagtagtacgttcattctgctcctttatgtgtgtttacctccatcattgagattgctctggtgaaggttactgttcatcagtagtggggtggaatagatagtttagcagtcatctcaccttttattcacatattctgggctgggtgcagtggctcacgcctgtaattctagcactttgggaggccgaggcgggcggattatggggtcaggagatcgaggccatcctggctaacatggtgaaaccccgtctctactaaaaatacaaaaaattagctgggcgaggtggcacgcgcctgtggtcccagctactcaggagtctgaggcaggagaatcacttgaacctgcgaggcagaggttgcagtgagccaagatcgcaccactgcactccagcctgggcgacagagtgagactccatctcaaaataaaaaaaacaaaacgatattctgccaaagttgtataacctacagcagttaaaaggaagctgacttcaggtcagtgcaatttacacctttgtaacaacgagagccatacaccagtacaaattttggatggacctaaaatgagtctgcagaaccactgaaggatcaagtgagggaattatgacttaatcacgtaacaagcatttgagcaccttctctgtcaggtactgagcaagggactggggactcaagggtgaaccaaaaagatatgattactgccttctaggacctgacagtccagtgagagagactgacaagcaaatgactatgcaaaaatttcaagaattacatgatcagctatttttccataggtctcaaagctggataaaacactggaattcagggaatctttgagtaagatgagcaattagcccatatgttcagcctctccttgtactcattctgatttcaaatttaaatattctgtagtgctttgagacctagagaaagaaaacaatgaccaattaatcatttaggtaagttcctctaatcattcctcttcacgaggaatcaacatcggaatcagctcagcagcttttccaaaacacaaataacaacacctggctctggaggaaatttaagtaattatggaaacaaaaggtaatttaaaaaattctagtaactattttcacagagatttcagaagctactgcatccataaagtaagaacagatttggccgggcgccgtggctcacgcctgtaatcccagcactttgggaggccgaggtgggtggattgcttgaacgcaggagtttgagaccagcctgggcaacgtggtgaaaccccgtctctacaaaaaaatacaaaaattagccgtggtggctcgcacctgtgttttccactacttgagggctgaggcaggaggatcctttgagcccacgaggttgaggctgcagtgagctgagatggtgccactgcactccagcctgggtgacagatgagaccttgtctcaagggaaaaaaaaaaaaaagtgacactgaagaggctaaattagtgaactgcaagataatattgaggaaatcttccagaacatacagcaaaaagatcaagaaaaagttaagaatggtagaggtatccaagaaccaggagataaaacatttgtccaacagcaacttcagaaaatgagaatagaaaaatggagatgaataaaatcaaagaacatttcctgaactgatgatacaaattgtagttttcagactgaaagggcctgccaaatgtaaagcagaaaaaaatgaaagaaggtgaaacacatagatgaaatctctaaggaaagacaatttatcagagagggaaatagattaccgataaaggaaagtgactcagattggtgtcaggtttcttaaggcacagtggatcacgaacaatatagtcacagaggcttgaaagtgtgcttttatgtgtctgtgtgcatacggggtggggtgggtgggtcccaattttgttcctaaaattctaaacccagccatgctattaaggacaaaatacagatattttctaacacgcaaaggcaatgtttgcttccattcagcctttctaaaacacttacttgaaaaaaaattcatcaaaagtgaaaaataaatctaagaaatagcaagatgtcttatcagatgataatctatgaaaaaaaagaaaaagaactatgtcttattaagacaaaacacccaaccaaataacacgaaacagtggaatccagaagtgcattcaggggaaatcccagtaatacaactttgcacacacgtagaaacgtggtttctggagagaacagcttggagaacacagatactattactctggtgtgctacagatgagatgaaggcatgagtttcgtttgattaatgatatacaagaaaggtaaactgacgctttaagaaaaatgaaaagctctacgaaaaagttctaacttctacatcaaaacattccttttaagcaactgatgaaatagtaaaagcattgttttctgaaacaaccagttcaaaacttttggacttataaatcaggagggaggaggattaactgatacactataattcacgtataaactgtaggtttattttcttttattttgagacgaagtttcactcttgttgcctaggccagagtgcaatggcgcaatctcggctcacggcaacctgcgcctcccaggttcaagagattctcctgcctcagcctcccgagttgctgggatcacagacatgtgccaccacacccagctaattttgtattttgagtagagacggggtttctccatgttgatcaggctggtccttaactcctgacctcaggtgatctgccagccttggctccccaaagtgctgggattacaggcatgagccaccatgcccggcctatttattattttattttagagacagagtctttcttgctctgttgcccacgctggagtgaagtggcgtgatcatagctcattgccgcctaacttctgggctcaagcaatcctcctgcctcagcctcctcagtagttgggattacaggccagcacgaccatgtccagctaattcttaaaaattatttttgtagacactgcatctcatcatgttgcccaggctggtctccaacccctggcctcaagccatcctctcgcctcaacctcccaaagtgctcggattacaatcttgagccacgacacctggacctccaggtttgtttataataattataaagactttcctatgagtttgttttcctttgattttattcacaaataagcctttcctcatggactggtatcaaagactcatcctaaaaataggattagattttcaaactttgttctttttttttgagacagagtctccctctgttgcccaggctggagtgtgatggcgcgatctcagctcactgcaacctccgcctcccaggttcaagcaatttctcctgcctcagcctcccgagtagctgggattacaggcacttgccaccaggcccggctaatttttgtatatttagtagagacgggggtttcgccatgttggtcaggctggtctcgaactcctgacctcatgatccgcccgcctcggcctcccaaaatgctgggattacaggcgtgagccactgcacccggccccaaactttgttttttaatagtacattttgacttgtgaaaaggtttacttaatttgatcacttggaagcttaaatgtattctaagaaacatgtttaatactttttttttttttttttggtgggagagtcttgctccgttgtccaggctggagtgcaatggcgtgatctcagctcactgcaacctctgcctcctgggttgaagcaattctactgcctcagcctcctgagtagctgagattacaggagcccaccatcgcgcctggcctactttgaaaaaaattaataaaaactctaacatcttaatattctttttctttttttgagacggagtttcgctcttgctgcccagactgaagtgcaatggcgcgatcttggctcactgcaacctccaactcctgggtttaagcgattctcctgcctcagcctcccaagtagctgggattacaggatcctgacaccaagcccagctaatttttgtatttttagtagagatggggtttcaccatgttggtgaggctgttctcaaactcctgacctcaggtgattcacccgcctcggcctcccaaagtgctgggattacaggcgtgagccaccgcgaccggccttaatattcttaggttagtacttaaaaaaaaacaaaagaaacttgaacacaatctttctaattttaatgcccccctccccgcttttttatttttaaagagaaaaaacttctttttgagacggagtccagctctgtcgccaggctggagtgcagtggcacgatctcggctcactgcaacctccgactccctggttcaagtgattctgtgtcagcctcccgagtagctgggattacaggcacgcgccaccacgcccagctaatttttctatttttagtagagacgggtttcaccatgttggccaggatggtctctacctcctgacctcgtgatccgcccgccttggcctcccaaagtgctgggattacaggggtgagccaccgcgcccgaccaaaactcgtattttgaagaagcatttactccaagttctgtaattccttcaggctcagcttcagtttccttttgttaaagtaaaattacatcgaacacttactactaaaaacaaaaccaaaaaaaagcagatctattgaatcataacgtcctggggcgagcctggtcatgtggattttgaaaaaaatgcatgtgattctgaagcagtgatttaaataatgacctttcaataagtggtgggttccgttcatgggagaataggaaactgcgtgagtggtagaggcaacaagttcgaagagctgcgggacgttcccactctctctggtgtagccttggctcaccgaggcgcgcagggagtggaagtgcctgaggataaaggtgtgtacgtgcgagtctgagatgatggaattgctgctcaaacttcgtccccttctctgccctcagcaaacttattgggggtcggggagcgcgtggggtgcgagagaagagaggcaagttaggatagggagagcggctctctggccggtattttaacaaagggctgaactgactaagcatggccgggctgcctcccggtctcccgaggaagcccgcttgctgctggggagggctgtgcctccgcggcggtggctgtctcagctggcagtagaaatgcttccagcttagccccgacaacccctttaggcctaggcacgctctttcacaaaaccaggggctgtgaactctgtcaaggttcccaggtccatcgcagttaccarggcacagtaaaagctcgagtcaactatcaggcacatcctgcaaaagacgaactgtctggaccagtccgcgtttgagttttaattgagaataaataggtagaaaatgcttccctcctctcctttcaccttgtattaggtaacaatttctaccttaaaaaagacgggagacgagcggctccgcattccgagttactgggacttggagcaagggcctatttcagcgtagtttccgcttcttgtcacatgacgggagtcagtgggccgcgccttcccactgcgactccccgtgggtccgcaaaccgacacgtcactcctcggccctcaacyaaactgcttggggcacgttctttccgcgctcttgactcctacgcgccggcctatgacagctcggcgggagcatacagacctgcctctagactgctaagtgatagctgtaatgaccaattaaaaacttgaatcgcggcccggtttacgcctccggatttgacagacagttccgagaccctatcgctctccagaagcgtcctattggcctggagccagccaacgggggagcggtccgggaggcggacccggctcctgccagggttgggtgcgccgctgaacggatggctgagggagccccgcggatcgtttaggaaagccggccaggtgagaaggccgtagaacgtaacttgaaaatcagcggcaggtgcagtccatggcgttgatggggctgaacgaagtgcaggaggcaaaactctaaatgggggtggagagcagagcttagggccttgcagaggagggggcgtggggcgtggtgtgggggcttcctggatggaaggatgcgaaggtctagggagggagggtaaggtgggtcttgagaacagagcgtgggaaagactgggtcctgggactagttatggaggggaaggcgcgtaggatgctggggtgatgagtgtcccgcgctgaggggtatcagaggtggtcagttctttgagggtgggaagaagagggaggtgggacccgctggaacgaccggaagggagaagagagtaaaagatcgtgagagggtgtggaaacgtgtgtaggaaaacggggctggggaaattgcagtctgggaaactagaggcagggtggcaggagatgccacagcttgcagggcacagttgaggagagcaggttggtaagtgttttaagaaaggtgtctttgctcttatttgcttggcggtgtgcgaaagtgaccaaagagcacgagatgaaatctcccttacggccctgccctcaatgactagctcgtttactcaagttttcaagtagagatcctagcagtctcattttggtgtgtggctcgtatcaacgcagtggtgttaagtttgttcctatttcaggcattccagaaaacagctgcaaaccctgagagatatggctggattgttgacctcctggagtagttaggcctttatttttagttgcaaagtaagctttccctttgggactatacttaaacacatttctaaactgctcttctgggacagttaattatggagaacatgcttgacttctcagtgttggggctagcattctatatgccttccacctagtccagtgttgttgttttgtttttctcctttattccaataatagtgggaaaaaagattcatggaggaggatagacaaacgtttgttaagggatacacaagtacaactagataggaataaattctagtgttctataggataactattattaggagtataattaacaacaaaaatacacaatttgttgtatattttcagatagctagaagagtggattttgaatattcctaagacaaaaaaaataaggtgatgaatctactaattatttcccgacttgatcattacacattatatacatgtaccaaaatgtcacactgtactccataaatatgtacaattatgtgtcagtcaaaaagaataaaagcaaaacatcttgaatggtgttgcatatcctttgttatagtcgttataacttagctcttgatcaccttgtaatttaaaaaagtaggtctgggcgtggtagctcacgcctgtaatcccagcactttgggaggctgaggtgggcagatcatgaggtcaagagatccagaccaccctggccaacatggtgaaaccccgtctctactaaaaatacaaaaattagctgggcgtggtggcgcacacctgtagtcccagcttctcatgaggctgaggcagaagaatcgcttgaacccaggaggtggatggaggttgcagtgagccgagatggcaccactgcactctagcctggcgacagagcaagactccgtctcaaaaaaaaaaaaaaaaaaaagatagtagtactgtcttatacaagaataactaacctatggtagattagtgctatattgctatataaataattcatatctgtcatgtgatttccattttgaactgcctacagatagtgtccctcaacattttaatctactttttttaatcccccgactcttctgcttcagtaggaaaaattcgttttctttccctctagattatcatctgatgccatcaaactgtctgtgtaatttaatcagtctcttaaatcagcattgtcagttacagagaagccttgagacagatgattggaagcgggtatagatctgagcagtcgttacagtctgatatatgggatgagarcacagtggatctgtgtttgggtacctccacctctttttgagtgcatgattgtacctgcattagttatcaggtatgctgttagttgacccgacagccccattgggatttggaaaagaaaaaagtttatagccattcagttgaagtttaaatttagggctcgaaattgtgttgattcagtsgtgacttctatttttcctcttaatgcctttcacttcttcttttttttttttttyccttttwaaagagaggaggtctggctctattgtccaggctggagtgcagtggtgtgatcctagctcactgcagcctccaactcctgcctcakcctcctgagtagctgggactgcaggtgcagaccaccaagcctgcataattttaaacagttttttgtggagatggggttttgctgtattgctcarattggtcttgaactcctggcttcaagygatcctccctccttagcctctgaaattgctggggcttgcacttctggtctcaatgtttatttcctgcttccccccctccgcccctgccaccccatatagtcctgccttttcttgagtgctctctttctccattttattatttttcagtatttccaatctttcctgtttattttttcatctcttccttgtgctatactattgctaattgtgcttatgtacttgttagctgtgaaggagtgggaaatagaattatggatggtttattctgaccactccattttagtcttgacacatagacctgacttgtgcctacttccttgcaagttgatcatactttaggccaggcttggatactagtattagcyttgaccctgtctggtgtttttgctagctcctacgtcctttatgattccctctcatcataaaatatgaaaattaagtaaattgaaggtgttcaatatcttgtggtcttgactttttcattttagctgatcgtcgtgtgttgccacccattcatgtcaagatgactaagtttggatttttgcgattgtcctatgagaagcaggacacacttytgaagcttctcattctgtcaatggctgctgtattatgtgagtgtgcatgtgaacctctctttctttggggatagaaagaagaaagtctagaaaaaaattgaaaatcgctatcttaaaatgccttgttctttttagcagattgttacatttttccattcctcattagtataattttatgaaggcaaaataaaaggaatataaaagtcagggctatgggccacatgcagtggttcacrcctgtaatcccagcactttgggaggctggggtgggtggatcacttgaggctgggagtttgagaccagcctggccaacatgatgaaaccctgtctctactaaaaatacaaaaactagttgagtgtggtggtggatgcctgtattcccagctacttgggaggctgaggcacgagaatcgctcgaacctgggaggcagaggttgcagtaagccgagattgcaccactgcactctagcctgggcaacagagcaagactctgtctcaaaaaaaagagggctgtgatcatctttgaaagaatgggaagcatgctgtgccaattctgttttctcatagggttgaaagtgatattggggacccttggataactgatttttgtaaaagacaattatcttcaatttagatgtctcctatagtatttttgaaagtctcttgagagtttactctgtattttagattttctggctcttcatgagtcctaggtgtaattttgcttgccatacctattactttgctccaaggttaaggttagttatgtgtgtatggtgggggagtcagcgtatataaaagatgaccatgtaagttgagtttggtattagtaggtgaatgtaatgttataggcttttataattagttaactgtgacctatgaaagtggaaaatgtagatgccattgtcaggggaaagtaaacttctcttgtttcctttatgtggggaaagatggataaagactttattcagggattattttatattttctgtgacctctctactggataatactgtcttcattataatactatatctgctgttctttcatggcacattaccaataaaatattaactctctggtttttgcagccttctccactcgtctgtttgctgtcctgagatttgaaagtgttatccatgagtttgatccgtgagtacctttgcttgatctggtattatttcctttgggaggcattcaggttcatgggtttcagattcaaatttcagtcagctctcagtgatagagatgtgctttcagtacatttaagggaaaaaaaaamccttaaattcttccaaaggagataattatctccttttaagacgtatgtgttggagtccagcacagtggctcacacctgtaatcccagcactttgggaggctgaggtggagggatcacttgagctcaggagttcaagaccagcctgggcaacatggtgaaaccccatctctacaaaaaaaaaaaaaaaaagtatgtgttggaattgaccaagtaagtctctgaaactcaaaaaatgtgagaggcattgctagtatgtctgcctatcacttaagatctggctaggctaagagaattctggctgcccagtttggtaaaagtttgtgatgcagattgaaggaaagggtcctggtgtgtattccaggctcagaagagaatcacaaacaatggacttgagattcatgacattttgctgtttgtttgtttgtttagcaatttatgtgatagaaattgggcttcttagttaaattctagggcaatgaaaaaactcaaagttatcagtttgataaggaattttgttcattagatgaaaaagatatagtggaattccttagtggtattaataactagtatttactaagcattcattttgttccaagcactaatttacagattatctctaaatcctttcagcaaccctttgagatgtaggtactattattcccttcttagaaatgaggagactccactgggcacggtggctcacgcctgtaatcccagcactgggggaggccaaggcgggcagatcacaaggtcaggagttcgagaccagcctggccaacatagtaaaaccccatctctactaaaaatacaaaaattagctgggcatggtggcatgtgcccgtaatcccagctactctagagactgaggcaggagaatcgcttgaacgcaggaggtggaggttgcagtgagccaagatcatgccactgcactcctgcctgggctacagagcaaggctccatctcaaaaaaaaaagaaaaagaaaaaagaaatgaggagactcaggctgggagtggttatctaaggttgattattcagtacgtggaggaaccgtgatttgaatgttggtttgtctgactccagagactgtagtcactgtgttatattgcctaaagttaaggcttataacaaatttggagggccaaaatcataggttcttgaaatattatkggtatcttaaaaatagtatattcaatcttgtggagtattgattgaaaatgcctgcatctatttgcaaatttataattttgttttgtgtagatatttgaaagcattttggaggcattacaaataattctgtttggggcctcccaaattcagtttatattttttctcatgaatgaggagacatgtccttttgttttttctttttttgtttgagattgggtctgactgtcacccaagctgaagtgcagtggagtgatcacggcttactgcagccttgacttgtggggcctaagtgatccccccacctcagtttcccaagtagctgggaccacaggcatgtgccaccatacctagctaattttttaaaaattttttgtagagatggagtctcactatgttgcccaggctggtctcaaactcctgggctcaagcaatcctccctcctcagcctcccaaagtactggcattacaggtatgggcttccatgcccagccyacttttgtttcttgatcccaatctgttaggcttctttctcagaccctctgaatgagcaaatattgatgttagataatcaaggaatgcaagagcatctgctttgtcgtcaagagctgttagggaccataagggacttgacacttccttttgcagaggaggaaactgattcccagagtggtgaatgcagtccagacctattcctactaacttatacttcctctctcactctgcctctcctactggtagctaaaggacacaattctgacacatactgatgtctgcaaccctcatctcttctgtttctgacagtcaccaaaataacatcagtgacaaacagaaggatagagatttctgccatctgttgcttctgtttacttcagctttcaaaacttgactgaccaaggaggaaatagggttagagaggtgggcagagaggacggttagtcatgattatccatagtaattaaactgtctctagtttgagactctttgtttatttttgtctgtcttccttttttttggaaacagggtcttgctgtgtcacccaggctgaagttcagtggctcagttatggctcatgcagcctcaacttcctgggctcaagtgatcctcccacctcagcctcccgagtagctgggattacaggcacgcgccaccatgcctggctaatttttgtgttttttgtagattgggtcttgttatgttacacaggctggtctcaaacttctgtgctcaagcgatccatccacctctgcctcccaaagtgctgggataacaggcatgaactactacaccggcctcttctttatttttatttattattattattattattttttgagatggagtttcgctcttgttgcccaggctggagtgcaatggcacaatctcagctcaccacaacctctgcctcccgggttcaagcgattctcctgcctcagcctcctaagtagctgggattacaggcacgcgccaccacgcctggctaatttttgtattttttgtagattgggtcttgtcatgttacacaggctggtctcaaacttctgtgctcaagcgatccatccacctctgcytcccaaagtgctgggataacaggcattaactactacgccggcctcttatttatttttatttgttattattattaattttttttgagatggagtttygctcttgttgcccaggctggagtgcaatggcacaatctcagctcaccacaacctctgcctcccgggttcaagcgattctcctgcctcagcctcctaagtagctaggattacaggcatgcgccaccacgcctggctaattttgtatttttagtagagacagggtttctccatgttggtcaggctggtctcgaactcccgacctcaggtgatccacctgcgtcggcctcccaaagtgctgagattacaggagtgagccactgcgcctggccttattattattattatttattttattttttgagacagggtcttgctctgtcaccaggctggagtgcaatggcatgatcagggctcactgaagcttcaacctccctgggctcaggtgatcctcttatttcagcctcctgagtagctgggactacaggcgtgtgccactaagtcctgctgattgttgtatttttttttagaaacagggtctctctatgttgcccaggctgatcttgaactcctgagctcaagtgatccacctgccttggcctactaaagtaytgggattacaggtgttatctacctcacccagccttatttctttttaaataagaaacttaaggacttacatattttgggcctaaagaactatctttccatttaaagctcttaagcattttatgtcaaatatttttcatgttgtctatgtatctgtgtatctttctatattttttttgagaaagggtcttgctctgttgcccagtctggagcacagtgttgtgatcatggctcactgtagccttgacctcctggactcaagcagtcatcccacttcaacctcctgagtggctgagactataggtgtgtgccaccatgcctggctaatttttaaaaaatgttttgtagagacagagtctcactgtgttgcccaggctggtcttgaactgggcttaagcgatcctcttgcctcagtcttccaaagtgccgggcttacaggcatgagctgccatgcctggctgtaatctatatttttatgcttctatataggtgacataagaagcattttagataaccacatgagtagaccttgttaaaagtttaaacactgattaagaaagttgtgttatgaagtaggttaaaattttttcatcctgcatatgatggtataccaacatctttaaagattctcatcactggaaattattcatgtgtctttgtgtgcagtatagatttttaaaaatatgttcctgtcacttaaaagccagaatctggccaggcatggtggctcacacctgtaatccaagcactttgtgaggctggggcaggtggatcacctgaggtcaggagtttgagaccagcctggccaatatggtgaaaccctgcctctactaaaaatacaaaaattagctgggcattgtggcgagcgcctgtaatcccagttactttcagaaggctgaggcaggagaatggcttgaactccgtaggcagaggttgcagtgagccgagatcgtgccattgtgctccagcctgggcaacaagagcgaaactctgtctcaaaaaaaaaaataaataagaaagccaaaatctattggtgcccacatctcagtggctttgtcttcatggtgcttgaattctctgactggtcctaatgcctaccacatgtcagcttgttgaagtatcccatttgattgctttgttacaatgttaggctccagtttcatttcctttttatttatttatttttttttctgagatggagtcttgctctgttgcccaggctggagtgcagtggcaatctcggctcactgtaacctctgcctccaaggttctagcgattctcctgcctcagcctcctgagtagctgggattacaggcacatgccaccgtgcccagctaatttttgtatttttagtagagatggggtttcaacatgttcgtcaggccagtctcgaactcctgaccttgtgatccacctgcctcggactcctaaagtgctgagattataggcatgagccactgcacccggctcatttccttatgagaaaagcagtgctttagttgagacaagcatggagatasaagtaaacagacttatggtagtgtaaaatgattttcatggcataatatctgatgttaaactgatttttcattgagtaatgctgaatttctcaatggtgtatcctgaggagcaaaattcaccacaaatttacaacaaagtttatttcttgctataggtactttaattatcggactaccaggttcctggctgaggaggggttttataaattccataactggtttgatgaccgagcctggtaccctttgggacgaatcattggaggaacaatttacccaggtgaggagaccagatgtgtttttttttwwaaaaaaaaaacagaaatatttgtatgctagagaaccagtttcttttatttctaatagctttgtcttgtgacacttgtaatttcatcctgattacaggttcctaaaagtgcatcttacataaacaggagtacatttgtagtagagtggagatgggtggtttttatacattctagacttctgattgaatccttaggrgagaaatttataggcttactgcagttgctatgttagtatttctggtgattkgtcaagacttacatagtcactytattgtatctgggattttccctttctttttcccttaagttctggtaagacaacctaatggagtttcttcttcctgttacaggtttaatgatcacctctgctgcaatctaccatgtactccattttttccacatcaccatcgacattcggaatgtctgtgtgttcctggcccctctcttctcctccttcaccaccatcgtcacgtaccaccttaccaaagagctcaaggtgaaggatttggggtgacaggaggcttgggaatgaatgttattgagcctctctaatcgatgctggagggtgggggacagagccttagaaaggcagggagccagaaggtgaagacagcttttactgggccaaattaattggcttcactccaacccctttctgcaatatgtgttttttatcattagcaactgtttgtccttatgagagtacagttgaaagtgaaatgtaaattgcaacataaagaaaaaaacatttaaaatgcaaaatgtgaggtttggattttgaagtcctcacaatgtaagggagaggaaaaaaaaactacatgaaacattccmaaacggttagtttttcctaccaggaatgtactcagcaattatttgttgatttaaaaaaaatttttttttattttaaaattcttaagccatttggcttccgtagtagactccataatgctgactctgtttttccaggtttcagcattgctgaccttggctccctgggtgctattcttagtttgtgctgcggtgttagagagatacctgagaggtgataaactagtagggggtttgggaagcctgaatttagtttggaaaactttttgatccttctccttgctgccctttcccaaatttgactctttcaacagacaagtctttacttttttggaatgtggcttatatctgttgctcctttctcctgagctcaaagggtgcctggtgatatttaagctttattgcctaagctcctggcatcttcagtttaggtagattatcacttagctttcttggctttttaactgaaataataattttcttcctttgattgtccttgcatggcttttagaggtgtgactggtgttccaatgatgtacagatattgttaggggtagagacttacgagcttggggagattggtagccaaacagcccattctgggacagtattgatgtttgacatctcacttgatttgtctgtcctcagcatatgtgttctcagtgtcaggtttggtgtcatcatggggaattggtcatgaagtttttagcttgcttgtgctgtgagcatttctagcatttctaacatctcacatctaccttcgaaattgttggactgttttctgggctcattataaacagaatggactagtggatcctctrttctttctcagcattgtattggtgttaatgtcttattaccctttttttcttacaggatgcaggggctgggcttcttgctgctgccatgattgctgtagttcctggatatatctcccgatctgtggctggctcctatgataatgaaggtaagacttttaaaatgctgaagaagatcatctcacctcattatccaacagagcttcacaaagtgcagtctatggtttagcaataataaaaatggtaactgggtgagaatattagaaatgggcaggaacggatcttggacaagctcatgttctcttcccatcatcctttccagaaaggtagttggtaacytttcttacaagtctttggttcatctctgcactcataaaatagttaactattgttttaacattataatcatttgctttattttcctacataaagggagtggatgtccttaaaattttaatgactgattgacttattctcaattcaacatacatttgttgaatgttattgggaaaacatagtattaagtgttaggtaatgactaagattactttgtgcataattataagaaattaaagagataggtaatgaataaggttatattggcccatcatctattaaggaagattaaaatggacatgtaaatataactccagtgacaggagatagtactatgtgccatgataaaaatttgaacagagtacttcaggaatgtagtggaaggagagatttggggctgagcttggtggctcacgccctgttatccagtactttcrgaggctgaggtgtgtggatcatttgagctcaggagtttgagaccagcctgggcaaccctgtcactataagaaatacaaaaattagstgggcatggtagtgtgcgcctatagtcccagctactctggagactgaagtgggaggatcgcttgagcctgggaggttgaggctgcggtgagctgtgattgccactgcacttcagcctagtaatagagcaagaccctgtttttgttgttgttgttgttgtttttatttttatttttttaagaaaaaaaaaaagcagactggagaatcaaggaaggctttttagaagtggttgagggtcaactgggtcctgaagttgggacttcattaggcagatatcaaggaaaggggcaattggggcatgagtattatatgttaagacatagaggcaggatgatgaatgatagtataagatgtctttagaactatactagcaggatgtttagtgcttggaaagartgataataatkgccaatatttacttaatgtttattatatgctaggtactcttctaagtgctttacaggcattaattatatttgttttcagaacactwttatgaagtagatactattacttcttcttacatgaaactgaaacaaaaggaagtaaataatttgcctaaaattacactattacttggtagtagatscargcagtctgttccagaacagtattcttaatgactrtactagcctggcctcttgttgaatttttggtgtgtcctttctgcagggattgccatcttttgcatgctactcacctactacatgtggatcaaggcagtaaagactggttccatctgttgggcagctaagtgtgcccttgcttatttctacatggtaactttttctacatgttttcaatttttaaagttctctaaatactgtatttcctatgggtacttattgtttgaccaactttcttttctggtaggttcccctaaatttttttcttttccagtatattttttctgttcatacttacgtatacatgtagacttccttaattgcttccacttgctcacatatccctaaatcctctgtgtgaccttacagtagattgcatttagattaattctgaggcttgagtccctctcgttatgtgatcatgacatcagcaaccacaagggagcaggggattgagttacagtgatgggtttgaacttgattttatattttcttttttaaaatttattttattttgtgtgacctgtacatgtaaggacttgattttcctgtttaaaaaaaaaaatcagttatttgaactctttaagccatttggcataaataaagttatagttactataagtgttctttaaaragtcacaggtgatatcctacaatatagtggtggtggtctgaggaggcatactcagaggaactgtttttttctattccatcataggtctcgtcatggggaggttatgtgttcctgatcaacttaattcctctccacgtcctsgtgctgatgctcacaggccgtttctctcaccggatctatgtggcctactgtactgtttactgcctgggcactatactttctatgcagatctcctttgtgggtttccaggtgagcccttgactgagtagggttttcagcttctactttttctatgcagccccaactagactgatttatcttagattctgttaagaagagtacgacttattcacagcctttatattgaactacttgtgttagttgaagcaacagaattactggtcattaaagtttgcatccaggagtctgctmatatttgctccgtggagtttgaattccatggctcttactttggctttaagtttgtgggaaggggagggatatttagttgagttgagtttagatgagtgatcagagttaaaatttccagtcttcttaatgcagatgaccccatgtagtagcagagattcctgatcttaatggcatctaattgtaagtgcttcaggaagtaaagcacaaacctttaaccacattgctccacagggttaacagacaactgttaaatcaaagaataatgtggtatgtttgatttctcttgtgaaattatcatgaaaatgcaaaccttatctagaggtcaacaagtatttctttactgattacctactgcagattgtccccaacttatgaagcgtgacttaggattttttggctttagaatggtgtgaaagtgatctgcattgagtagaaaccgtacttccagtacccatacaagcattctgtttttcacttwcagtacggtagtcaataaattacatgagattctcaacactttattrtaaaataggctttgtgctagatgattttgcccaactgtaggctaatgttaaatgttctgagcatgtttaaggtagtctacgctaagctgtgatgttccataggctaggcgtattaaatgcattttctacttaagatattttcaacttaaaatgggtttatggggatataacccaatcataagttgaaaagcatttgtatatgcagtttgctaatcacttgaaaatgtaaaaagaataaaaatrcggtcatagtccttaaggaagttttggtcttcttacagggaaagaaatacaggcagctgtctatatcygataggctacagttctggaagtgtggttcttgaatcatcatcactagcagcagcagctagaaacttgttagaaataaatgcaaattctagagccccaacacagacctactgaatcagaaactctggaggtggggctcagcgatctgtgcttcgacactcctacctccttggtgactacgatgcccactagcatttgagaaccaccgatctaaggcaaagaatgattaagtgctagaagagaactaatgtgatatggaacrtagagaggagtgattgatttcagtttggcagattgggaagagatgatatttgagttggaccttgaatgatgagaattttagtggatgggaatttggggaaaattacagtctaggctaaggaaataacctgagcaaaagccagagatgtgataatgatagtgtatcttatgctttagggggctgcaaatattctgtagaaaatatggctggtgaattaaacccttccctagattggccctgattccttcrgggcctcagaactcatttgaccatttggtttgaactagataagaataatgcaggcctgcactggacttactcattttttttccttagtattaacatacatatccttttacctacagcctgtcctttcatcagagcacatggcagcctttggggtctttggtctctgccagatccatgcctttgtggattacctgcgcagcaagttgaatccacaacaatttgaagttctyttccggagcgtcatctctctggtaggctttgtccttctcaccgtgggagctctcctcatgctgacaggtagggaaggctcacagcttttttycttttttctttttttttaagatggagtttcgctcttgttgcccaggccggagtgcagtggtgcgatctcggctcactgcaacctccacctcccaggttcaagcgattctcctgcctcagcctcctgagtagctgggattacaggcgcctgccaccgcgcccgccaccacgcccagccaattttgtatttttagtagagacggggtttctccatgtttgtcaggctggtctcaaactcccgacctcaggtgatccgcccgcctcggcctcccaaattgctgggattacaggcgtgagccactgcacccggtcaggcttagagcttttactattaaatgcagatgggtacagacatagaataaactccaaaagacagggtattttctgaacacaaaagattatttttttcttatttcttttttcatcggaagcatgtacaatcccacaattttacattcaatccacttttcagcccagtgtttggattcagcatagcagaaaatatcttgttggagctgctcttaatcacacctggtgaaaggactatatcttaccttgcgaatctttctcctttttctttctttttttttctttcctattgattgggtgggagaagtcattatattgcttaccataccctccaaagtggcactcatctaatcccatggaaactaaatcatagctgtttagttggttggaaagccaaattttccttctttttctctactttgctttctcagagatgaatttgattttgctcaagtctatctattgactaattcagagcaggacttgaggatatagttgatttaatctctacagttggccttggtttgaccaaatttggcctaaaaccctttcaggtagcatttctgcctctgttcttctctccaagtttatatacagcctggctttattctgctggcagtgctgacaaaagtactctcaggtttgaaagaaaggaaggagtgaaactctctaagtattggtggcaattaagcaaaaacctaatccttctctgtcactgagaatcttattaaaatgggaagttgtgattcatttggatcagatgtttgtttgaagagtgtgtgtggaatatttattgcctctttgctgctaggaaaaatatctccctggacggggcgtttctactcrctgctggatccctcttatgctaagaacaacatccccatcattgcttctgtgtctgagcatcagcccacaacctggtcctcatactattttgacctgcagctcctcgtcttcatgtttccaggtatgtggcctygtgttctgaaatggccttgttcataagaatcacaatttgattccaaatttgcaagctaccctcattcgtgttttgtttttctttgcctgtttatgttgtgtaatacagaggacggctaagcaaattttctcatgtatgaagctgagcagaagtcagaagttcaacagttgtagatattggcaagttcagcctcacagttttctgttcatttgtcatttgtgttataagttaaaatttaacggtaatttttactccggttttgttttgtttkgtttgagtacttctgtcgtactccttcccctttacccttgtttttcctcttggaagtattgaagtmccataatgagtactgctgattgtaaagcctcatcaatctcttatcttctggccaatccagatgtgttttagaatttaccggtgttagtggtctttttctcttaaaaaataacttttaccttttttttttttttttttttttgagatagagtcttgctctgttgcctaggcttcagggcagtggtacaatctcagcttactgyggcctctgcctcctgggctcaagccatccttccacctcaccctcctgagtagctgggactacaggtgcacaccaccatgcccagctaatttttgtattttttttgtagagatggggttttgccatgttgcccaggctggtcttgaactcatgggctcaagcagtctgctcaccttggcctcccatagtgctgggattacaggcgtgagccactgtgcctggccaacttttacttttttcttactgtgaaagtaatttgtgtattgtaaaaatatatgtaaataaatagaaaaagatgctgggcacaatggctcatgcctataatcctagccagttaggaggctgaggtgagaagatcacttaaggtcaggaatttgagatcaacctgggcaacacagtgggacccacgtcttaaaaaaaacaacaacaggcctggaattgtagttcacatcagtaatgccagcactttggaaggatgaggtgggaggattgcttgaggcgaggagttcaagaccaggctgggcaatatagtgagacccctgtctctacttaaaaaaaaataataataataatgcgcgcacacacccatacccacacacacccatacccacacacacacacatacacacatataaaataaataaaattagctgggcatggtagtgtgcacctttagtcccagctacttggaaggctgaggtggaaggattacttgagcccgggagtttgagaccagcctcggttatacagcaagacccccatctcaaaaaaggtacatattcaggagttctcactacccatctctagccactgttaacattttgatgtatatttatcaaataagaatgagatcatagttttttccctgatttttttcacttcataaagaatcaaatttctctgttacttagtattattttatagaaatacttaaaatgtatcatttattagttttttaaagtacagagatgtgtcaagatgtgtaagaaggcaagtagtacataatctcatgcagcaatattttaatatattccattttataaatatagtataattagctccttgtttttggacatttgggttgtttctgatttttttgctactttaaagtgtgctgtagtaaacatctttgcatgtttctatgattgtttttttaggataaattcctggaagtggaattgctgggttaaatgtgtggaatcatccagtcatataatgaagatacyttaccttgtaggtttcaacctacaggactcagctgcttatttctccttccctcttttgtagttggcctctattactgctttagcaacctgtctgatgcccggatttttatcatcatgtatggtgtgaccagcatgtacttttcagctgtaatggtgaggatgccctcagtctggtagactttttcactctaactctgaggtgcttttttatctgtctggcagaattcagaaagtactgatgattgtgcacatgcttccctctgagcatttgagggaatgagttgtaagttgttgatcctttccaggaacgtatgggacactcatacattctggttgtggggtccaactttcttggattcrtaaytttgtattatagaagcatttttgcactttgttggataatatgaccctgggtgtcttaaaacgggagatgatatttttttcttgaaggcttgggagtattacccagtgctagattgttagaggagggatttgaattttttttttttttttttttttttttttttttgagacagagtttcactcttgttgcccaggctggagagcagtggcgtggtcccggctcaccacaactgccgcctgctgggttcaagcgattctcctgcctcagcctcccaaatagctgggattactggcatgcaccaccatacccagctaattttgtatttttagtagagatggggttttccatgttcgtcaggctgatcttgaactcccgacctcaggtgatccacccgccttggcctcccaaagtgytgggattacaggcgtgagccactgagaatacacacattctcttatatactttaaatcatctytagattgtaatactaataactaatactaggtaaatggttgttaatactgtattgtttagggaacaatgacaagaaaaaagagaggagagattttatatattgtagtaaaatagtgtttctcatatttttttggtctcaamccacagttatgaaatatactttatatcattattcaagacacacatgcatatgtacatgcatataattgaaacaaagtttaagaaatacatactaatactgcaactntttcaagtattttctctttcactttttgtggaggtcatgtttgatgaaaacccctaaattgatgtcttgatctactaataggctgaaatctgtaaattgtggaacactgattagactgatcatgcttcctgtctctgttaggtgcgtctaatgctagtgttggcacctgttatgtgcattctctctggcattggagtctcccaggtgctgtccacatacatgaagaatctggacataagtcgyccagacaagaagagcaagaagcaacaggattccacctaccctattaagaatgaagtgagaagcaatgttaagagtagacttgggaaactctgtgtgtgtgtgtgtatgtgtgtatgtgggcagcrgggggtgggaggagtaaagtagagcactgtcctaggtggtcagaattaactcatatagcctctgacttattttgatcaatctcatctatatgaatgtgtctaagaagttgtcctgtgttgtgtgaatttagtttggttaactacacaattaattctttttccttgtttaggtggcaagtgggatgatactggtcatggctttctttctcatcacctacacctttcattcaacctgggtgaccagtgaggcctactcttctccgtccatygtactatctgcccgtggtggggatggcagtaggatcatatttgatgacttccgagaagcatattattggcttcgtcataatactccagaggtgaagatttgggaggggtgggaattgtgggttaggggcaaaggggaagacatttgatgttacagtgaatcatacagcttttagatgggtggaaagctkggtgaaactggaactttgcaactctagtcttgaatgagccttaaaggtgaacctccattcaattctgggatcttttgtagttactcttactagtaattatctagactttgcatgcacacttttattgatatgatgattttaacatgaggtagaacatcccagttataaaagaagaaaaaagttatagataaataatacatgttcastttagaaaaatcagaaaattgaatcaagaagaaagatataaatcttgtgtaaagtgatcaccttatgataactgcttttaacattttaatttatatcttttgagaatctgaagtgatttcctttacaataactattaggaatatcatttctgagacaatttgttaggaataaaaacttttaagagtctcttaattcttgtccatcgtatcatgtgatttgagtttccaccccatctttatagtaagtgatttttgcaattctgttaaaaggttatttaagaaaattgtctaatgacactaggctattgatgtggctacattgcacagtctcccacacctcccaccccattatgttagtataaagtgacctgggatgaagtgttgggaatgttggtttgttatttgtgctgagattttataattgtatataaatggaagaccaggtgccaggatttattttctggtttgacatgcattactttgtgaagaaattgattagttagccagrtgtcacttctgtcagaccaaagatgccttctctgttgcatttgatttttagagacagtgagaagcttgttatttccatttcccattctactttcaggatgcgaaggtcatgtcctggtgggattatggctatcagattacagctatggcaaaccgaacrattttagtggacaataacacatggaataatacccatatttctcgagtagggcaggtaagataaagggatgatctttgagtgtttggtgtacaaggtctaatgggaaatgtgtctgcatgaggggatcatatgacttgggattttgctctgagaattgtacatttgtttttccaggcaatggcgtccacagaggaaaaagcctatgagatcatgagggagctcgatgtcagctatgtgctggtcatttttggaggcctcactgggtattcctctgatggtaatatacttgattctgtttctagctgcaggacatagattctaagaaaactagatgaatatcctagttttctgtacttttactaatattttactaagatatttttctttcatgggaagttcctaagtatttgcaacttgaggtttgggtattttgatttttttctttttgtaacaagaggacataaatgtaaacaattcttgtgtaggtacagcatgctatatgattgtctaaggcatagaagtagttccacaaccagtaataaaaccaagctgaatataaggctcatgacaatgaacttaagaattagcatttttttagtggttttaagccatataatcattgaccagcttagaaatgttttatatggcctgacagcgtgtaaaaaaagagaacattttatatatatataaaatatatataaataaaagtgtgtgtaaaatggaggttaccatgtgccctatgattattggcacaaagatttttagaagaaacatccaaatatagttatctgccttaaaagttaatgtaatgcctgtttacactttaaaaagttaagcagttcacagccgggtgtggtggctcacacctgtaatcccagcactttgggaggccaaggcgggcggatcacttgaggtcaggagttcatgaccagcctgggcaacatagtgaaaccttgtctctacaaaaattagccaggcgtagtggcacatgcctgtagtcttagctactcaggaggctgaggcaggagaatcgcttgaactcgggagggagaggttgcagtgggctgacattgcgccattggactccagtckgggcagcagagtgaaactgtttcaaaaaaaaaagttaaacagttctgaaggtttataataaaaagtgatagttcactgcccaaaaatctaagcccccttaacatcagtccccagaagcaatgattcctgcagctatttcttctagtacttacatgcatatttctaaatactgtgtatacagtttcccctccatatccgtgggttctgcatctgtgggttcaaccaaccacaratggaaaatatttgtgaaaaaaaatcataatacaacaataaaaatcatacaaataaaaaatacagtataacaactatttacatagcatctacactgtattaagtattataggtaatctagacatgatttaaagtatatagacagatgtgcataggttatatacaaatactataccattttatataagggacttgagcatttgtgaattttgatattctggtgggaggggatatataagttagactttttattttttaaagaagataatacgataaccattaaaaaacaatgcagaggccgggtgcgatggctcatgcctgtaatcygagcactttgggaagactcttgaggtcaggagtttgagaccagcctgcccaacatgatgaaaccccgtctctactaaaaaaatacaaaaattagccacatgtggtggcacatacttgtaatctcagctacttgggaggctgaggccagataatcacttgaacccaggcagcagaggttgcagtgagttgagattgcgccactgcaccccagcctgggtgacagagcgagactccatctcaaaaaaaaagaaaaaagaaaaatgcaaaacactgttactgtctagatccatgaaaacatgtatgtgaagatcataaaagaagatagtgtagttgtccctctgtatccatggaggattgtttccaggacacccccacccctatcctcacccctcaccaggataccagaatttgtggatgctcaggtcccttatataaaatggtttagtatttgtatataatatacacacattctcttatatactttaaatcatctctagatgataatactaatccctaatactaggtaaatggttgttaatactgtattgtttaggtaacaatgacaagaaaaaagtctatccatcttcattacagatgcagtcatctgtttttttgttttgtgaatatttttgattagaggtttgttgartttatggatgtcaaacccacagatatggaaggccaactgttttggttaatttgttacactgaatttatttttcaaggtcaaattattcattgggctttactaataggagttctgtaacatttgagaggcataataaaaataaaaaaagttgggcctggcccagcttctttttttgtagacaaccatatcttttgaacaatgggctctccttgatgcagttcctatcatcatcatcattattgtttttgagacagagtttcactttgtcacccaggctggagttcagtggcackatgtctgctcactgcagcctctgcttcccatgctcaagtgatcttcccacctcagcctcctgagtagctgggactacaggcacacaccaccatgcccggccaatttttatactttttgtagagattgggtttcgccacattgcccaggctgttcttgaactcctgtgctcaagtgatccgcccatctcagcctcscaaaatgctaggattayaggtgtgagccatcacacccagccattcctattattttcactcttccattcatagagcttatgaggtttttgcttcagacatacctgccaggcagctacaatactattgttctatcatagccgagctgatgttctgggggtttatttttgttcctgtttctggcgctatgatctaggcaagtctctgtgcctcagtttctccatttgtaatatgaagataagaatgcagacactgaacgaagatagtaatattattcattggatgtttaccatgtgacaaacaacttactaaatgctttacatgttgttactcataataacagccctattgttgtagatactcttatttttctaatttgacagatgagaaaactgaagcacagagaggttaaataacttgcccaaggtcacccagctagaattggcagtgctggaattcaaacttaggcagtttggatccagagtctgttcttaaccaccgtgatatcccctcgaactctttgcagtagtgcaataggaatcttatctttttttatgcattagaaatatttttaatactaaccatccagtgaaacatgtagcaactgatttccctaaagcctgtgcaagcaatacagtaaatgatgaaccctaaaagagatatcatgagttgatgatagtgtcaatatttattaagcatgggagtgtgtttgacacagaaatgttgacttctcatatacmtgctttggaggtctataattttgcagctgttggtcaagaatgagaagactcatgtcttgtctacctttttggtaaagctactactytttagatcagtcgtgcccactgtctaatagaaataatgggaaccacattatcattttaagctttatattagtcacatcaaactaagtataaagaaacaggtgaaagtaattttaataattttaactgaatagtcatatcaaaacattattatttaatttaacatgtaaccagtatacccccttttggggtttgttttttttactaacttttcaaaatctaatgtgtatttcatacttacctagtgtgtattttatacttacagtacatcttaatttggactagccacatttcagctgctcagcagctatatgtagctaattgctgctatatttgatagcctagccctagctaatctataggaccaatctcagttgtggcttaagtctggactagtagcgtaggatttcaggagtataataatttctcagaaaagttgtatattttgacgaaaaatgctttgcccgtatgttgtcctcactatttttacaaattagagttaaatgataccaatccccattaaaaaaatgttgaggaattttcttagaaatactaacctgctttaactccagcaacttttgtgatgcagcagttctttttttttttttctcctagatatcaacaagtttctttggatggtccggattggagggagcacagatacaggcaaacatatcaaggagaatgactattatactccaactggggagttccgtgtggaccgtgaaggttctccagtgctgctcaactgcctcatgtacaagatgtgttactatcgctttggacaggtttacacagaagccagtgagtgactcataataatattaataacagtagtaataatagtgattactaatacacagtattttccatatgccaagcactagtaagtgctttgtgtctgttaactcatttaatcctcacagcaaccccaaaggcatatactgatattattgtcatattacctttatttttgttgtttgcatatttttttgagacagggtttttgctctgacacccaggctggagtgcagtggtacaatcatggctcactgcagccttgatttcctgggctgaaggagtcctcctgcttcagcctcttgagtagctgggactaaggtgcacaccacaatgcctggctgtttttaaaactttttgtagagatgaggtctcactatgttgtctgggctggtctggaactcctgagctcaagcaatcttcttgtcatggcctcctgaagtactgggattacagacctgagctactgcacctagctattgttatttttgttttgttttgttttgttttttgagatgaagtcttgttctgttacccaggctggagtgcagtggcacgatcttggctcactgcaacctccacctccccggttcaagcgattctcctgcctcagcctcccgagtagctagaattacaggtgtgctctaccatccccagctaatttttttttttttttgtatttttagtagagacattgtttcactatgttggccaggctggtctcgaactcctgacctcaagtaatccacccacctcggcctcccaaagtgctgggattacaggcatgagccaccgcacccagcctgttattttatatatgaggaaattgaggtacaaataggttatttaactgcctagtgtcacataactaatggcagagtcaggattcaaactgacaaagagtggctccaaattctgtgcttttgaccgttactttttattgtccttaagggtattacagtgaagacaggaacaaaagggaaagaaagtgacttttcgtatcttctgatgactacattgagagttatttgattaggttaagtctctccttctgacttcaatttcttgattctgtactagggagaatttctgacatgaatgcaggtctttgacttctggtaggcttttttctctgatccatgcaagggttgctagtgtattagaggctctraatgacaatcctcaggaatagagggccttggaagtcggctccctatgtctgtcttatcagagataagacattgactggcaagcatcatcttgcatagaacttaagctagggtaacacttgatttgcccttactacctcatgcccttttttgcaggctctactctcamcaaattgcaggctgaggaataatcatcaattagtagatggtttcctgaatccatatactgtctctctaggaaattagcactgtagaaagaagtgtgttctttttcatccctctctagagcgtcctccaggctttgaccgtgtccgaaatgctgagattgggaataaagactttgagcttgatgtcctggaggaagcatataccacagaacattggctggtcaggatatacaaggtaagcagatgctatacgtctcagaaagcaacttttatttttggagattggtttcaatgcttataaaatgggacatatatttctcaaatagggaaatttctcatgacacctgtgcttgaaaagtagcttgcaaactcactgaaaattttacttattttagattgttcttagagagtagatgatcccagtctgccatcattttggcggttgttgcagtgatacttttccagctggggcttgactaaaccagtttctgtgattatcaggctcacgggtggggagagtgcaggaaatagagaaaaagttcacatgtttatatttagctacattttcttctctctctgaagaacttaaggtatatagagtcatatagaaccacataggagtatatctctcatataagaaaagattgagaacccttgatctatgtggagggtagatcagtaatattggtcctcacagaggtattccaaaaggctaagcagagagaatctagtctctagtcagtgcttgtgtattcacagccctaaaccaggctgcagaacccaacataatcctgcccactctgggtgaatccattttagtagaaaatttmtccaaagttgatctgattgtaaatattaaactgacatctttatgttgcaggtaaaggacctggataatcgaggcttgtcaaggacataaatgtcacgtccagctytgatatgcttcgcactgagcacatcacatttaggacgttgaagatttttttttttttttttttttaatatgcagtttgtaagaacaaaactggatggcatcagaattgtctggaagttttgtcttgggcagtatgggctgggccaaatgaaatgatttttataattctaamcaggttaccaaatgaaatgtcatggctttactttggtcaattaaaggggggaatttttttwaaaaatgtgccttatttgttttgacttataactgatttgagggaggcaaaagctatgctaggctgccagaaggacataagcagaccttgtccattctcttagctccctaaattagccaaatagagacttctttctcaaatcaggraaactatcaaagaccaattcagatcctacatttacagacagttttgtcataaccctttgcattgcagcacctagtacaattccttggaaacagcgtggctcaataaatttttattgaatgaataaatgtgggaccagaagagtgctagaagagtgcctttctgggctactatgtctctgttctcaatgtcttttatccttagacgctctttgactttataaatcagcagttttgaagactcaagacaaacagtgaaattattggtttatcaatggagaggaagaaactcttccagcattacatatagagcttgatggtcagtaggtgtttttgaatcagcttaaatataatcatacatatcaatttgaaatggagcttttcagtactctcacttattcatgacacaggaatgaccctttactcaaaactcttgtggttgttcaaaggtgagcttctttttcccttagtcttagcctatgtgttgctrttgtatattgttaccaagttcaactacctaattttgaagctctttccaaataagatacaaattaaaaggggaagcattgccagtaacaggtccctagagagcagtgccagcctgcctgcaagaaaagaggagaaacttcttaaaaagttttaagcctgggcaacataaggagattgtttctatgaaaaataaaaattagccaggtatggtggtgtacacctgtagtcccagctactcgggaagatgagattggaggatcacttgggcctgggaggttgaggctacagtgaactgtgattgtgccactgtactcyagtctgggcgacagtgaaatcttgtctaaacaaaaacaatttaactgggaagcacagtggtccttgaggacatttaatatcaggacaaagagcctatgaatatatcactgatgtatataaaccctaaggcgttaataaaagctaactgtttagtgttatccatttaagggaacaggaggaattgcataacttttagattagtcatagtggtgctcctaagggatatgctgttgtatatttgtatagccagggcacttagccttccaaaccaatttatataccatgttcttcaactgtgggtgagatttagcctcaagatttgatttactatatgtaagtacattacttgatttctataaagaatctttagtggaagaggttattctgaattatttawcaatatgattaataccagttagaaattattaatgatcttcctttatactatacataggataacttttaacttgtcgctacagttgttgctctgaggatcttaattttgttactttctaggctacatgaagctatctttttaaaaagtgtactcttcattttcactgttattgtgtacttagcataaaaaactcaaatctaggccaggtgcagtggctcatgcctgtaatcccagcactttgggaggctgaagcatgcggatcacttgagcccaggagttcaagaccagcctgggcaacatggctaatgaacactaagcatagttttgatgtctttcatattaaagactttctcaaattcttgctagtctgctcctctttaagagtgggaccctaggcagggcgcagtggatcatgcctgtaatcccagcactttgggaggccgaggcaggcagatcacttgaggccaggagtttgagaccggcctggcaacgtgggaaaactctgtctctactaaaaatacaaaaattagctgggtgtggggtacacaccctgtaatctcagctactggggaggctgaggcatgagaattgcccaggaggyggaggttgcagtgagcagacatcatgccactgcactccaacctgggagacagagcaagactgtctcaaaaaaaaaaaaaaaaaaaaaaaagagtgggacccaaaaaagctgattgaaaggtctgtttgtagggggtgtagatggggattaataatgtgggtttcaatctactgtgatctggctgggctgttacattgggaaatccatgataytgatttttagatttttatcttttgcataggtaagattcccttgagaaggcttgcatattctcttactcaaggatgtaagccargcagtcagctttctgggagtagagtagggaaagaagttgtaacaggctcaaccttcagtggataaaacttaaacttaatccctccgttttcagtaaggtgcccaagcttttaactgtgcctaatggtctccagttcacatactgtgcatttaccctcttaaatctcgtaccagctttggggagggacagttccttggttacatagaaagggaagggatacggggatctatttgttttttatgtagcctttaaacctaccccttttagccccatttttacctccaccttcagttacctggtgtcaccagttcaacttgagctttttcagagttctgtgatgttaattctgctttccattgctagctttgggattcatcttcattacctttcatctaaaggctttctgctttccaaaatgtgtctcatactctgttcttatgggttcttttaaatattggtatcctttactattaaaatattttagtgggctttcagaagagaatagaggctatttctatgtattctgtctttaactggtattctgctggagtctgtatatctttttttttttttttttcaggctaaaaagactccatcagacacacaggaaatttgcaggtctycctcttcgtattctttgttttcagcacacagtgaggaaacaagagaaaatgggataaatgatayaaaaacttgcttttatttttataccaggccctgtggctcgcttctgtaatcccagtgacttgggatgctgaggtargaggatcacttgagctcaggagttccaggctgcagtgagctaagactgcccaattgcactccagcctgggtgacagagcaacacaccctgtctccaaaaacaacaaactgtaaaaagattacatgaagcctaatctgtgatgtcatgattcaaaactatacacataagcattttaagagttttttccttgatttttgttcctgactttgcttctttaaaagaaatgtgtgtttttgttgttggttgtttgtttttgagacggagtcttgctctgttgcccaggctggagtgcagtggcacaatctctgctcactgcagcctctgcctcctgggtagctgggattacaggcactcgccatcgtgcccggctaatttttgtatttttagtagagacgggggtttcaccatgttggccaggctggtcttgaactgctgacctcaggtgatccatacgcctcagcttcccaaagtgttgggattacacgtgtgagccaccaggccccggccttgagtaacattttatacttgtttcactttactattatcataatagccagttatgcttagtgtttgtatgtggcccagtcttaaggactaagaaaatatatatgtatatatataaaatatatacatataaaaaaatatgtttttttcctacggaatcatgctgttgcccaggctggagtgcagtagtgctcactaacctctaactcctggactcaaacgattgttctgcttaggcctcccaagtagctagggctacagggacacaccaccaagcccgactaattcctaaatttttttatttgtagagatggggtctccctatgttccccaggctggtcctgaactcctggcctcaagccattctcctgcctcgccttcccaaagtgctggaattacaggcaggagccactgcgcccggccagtgctggagaatgtaatggagatgatcctgcctatccctgagttccagtctagtttactgtcagagaatacttatttccatttttcctattttgttcttgagtctctttcctcagaatttacttttccacttaaatgaygtacgcagcttttaaatttgcgttgtaagatttattttggctctccccgcctgttctttgcacattaaaaatgaaaaagtttgtagaactaagctaagcagatggtcttcctgcaaaaagaccgggctgaagtaaagcattgttttggagctggttcacagaaaaaaggcaaaactggttatcctgacyycaagctccaacataaactgctcgctttctccgggaaacttgccccgccacayacacttgactgcgtggccagttctttcgaagcctctcgctcccaacacggagttcctcccatttcttcacagtcggctctcagcagctgctgctggtttctcggctccagcaccacgagtaccgcactctgaggtttacaaagcactctgcttcaccgactgtgatcctcacagtcctgtccggtggcctcacgcaggtggcggtgcagcctttcaggcccagagcggccaggagcgaagcccgcagccccgcctgkaagcgcagcgcggtcggtcgcgcgcccctgaggcttggaggcctgggcttcccccagcagcgctcgagcaccgcccagtcgagcctcacaccggatgccacttcatatttgggcccagagctcaattcgcgccgatgcggtccgccgtccttaaatctcttcagccaggatctctccccgactgcaaagcagccctgggcgggagcggcaacatctccacgtcacccttttggagccgccgacattcagaggggcaggacacgggaacgcgcgctgtcttgctttacggcgcgggtgcgcgagtttgcggcagcgtgacgccctcaagttttggcgggaaaagcgctgcatttggattcctgcagtggtgggcaaaggacagtccggtgaggaagggcggccggtagagtagggaaggtttctaaagaaggagttcggggtctagattagtgagggagggcatggtgggagaaagttagcattgactagcgcaggggattggagagactcctgcggaggggcggtttcggagggtggaggaatggtaccaggaggttcccgttgtgggggcgggggcaggagggactaacccgctgctagctaagaaccccaaggaagagtcccagcccttcctttcgcctctgggggcagtttggccccgccccggcctttgggacgggtggggctgtggatggggatgggaattggaattgagcaattgggaggaggcgctgccgcaggcgttttctgccccatwccgctccctatatcctcttcctctcttccccagacccccacctctccctcctccttccccagtcgttcgccggaaagcatttgtctcccacctcttcataacaacaattaatttcctctgrggcctgaggagggcagaatttcaaccttcggtgtgcttgggagtggcgattgtgatttacacgacaaaatggtcaggtttagaatagttgttcgtggttgaaagacttggataaatgtggatgagatagaaggggaaggcaagagctgttaattttcgtgggcaatcctggggagaggcggggctcagtggcttcactggtgatcttacactctacatcttttctggattcctgccttttacagccgaggtgctcggtggagtcatggcagtgccctttgtggaagactgggacttggtgcaaaccctgggagaaggtgcctatggagagtgagttcttttaagcttgccttcgttttctgagtgcatattcattgttttggagtctcacactctggtgatttagaaagtagatgtttgagatccaagggttttggcaactgaagttacacagccttttgctaggattaaaaattttttccttccctttaaaaaaaaaagttttctttgtagagagctggaagggacacgaagttattgtttccatgcccacaaatkgcttctcagggtttaagcattgcggttaatgagcaaatgagcagactctggagattgcctgcctggtttcagatccttgctctatcacatactggtcattgttttgtgatcttaggcaagcttcttaatgtcattgtgtacctctccttcactacctttagggtggcaataatcgcatctaccccatargagcttaggacagtcagttacacaagcacatatagtatgggattaatgctcttaaaagtatatgagtagaacatgtatatatgtgatgtggcttagaattayctcaatctattttatgaagcgtttattaaatgacttgtgtgacagcataatgacgtctttggagggttagctattgtatttcacattttagaaangagtagtgtgtgttgagaacatagcagaaaccacttccttggtttctcctttgtggaaaaagtaatagaggtaaaatcgttttggatgagtcatgtttaatctttggaagttttagaagaaatngarttctgtaatgttaaaactcttttcctttttagagttcaacttgctgtgaatagagtaactgaagaagcagtcgcagtgaagattgtagatatgaagcgtgccgtagactgtccagaaaatattaagaaagagatctgtatcaataaaatgctaaatcatgaaaatgtagtaaaattctatggtcacaggagagaaggcaatatccaatatttatttctggagtactgtagtggaggagagctttttgacagaataggtatggaagaaatttaagataattattttaaacaagtttttaaatttgttttttaaatcttgggcatgctatttggtcgttgtcctttcaaaattgctcatgcaactgtgaaattggaatacattatctttaaaaaatttttccacctggtgttaataacataaaagcatatatagagtcaatgaaagaaaacttctttcccaagttatataagtgattttgatttaagattggtgtcttacagaatttaagagtgacaaacaagttttatggtacatcataaatgcagtgtatcctaaatgcaatgtattgcctacacaattttttctttgtagacattctagttacatgaaatcattgtatacattttatacatttacagatctaaaatagcatgctgtttcctcttggtttacatgaaataattgagaattttctaggattgctttttgtatattaagtaaattctatgtttgctattaatacttaaatattcgatgtagaatcaaaggattgatatttcagaacactgagaagtacataaaatctggatctaaatttataatttaaatttataatttaaagctattgtattaaataagtttatcagttaaaaactgataaagaggtattaggatctccagtgtgactcaggagagagttgagggtaaaagaaatggagttaatgagagagatcaaaatataaaaagataactgataaaagaactttcataataaaactgtttcacgaaggacctcacaggcatttgtggttttgtactgtgagactatatgaagtttaaatctgagccaggtgtggtggtacatgcctgcaatcctagctacttaggaggcaggaggattgcttgagctcaagagttccaggttacagtaagttatgatctcacgccagggcactccagcctgggtgaaagaacaagaccgtatctctaaaaaaagttaaattataaaagaagtataatctgtaaaatatttagtgaaattggcttagatttgcccagacttcccctttggcattatatttcaggaatgagaaaaataattagcatagcatttagaagaaatggggggaatttcaaggttactaaataaatcagggttagtataagaggaagcagaggctttgaagtcatggcttgcattcttgatttggatattggttttctctttataatttttctgtgatgacgccttttgccacctaacacaggtaaatgtgagttaagccccatatgtgttagtggactcctgaatcttttgttggcatttgcttctgtttgcctaagcacatttgtaaatgtctaagcttcaaattargaagctatgtggttgctacctgattatatttagtcaataaacttactttcatatttgttttagagccagacataggcatgcctgaaccagatgctcagagattcttccatcaactcatggcaggggtggtaggtatagttgtctatttcccttttacttaaaattagagtgaatacattacattaccaaattctagtgtgtttctctctgcatccctcttaggtttatctgcatggtattggaataactcacagggatattaaaccagaaaatcttctgttggatgaaaggggtaagtttagcattttatcactacctaaaataaaataaaataattacctaaattattttaattacctaattattttaatatagccatacaaggcaaaatcaagtctttttgcattactggaatttcaagacaagatctgaaaaatcaaggaaattttggagacttcgtatatttggaaatcacaagtctcattttgcaatacaagtgcggatcaggtagagaaatctgacctaggkgcaagcctagctcactatatgtataagaataatttttttttttttgatacaggctcactgtgttgtccagtctggggtgcactgtattatcacagttcactgcagccttgacctcctaggctcaagcaatcctaccatctcagcttcccgagtagctaggaccaaccacaggcaggtgccaccatgcctggctaatttttgattttttgaagaggtggagtcttcctgtgttgctcaggctagtcttgaactcctggactcaagcagtttaccagccttagcctcccagagtgttgggattatagacgtgagccaccatgcctggccaagaatagtttaaaataatcctttaatggattaataaagggaagtycctgtggaataccctggaccttagtcttgtcctgttcactctttttttatgtatgacgtggataaaaatgtaagaaatttagttatattttctgaatgtcatcaaattgagaaggatggatagcgaaagctttaagcttacagggtcagaatcaaaaaagaaatgtcagctgtatgaggcagtagtttttgtctggtttaatgctttattcttagtattagaatagtgcttaacaaatggtcagctttttttttttttkgaaacagagtcttgctgtgttgcccaggctggagtgtagtgacatgatctcggctcactgtaacctctacctctctggttcaggtgattcttgtgccttaggcccctgagtagctgggattacaagcctgagtcaccacacctggctcatttttatatttttagtagagatggggttttgtcatattggccaggctggtctcgagctcctggcctcaagtgatctgcctcccttggcctcccagagtgctgggattataggtgtgagccgctgtacccagcctatacatgcttttttcttatgtgcatatggattttactttttacccctttaaactgagtttatatgacataaaaatctttatttttatttaaaactttaaaaattcaggtacacaaaaattcttatgtattataatgaaatgtaaatatatgtatatcaacccacctggtttaaaaatacaacattattcgtatataagaatgctcacagtggtgatgtttttaatatagcaggaaactaacccaaatgtctgtcaacaataaattatgaaatgcatggcttttcaagccatgtcacaagcagtgacacaagcatgtcacaagcagtgacatggatgaatttcaggtatataatgatgtagagcaaaaagagacagttgcaaaagaattcatatggtctgattctgtttatacaaagttcaaaaatatgtaaaacctagtatattgttcaagtatgtaaacatggagaaaaaaacatgcagaaaagcaagggtataataaaaccaaattcagaatggtctaagaaagtaggggagggaatgtatttaaggaagtatttaaagatttcaaaggaaatagagcattgtttttctaaagtgagtgggtgtttattacattgttattctttatatcttgtattaatatacaagatataattctttgtttctatttaatatttaggagtcttttaaaaaaagaaataaaatgttaccagtatttaatgtcctcctgtttatttcatcacaaatatattcttcctttgtttttctaagagctaaacacattcctacatttaaattttattatgtgcagttctctaacatagctgagtattatgttgcagacataacaaagtccaaggaatactatagttatccattagtattttaagtgattactactcataagtaatttgaaactcaatctcagtggtttgtccaatagtgtcatatttaactactgaaaagataatcaactgggtgcagtagctcatgcctgtaatcccagaggctgaggtgggacgattgagtgattytaggagtttgagaccagcctagacaacatagaccctgtytttatgaaaaattaaaaaaaaaaattagctagacatggtggtgcacacctggagtcccagctacttggaaggctgaagcaggaggattgatcacttcagcctaggaggtcaaggctgcagtaagctgtgatcacatcactacactytagtytgggcagcagagtgagacactttytcaaaaaaaaaaaaaaaaaaaaaaaaaagggtaatcacagtagctacctcctaagtcagatagaggtaaacatttcattggtttacatattgtgtgaatgtacttgatttttaaagaaatcagtcccctattttgagacatttaagttgtttctaacttataaaataggacagkgatggcttctatcaatttgtgtaaaaggccaatataaaaattgcgtcatgctataatattttttatgctataatattttttatgccattagccttttkgtcccacttacacactatttcatgttagtatgtatagatataccttgttgattgttttcaaaacctacctccacattttccattgtacaaatttggacatttatttacaaataatatkgctatgaatattcttatgtttatgaatttgtgggattatttctatggatatagaagtgggaattgctagttcaaagagtgaatgtttcacagtttagtatgttttgccaaattgccctctgataatagagggccttttctaactcttaagactgggttacattcctttgctctaagatcctatagtgctctatatttttataamcttcataacagttttctattgtcagtcttcactaatttatctattacctgcattggctggcatagtgtctgtcactaagttacagtagatattcactaaacataagttaagtcctgcytgcagtttttgtgtgttgaagatgggaagttagggtggaagttgggtcttctgatattttttttttgtacagagtttgtcctctttttctcagactctctactttgaagaaaaaaattactgtggtttgttgaattttggtgtgtcttcacatattttcttctgccaactgggtttgtttgctgctgaraaagttgtgcctaacatactactgatgtttccttcctgccctccaccctacctgatgaggggccttgctttactttcatctcaggtttagagtgctcttttccagaagggcagccccttctgactccagcctctttctttaatctggtccagactgttctgtgtgttgataatacttcttttaagttaatagaagaggtgaggcctttttctacttttagcatagatgatgatttattttatttttttaaatttctttttgtctattttgcttattttaagagaagttctacaaaccttaagtaacaccagtgattttttttcagtaaaacttaattcctgtaagtatatctatttgcaaaacatttttattcagtgtcatctttttttcttttggtttagataacctcaaaatctcagactttggcttggcaacagtatttcggtataataatcgtgagcgtttgttgaacaagatgtgtggtactttaccatatgttgctccagaacttctgaagagaagagaatttcatgcagaaccagttgatgtttggtcctgtggaatagtacttactgcaatgctcgctggaggtaagagctatttaatcatggtaaaactcctataaaaagtcagattagttatactgaaataaatgaaataaaccaaggaattcatgtttatataatagtttttgttttcttttttaagagacagggtctcactcttggccagactggagtacagtgagctgttatagctcactgcagcctcaaacttctaggctcaagcaatcctctggcctcactcttccaagtagctaggaccagtggtgcctgccacaagacatctggctaagttttaaaaattcattgtagagatgggatcttgctgtgttgtccaggctggtcttaaacacctggtctcaagcaagccttctgtcttggtctccaaactgttaggattaaagtaaagacatgagccatggtacccagcttttatagtagtattttaatagtgtcttgatcggtttggtaactgctgtaacaaagtatcatagactgcatagcttataaacagcaaatttatttctcacagttctggaggctgaaaatatgagattaggggtgccaacctggtcatgttttagtgagggccctcttcctgatttgcagatggctgtcttgctgtgctctctcatggtggacagccaagagagcagaagcaagctctattgtggtttttttttttttttttttagaccagagtcttgctctgtcacccacgctggagtacagtgatgtgatctcagctcactgcaacctctgcctcccaggttctagcaattctgtcccaggctcccaagtagctgggattacaggcatgcatcatcacacccggctaatttttgtattttgagtagagacagggtttcaccatgttggccagactggtctcaaactcctgacctcaagtgatcccccaacctcagcctcccaaagtgctgtttttkgggttttttgttaaatgaccagatgttgtgagatattgtgtctgttttttgtttttttgtggttttttttgagacagggtctcactctattgcccaggctggagtgcagtggcacaattcaaggctcactgcagccttgagctcccaggctcaagcgatcctcctgcctcagtctcctcagtatctgggtctacaggcgtgcaccaccacacctggctaatttgttgtgggttttttttcacagacggtctctccatgttacgtaggctggtcttaaactcctgggctcaagtaatctgcctacctaagcctcccaaagtgctgggattatataattagtgccctataaagatacaatattgtccgggcacacaagcccttattagacattaataagctcttaataagagcactaataccattttttgagtggtcccatcaccaggacctaattacgtctcaaaggccccacctccgaatgccattgcattatgagttaggatatcaacatgacttttgagggggatacaaatatttagcacattgcaaatagtaacttatttataatcccaaagattttttaagctaaggcatgcatagttattaaatatcacaacacttatctctcctgtgtatcatgtaaacatttgtgaaaacaagactagggcaagaaatgattcatctgttttttggtttttttttttttgaracaaagtcttgctctgtcgcccaggctgcagtgcagcagtgtgatcttggctcactgcagtcttgacctcttgggttcaagtgatcctctcactttagcctcctgaggagccaggactacagatgcacaccatcacgcccagctaattttatttattttttgtagagatggggtctcactatgttgcccaggctggtcttgaactcctgggctcaagcagtscttctgcctcagcctcccaaagtgctgtgattacaggcctgagctgccatgcctatcctgattcatctatctttgaagtgcctctaaagtttccmagttgggattcttagtgtgaaaaccatattgaattaattcaaaggaaacttttcatggatttatattattatttttccttgaaatctttataataagaacatttaaaaaaactgggacttgctttgtttttagaattgccatgggaccaacccagtgacagctgtcaggagtattctgactggaaagaaaaaaaaacatacctcaacccttggaaaaaaatcgattctgctcctctaggtaactgaattatcttgagtgaaagagtaccgatttcttggatatgaagtcttgtgctatttgaattttttcttacttttttttttgttttaaacttacaaataattcatgttcgttgtagataaaatagtaactataagtaaaaaattaaggaaaaaataactctttagtcccagaactctgcaatagatttttaaaaatatttkggggagtgtatattcagagcaacttgaatctgctcttagatggctttttacttaaagttttcatatgtgctatactttgttgcaaatacactcgtttgttgcttaattatagggatgcactctaacaaatgtttcattaggtggtttcatcattgtgtgaacatcatagagtatatttacataaatctagatagtatagcttactataaatctaggctatttggtataccctattgatctcaggctgcaaacctgtacagcatgttactatactgagcactgtaaggaattgtaacataatggtatttgtgtatctaagtatagaaaaagtatagtaaaaatacagtattataatctaatgggactgtctgttatacgtgtggtccattcctgactgaaacatcattaatgtggcccataagtatgtaaaatgaatatatgtatattatttatatgtgtttttatacaaaatgagatcacactaataatattttgtaactgtttttggttttagtgcgcagcgaacattcttccatgactataattgtaggtctacatcgttggtttaaaggctgtgataatattctgccatgtggatatgccttactttactcttttaatcactttgttggagatttttctaaattttcacagatacaaaagagatataagtatctgtgtaacttaatcatgacacatacccttaaattgttcattgaaatccccagaagcaaaattgcaggatcaaggatgtagtttttattattatggcttattttgtcaaattgcttcccgaaagttcgaaccatttcatcacagtctcatcaatttacattaaggaaaaaaactttaaataatagtttttcatttttattttaaatttaatactaatgaagttgtataccctttatgtatgtattagttttttgtctattttgctcatttttgtcaaggatattgtttttcttaccactttgaagcttttttttttccttgataacacattgacctttgcacttgttacaaatacttttcacaatttatcatttattttcattttgttttgctatattgacattcaaatctattatcttgtcctttgtggtccctgactataatttctttggaaaggtcttctacctctactatttaaaagttccctatgttttcatttagtgtttttatggcttcatttttccatttaaatctttggtccattaggaaataatcttcacataggaagatacgtgaattttttctcaaraaaattaagataccttaggatggttagttagattactgtctcttaaaaagttattggtaagtaaatgttcattataaaactgtgtgaataaggaggtcacgtgagaacatgacattgaagtaatgaaattcggtattgaaaatggataagaggggtttctgtatctttttgttaatctcgtcacatgaggagaaacatttccatctggctcttgttctcagttgcaaacaattgagaatcagatcagggaagactactccaagatacagcagcagagaaaaactgcatgaaattaaagcagtaatttagtagctttaattctttctcttccccaggaataatayttagacataagtaggctaacagaaaatgtgtttcytacctcaagccataggcttctctaacatgattctttcgtgaatgttgtcgtaatgtttgtttttagctctgctgcataaaatcttagttgagaatccatcagcaagaattaccattccagacatcaaaaaagatagatggtacaacaaacccctcaagaaaggtaatatccttaaactacaagtttgtttgtttttctgtggaaraaaaggtaattgcaaagttattatcacaagtcaacaacacatgatagctatgatctctgtcctcatggagattataatgtccagtagaaaaaaatacagaaataattttgtttattaataattataaaggggaaagtcagggtactatagctaagtgtttgaccaagtctaagggacagggaagacttttcttcctgaagaaattacattaaatctaagatttgaagattaaagggaagctaggcaggcaaagtaagtggcagatttgattctgaacaggggaagcagtatttgaaaaatcttagattttagaaagtctgatgcttttgagaaacttgaaagatcagtatggcacaagccgtgtctgttgtgttcatcattgtatcatcagtgctttagcacagtatatggtgcaccataggcactcattaaatatttgttgagtgagtgaacagggaagtgggagaggaagacaggtttgagatgaggccagagaggtcgctagtggccaatttgtggaagaagaccttgtaagccatgttaaggattttgggctttaacttaagaccactggggagacctctgagagattttaagcaagactatgacatagtcatatcttcggtttaaaaatatttctctgacttccttattttttttccattgttttttatgaatagggaaagattcagggtgctgtaggtttttctgctagttgtctagaagtgggaggctggtggcttggaataggttagggcaatggtattggagaaatgagatgattccaaagaaatttaagaactagtattgataggactgttaggctgtgaatggaaggagagaggacaatgactagagatgatgaatgaaaaacattcagagagttattaatgtttaactctgtcctcatggatagaaaagagttaatgtttaaacattcactcttctttaatacctctctgcatgtttcttcctccttgtcctaacttaaagtccaattctcccctgaggacactgcttcctctgaagcggtaggtgttttctttcccataccctcatgtcctttgatctggacatggtacaggtgtcctccttattcttcattgtcactttctcccatcttcctttatgtctctcccctctaacttttgaaccccaaattaaaatttctgccgtactatcacagtctgcaaaatgactcttgatgttattttcgtcatgattcttggtgatttaaatatttatttggatcatcctcctgatatcctgacttcactgtttcttgaccctctctcctatagtgatgttgtctttgaacacgctgcactgatcaccagtataattttttctgacttcctcccttaatattctaacttaaacagtcctttgtatctggacttgcaattaattaattctatctcttcagtctcttacctgctccctctctaggtccttgatttcatctttacctatcttaaatctttaggttagtcattataaatgactgctttgcgttcatcatcttcaatttccttgtccccttctctcttcatcatacttagtgggtaaaacccagtaagtagtttctgggtttaatctagtagttttctacgtactgcacacttgtacctgcacaacagattgcagcaggagaaaaatacccaaaaatgttcactttaaattcaggattactaatctcaagtgggcccttaatgcttcctggcatttggccttcgtttccccacatctttctctgtcctgttctcctaaatcacgtttttataatacttttctctttttttttttttttttttttgagacagggtctaggctggagtgcagtggcgccatctccactcacttcaacctctgcctctcaggttcaagcgattcgattctcgtgccttagccacccgagtagctgggattacaggtgtgaaccaccacacctggctaatttttatatttttagtagaggttttgccatgctggccaggctggtctcaaactcctagcctcaagtgatccccctgcctcagcctcccaaagtgctgggtttataggtgtgagctactgtgtctggtcccttaacttttattatcttctctccatcctcactctcagttgttcactttgcttcctgtgtcactgggaaatgaaagccacaagagaacttaggcaagctcccaccaccatctcctccatactaactgcctctatgctcatgtaytctctttcatcctgtattgctgtagataaattgctctggatgtaagccaggtctttcycttacccactcaatgactttgtctagcaatttttctccctctcctacattattaatttttccttctctrccggatctttctcatcagcatatctacatgctttttctccyattttaaaatcaaatcataatggtaataaaatttctcttaactccacttttccctaccattccatcttcttcacaattgaatattcctaaaattgcttctcatctctaacacctcaaaactagttttcaatttcatctattttgttgccaagagtcacagtgatttttggaacgtgttgccaagttcaatgtaatagtccactgtggtcaaccgaggtctgaaaagattaaatggaaagtaccagaagtaaacaattcatcaattcatgggttttggccgggcgcggtggctcacgcctgtaatcccagcactttgggaggccaaggcgggcggatcacgaggtcaggagatcgagaccatcctggctaacacggtgtcaccccgtctctactaaaaatacaaaaaattagccgggcgaggtggcggtcgcctgtagtcccagctactcgggaggctgaggcaagagaatggcgtgaaccccrggrggcggagcttgcagtgagccgagatcgcaccactgcactccagcctgggcaacagcgagactccgtctcaaaaaaaaaaaaaaagaaattcatgggttttatttatttatttaattcgagacgggatctcgctctgtcgcccagactggagtgcagtggcgtggtctccacttactgaaacctctacctcctgagcttaaatgatcctcccatctcagcttcccgagtagctgggactacaggtgtgagccactatgcccggctaatttttgtatttttggtagagatgaggtttcgccatgttgcctatgcttttctaccaaaaatacaaaaattagccaggtgtggtggttcacgcctgtaatcccagctgttctcaaactgctgggcttaagcaatccacccaccccggcctcccaaagtactgggattataggcatgagccacaatgccctgccataggttttaaattgtgtgctgttctgagtagcataataaaatcttgtgctgtcctacttcatctcacttgggatgtgaatcactcctttttccagtgtattcacgttccatgtgctacctgcttgtaactcccttagtagctgttttggttattagatcgaaagaacatatatagggtttggtaccatttgtactttcaggcatccacttgaacatatccctctgtggataaggggggtactactgtagtcagttctcagacctcttgttttatctcatcaatattttatacagttgatcatgccctcctcctttaaacactttcttcatttggcttccaggcgttacactcttctgattttcgtccttctcactggtcgctcttttcagtctcttgatggttttttttcatctgctcagcctcctactattggagttctccagggctgaatctatggatctcctttgttttcttctccacactcactccattagtgatattacttggtttcatggctctaaataaaactatatgttgatagtcacatttatatcaacctagacctttcctctgaattccaaacttacatgtcttaactgccttctgaaatttcacttgaatgttaagaggcatctcacacttgatgaattccaaactgagttactgatcttttcctttcaaacccattccttttcaaagtctttcccatgttggttaatggcaactgcattattcttattatgcagatcagaaactttggaatcatccttcatttttctcattctcttttacttcacatccagtacaccagctaattctgktaacctctatctttaaaaaaatcttagaatctgattaccttttttttttttacctctactgttaccctatcattccaaattaccatgatatctttccaaaatgttctgatttaaaagtgaattagaatatatcactattctacccaaatcctccaakgctttagttctcacgtgtagtgtaagctaaaatcagttcatgacctgtgagttcttacacaattttgttccttacattacctctccaacctcagttctgctttgctcccccttggtcatattgttgttcttcttattgttctccaagtgctctaggcacacttctacctcactgtttttgtagtgactgttcctatgtctgaaaatgctttttcccatgggacttatttgcatgtcttattctcttactttctttggatattgacttcagtgtcatctttccaataagcctttcctggccatgctatttaaaatggtatcctcttccctctaacacatttcttaaatttttaaaatttttactctcttgtggacatacgcaatccaacacgtttcttcattttattttccttcagtgtacttaccaccatttagcttactgatttttaactgtatttgtatttattttatgttattttgtctctcctcagtagaatgtaggatttaaaaggtcaagagttttttttctattttgctcactgctgaatacctgatacctagaataatgcctggcacagagtagacctaataaaatatctgaatgaatggattaataaataaaaagcaggtttaaaaaaaaacttgagcatgtttaaaaagaaacaaacttaagcatgtttaagtggtttgggtacggatcctgtagagaggaagaggctgacagtctaagagaaaggaaataaataacagaggatcaagatccctaaggaggtagaagggtatgggctccagagcacaagtagagagatgaacattygatgggagaatggaagggatgaaargatgtataataatacaaataacttagctttggtagggataagttgatgtagtttctgtctaatggctttattttttctctgaaatgggaggtggtagtataggtactggatggtagtcttgggaattacagaaaagtgtagttttgaaatgatccttgtggagaaaaggaaaggaaactagagaaacaaatattatctggcaatattgaggtttagctagggattgtaaccataaatttacagtggcgtcattttccatataatattcttctttataaagcttttccaaggaatcaaagaatgttggctatagcagattcataatgtttattgctattatcataaattattttttattttaaaaagttctagtcctttagccaggtctgttgtcttcatagaacattgttctgttacccataaaagatgccattaagactgtggcctgggccgggcgcagtggctcacgcctgtaatcccagcactttgggaggccgaggcgggtggatcacgaggtcaggagatcaacaccatcctggctaacatggtgaaaccccatctctcctaaaaatacaaaaaaaaaaaaaaaaaaaattagctgggcgtggtggcgggtgcctgtagtcccagctactcaggrggctgaggcaggagaatggcgtgaaccctggagacagagcttgtagtgagccaagatcgcgccactgcactccagcctgggtgacagagcgagactccgtctcaaaaaaagaaaaaaaaaaagattgtggtctgagcatactccacactttgaacatgtctacagatcatacttaggtattgtaaaatacctaatttgacaaatgagttttagtaattttataacttggccatattttttataaaatcatataggaagactttgttttatatcttacaaaaattttgtgttaaataaatagatttagacatagttttacttcttcaagttgccagttgggttaatttaaaaacatacttgcatagaagacttgaaagcatttgtatttgttttcttttttaggggcaaaaaggccccgagtcacttcaggtggtgtgtcagagtctcccagtggattttctaagcacattcaatccaatttggacttctctccagtaaacagtgcttctaggtaagactgataaagattgagtagtttttgattgtagtattccccatgaagaataatacatgtatgtgttttttcataataatcgacattaacataatactgtaagcatgagaacttgtgtgtgatataagaaaggcctgatagattttattttattaaatgtatgtttctttctgtcttaatgcctcagtgaagaaaatgtgaagtactccagttctcagccagaaccccgcacaggtctttcyttatgggataccagcccctcatacattgataaattggtacaagggatcagcttttcccagcccacatgtcctgatcatatgcttttgaatagtcagttacttggcaccccaggatcctcacaggtgagggaatttaattttttaaaagtaatggcagctctttattttttattgtcttaaagtccttttttaatgtgtaaatcttagatatataacttttaaatcacatgtatwcttttttggtcaaggaagaaagagaggagggaggccttcatgcaaaataattttaagtcagactaaatagctatgatattactgtctttagtcctaatggatttattcatttgtcttctgtttgacatgtagaacccctggcagcggttggtcaaaagaatgacacgattctttaccaaattggatgcagacaaatcttatcaatgcctgaaagagacttgtgagaagttgggctatcaatggaagaaaagttgtatgaatcaggtgtgtttcattgattttcattataccttttcctraagaagaatttaaatatttgagtaaaagctatcattagtatattttttaaatataggctgtggctcacacctgtaatcccagctttttgggaggctggggtgggcggatcacctgaggtcaggggttcgagaccagcctggccaacatggtaagaccctgtctctactaaaagcacaaaaattagccggcctggtggtgcatggctgtaatcccagcttctcgggaggctgaggcacgagaattgcttgaacctggaagacggaagttgcagtgagccgagatcctgccagtgcactcctgcgtggccaacagagtgagactgtctcaaagaaaaccaaacaaacataaaaatacaaagtaattagttaatttgaaaaagaaactatttaagtaaaatgttctttactttaagaaataatacttttttttattttgttttattttttaatttttaatttttagccactgtgcctggcctaagaaataatatttcttaaaagacctttttattgttattaaaaatagtagggagctggaatcattatctttgtaaaaactatgtatacttaaactgtagacaataacagttgactgcctactatgaaagacgaatacattagcaatcccacactttctcccatctcccttgattgcacccgtcaatttttattgtttatattattagagcatagttataacattggtattctaaactgtctttaaggcttttcaaaaaaaatgttaatgtcaatgaaagacaaatagggtagctgttttttactcaaggagactaaagaggcctgataactaagtgcaagtgcaatgcatgatctttcactagatcatgtatttgaaaaaaactataacggacattattggaacaattggggaaatttgaatatggactgtatattaattaggtaatgtttttgtatcagcgtcagatttyttgggtgtgataatactgtggtttgtaggagaatgcccttgttcaaaggagaacaagtgtcaaagcaaagttgaagtgaagtgatattttcattcagcttaaaatttaaaaaaataaagggcaaacaactacataaaggccaataaacacacacatatctggtagataaggccaatgaagagtatatggttatttattatactcttttttcagtttttctgtagattcgagttttcaaaattaaaaattgggggaactgttactgtgtagaaatctgaggtcagcctgatagtcttctcactcacataggtgattcactttctttcaggtagactcagagataaaatttgcataacataagaatcatcactttaaccattttaaaatgtaaaatgcagtgctttttagtatattcacaaggttgtgcaaccatcgcccctaattccagaacattgcatcaccacggggaaaaaaaaacaaaacacctctgtaccacctagaatcactctttattcctttcttgctccattcccagacaacctcgaatctactttctgtctttagggattgcctttttggacattttatataaatggaatcatataacatgtagtcctttgggtctgtctgctttcatttagcacgttttcaaggttcatagcatctatcagtactttattcctttttatggctgaataatattctgttgtgtgtatgtattacatttcgtttatccattcatccactcatggacatttgggttgtttstactttttcatcattatgaataatactgctgtgaacaatcttgtaccagtttttgtgtgaccatatgttttcaatttcttagatatatatggaggaatagaattgttggagcatatggtaactcttcatttaactttttgagaaactgtgaaatgatttttccaaagcacctgtaccattttacrttcccatcagtaatgtaagagggttccaatttctctacaaccttgccaacacttactgcctcccctttttgctatggccatcctagtgtgtatgaagtcttatctcattttgcttttgattttcatctctctaaagactaatgatcttgagcatattcttatatgcttattggccatttctttataacagtatccggatattttgtccatgctttaactggcttgtttttattgttgagttgttagagttcttttacattctggacactagaaccttgtcaggtacctgatttgcaaatattttatcccattctgtgggagaaaattcccccattcttttgttttcttgttagtgtcgtttgatgtactcaagttttagattttgatgaattccagtggatctataatttctcttttgttgcctatgcttttagtgtcaaatttaagaaactgttgcctgatgtaagattgtaaagatttatactttatgctttcttttaggagtcccagcctcctaagtagcggggactacagtcttaaagtttagctcttatatttaggtctttgtccattttgagttaatatttgtatatagtatgatgtagggtgcaaattcaaatgtttgtatgtgaatattcagattccagcaccatttgttgaagatatgttttactattagatggtcttggcacctttgttgaaaataaataggtcatagatgtatgggtttatttctggaatctcaattctttttttttccttttttttttcttcccctgtggactcaattcttttatttcatggatctatatgtctgtgctatgccgttaccacactatgttgattactgtagctttatagtgaattttgacattagaaaatatgagttgtccaagtttgttctttttttcaaggtattttggttatttgtggccccttgtttttctgtcttttaggattatcttatttctgcaagaaaaaaatttggaattttaaaagagattacattggggagtatttccattttagtatatattgagtattctttattcaaggtgcttgggaccaaaagttttgtggattttacatttgtttggattttggaatatttgcatatgcatattgagataacttacagatgggactcaagttgaaacatgaataattttatttatgcttcatatatacctgatacagatagcctgaaggtaattttatacaatgttttaaataattttgtgcatgaaacaaagtttgtacattgaactatcagaaagcaaacctgtcaggtatgaaattttcagtttgtcacatgatgtcagcacctgaaaagttttggagtttggaacattttggatttcagatttgagattaaggatgctaaacctctaatagtaactcttctaatccaataacatggggccttttttttcccatttttttagggtctttaatttctttcaagaatattttgtagttttcagtgttcaagtcttgcacttcctaggttaaatgtaatcctgtttattcttttttttttttatcctgatgctgatgtaaatggaattttttaaaattttattttcaaattgttcattgctatatgcaaatgaattttgtatattgatcttgtatcctgaaaatttgctgaattcattaactccagtagtttttttgacaaattctttaggttttttaatatattaagattacattatttggcagggcgtggtggctcacgcctgtaatcccagcactttgggaggccgwtgcgggtggatcatgaggtcaagcgtttgagacctgcctggcccacatagtgaaaccccgtctctactaaaaatacaaaaaattagctgggcgtggttgygggcaccggtaatcccagctactcgggaggctgaggccggagaatcacttgaacctgggaggcggaggttgcagtgagccgagatgacgccactgcactccagcctgggcgacagatcaagactccgtctcaaaaaaaaaaaaattacattgtttatcaatagagatacaggaaattgttttacttttttttttttttttaacccagatgccttttaattctttttgtttagttgtcctggctaggacttccaacattatgttgaacagaaatagagtctttgtcttgttcttgatcttagggttaagtttcgagtctttcagcattaagtatgatgttagctgtggggtttttgtttttatggtgaaagagtattggattttgtcaaatgttttctccgtctattgagataatcatgtggattttttttccctttattaatatagcttgacctcctgtgcccaagtgatcctctcatctcagcctcctaagtagctgggactacaggtgtacactatcatacccagctaactttttaaaaatgtttttgtagagatgcagtctctgtgtttaccaggctggccttgaccttctgggctcaagtgatcctcctgagtagtgggtactacaggtgtgcaccaccatgcccagctaaattgacagttttcatcagtctgtttattttgtctaatgttagtatatccacatcagctcaccagctatcttgtgtattttcctttttttagatggagtctcactatgttgcctaggctagactgtagtggctacttaaaggcacgatcatagtgcaatgcagcctcaaattcctgggctcaagtgaccctcctgccttggcctcccaagtaggtgggactgcaggcatgtaccaccatacccagctaccagctctcttttggttattgtttccatggtctattttttttttccttttccttttaacctatttgtgtctttgaatctaaagtgccttagccaggtgtcatggctgacacctgtaattccagcactttaggaggctgaggtgggtagatcacttgaggccaggagtttgagaccagcctggccaacatggtgaaaccccatctctactaaaaatattttaaaaattagttgggcgttgtggtgtgcacctgtaatgccagctattggggaggctttaggtgggaggatagtctgagccattggagatcaaggctgcagtgagtcgtgatctgattgcatgactgctctccagcctgggtgacagagcaagactgtctcaaaaaaaaaaaaaaatcgcttcttagccttttggctaagatcaagtgtagtatctattcctatcagtttaagtgccttaatttctctyccactttttggacaggtagttttgctggatatagaattcttattagcttttgtctttcagcactttgattatgccactactgccttctagcctttgtggtttctgatgagaaatcagctgttaatcttactgaggatctcttttatgtgagacgttgctgctctcttgctgcttttatgtttctctgttgaccacagtttgactatggtgtatcttggtgtggatttcttttttcattctgttcggagttcgttgagcttcttggatatgtaaattaatgtttttaatcacacttgggaagtttttggccacaatttcttcagatttttttttttatatctaactctcctctccctcttggactcattatgtttattgttggtatacttgatgtgccacagttcttagactctgttcatttttctttattcttctttctttatgtttctcagggacagtttkggttgctgtttttcctttataagggccatacttkgtttccttacatgctttgtaattttttgttgaaaactggacatattgtggcaatatgtggcaactctagaaagtcagattttcccctcttgccagtgtttgttaccgcttgatgtagttgtttgttttttttagtggtgtttktttttttttttttttgagacggagctttgctcttgttgcccaggctggagtgcagtggcgtgatcttggctcactgcagcctccacctcctggcttcaagtgagtctcctgcctcagccttccaagtatctgggactacaggcacctgccactgtgcctggctttttgtatttttattaragatggggtttcatcatgttggccaggctggtctcgaactcctgacctcaggtggctgggattacaggtgtgaggcaccatgcccggccctagtgatttttcttatataattttttaaagttggtattgtttgtcatgcatggctgtacaatttctgtcccattagttttagtggtcagctaatgattggacagagatttccttaaattctgtataccaaaaacaaaaaatctgcagagtgttctgtatttgtgttggggcacacctgcaatactcaaccaagaagtttacaacgttgcttcagccttcgctatctgcttgtgcaaaatgcaaagttagggcacatgtagagcttaggggccttctcagctctttcctaagcatatgtactgccctggtcatgggtgtgtctttttagattcccaggtatatgttggaccttttcagagtcctattccccaraaacatctcactccctaacctcttcttccaaacttcttgggtagtctgtttgcaccagttgctttcattgcttcaggcaacagagactaaagcattttcctgtaagtgttttcagcaaacgctactcaggagtagctttagcacaaggtgagttagagttacaaaggtgaaataaagacaagcctctttttttttttttttttttgagatggagtctcgcactgttgcccagtctggagtgcaatggtgtgatctcagcccactgcaacctctgcatcccgggttcaagcgattctcctgcctcagcctcccaagtagctgggattacaggcgcctgccaccacaccctactaatttttgtatttttagtacagacagggtttcaccatgttggtcaggctggtcttgaactcctgacctcaggtgatccacccacctcggcctccccaagtgttgggattacaggcatgagccactgtgcctggccaggacaagccttttgatcaggtcattttagagggtcagatcggcttaaratagtttgtaaatgaggtttattctgctcccacctggacctatgccttaaatatgaactgttattttcaaggctgctactgagtgaggagcaggggataaacagggtaagttaaaatgccagaaagctcactgttcttactgcgtttcacttgttttgaataagttgctgcaagcttttagctagtttacaatgttctgaaaaagttgattctgacaggctttggcaggtttttaaaattgcttttgtggagtaatggacttctggagttcttttctctgccattttcactgacatcactccttgattcactctctctcagttcttgaagtattttctttgtctttgaagtttaagagcttaattcagatgtgttgagttgaatatcttgtattaattttcccagaacatagtgggttatttcagtgctgcacagtcgtggtatrgttgtgtgttttcatagtttcttgaagtaagaattattacaaaaacttttgtaatttgggctgtgttttttgggcaaatctgctgatctcgctcgggcttaactcatccagctgtagtcatttgatgtctttactgtggctggtggtctaaaacatccttactcccatatttggagtcttggcactgtctgttagctgagtcttttctttctgcatcattcagctaggctgagcgtctttccatgccataggaacgttctaaaagactgaaagtggaagttgaaggcctctcaagacctttgccatcttctaattgccgctctagcttttcagccacaagtcaggcctttttctttctcacattttaataatcttgtttttcctcccattatgttttcatctttgattgtttcttctttcagtggtattttggtaaaagacagtaagttttgttgctatgagttcatatacactcaatccctaggagctgcacccctgttgatagattgggttggggacacacatacccactgggagaagagagactctggaatgagtgagattatcagcatacttaatattactcctgttatggaggtagccagcaaattttttttaattgatacaataattgtaatgtattcatggggtatgtagtgatgttttgattcatataatgtataatgatcagatcaggataattagcatattcataatttcaaacattgtgggaatgggaatgttcagtgatgggaatgttcagtatccttctagcaatttgaaactctattattgttaagtatagtcatcctacagtggtctagaacttactcctatctagctgtaattttgtattctttcatgaatctctatctttcccttccctctccccttcctggactctagtatcctctgttctgccttctacttctatgaaattaacagtttttttgtttccacatatgagtgagaacatgtgatgtttaattttctgttcctggcttatttcactttacataatgtcctccagttccacccatgttgctgcaaatgacaggatttcattcctttatatggctgagtagtatttcattgtgtatatatatcatattatcctcatctgtttgcttggctttttgttttgtttttttgagacagggtctcgctctgtcgcccatgctagagtgcagtggcgcaatcatagctcactgcagcttcaacctcctgggctcaagtgacccttctgcctcagccccctgagtagctgggcctgtaggcatgcaccaccatgcccgctaattttttgggaattttagtagagatgaggtatcgatatgttgcccagcctggtctgaagcgatccttctgctttggcctcccaaagtgctggattacaggcgtgagccacagtgcctggcctacactcatctgttgttggatacctaggttgattccatatcttggctattgtgaataatgctgtagggttgcaaatttctcttccatataatttcctttcctttggatcagtagtgggattgctggaacatataggtagttttatttgtagttttttgagaaacttctattctgttcttcatagkgggtttactagtttattatctactcacccatgtggcttaaccttatttttgttgccttaggttactatatcaacaactgataggagaaacaataaactcattttcaaagtgaatttgttagaaatggatgataaaatattggttgacttccggctttctaaggtatttttatgttttattgtattctttctatggaaatatttctatatgaatttttttaatggcattatgtttgtatatatgtggcatttgtaaataggttacttgcttttttcgtttaatattatgagcatgtgttttcgttatctatttttcccgaacattgtttttttcaaatgacattttccttattataaaagtttttgccaggcgtggtggctcatgcctgtaatcccagcactttgggagtccgagacgggtggatcwygaggtcaggagtttgagaccagcctggccaacatagtgaaaccccatctttactaaaaatacaaaaaattagccaggcrtggtggcgggtgcctgtaatcccagctacttgggaggctgaagcaggagaatcatttgaacctgggaggcgraggttgcagtgagccgagatgacgccactgcactccagtctgggtgacaatacaagagactctgtctcaaaaaaaagaaatttctgcttttgtgaaaaatgtagataagcaaaaaatgagaaaataaaaataattctaaattttcagtgatcacattaatatttcgaagcattttaatatttttcttaatttatgtcttttaataaaaattatgatttgwtacaaatatttcattataatttaatgaacctttaccagttataataattctgtgattgctattttatgcatagatttttttgttcatatttctgatgatttctttagaaatcattgattctaagatgatagtattacagcccttgatatataaaaccaaaataacatttttctctattttctgagagattgtatgtggctctaaagagggttggaggggtagctgctgtgttagagcatttgccgcagtactctttgtattagagatttgctgcaatactgtttttcagatgcttgctacagaattaaattaagatcgtagtataatgaaattcttctcataactaaatctattgattttggtcagtagtgttatgacaacaagacttcagtttagttgtatagtttattgttagtttccaaaccctcactgcctatggaatgtaatgacttaggtccagatataccaacacctgaaacagataggatgccatgtttatctgctctctgagctcagtgcagtaggaacagtgatgggcatgaaaccacatcagaattatttgtgtaacaattttctcttccaggatatttggtcttcataaacagaccgaaaagaaaatggtagctagayatacctaaagatgtttgtctcttgttaccactacaaagagattgattttaggacagaattttgtttttgtttttgttttgacataattttttaatactatttctaatatagggtgatggattggagttcaagagacacttcctgaagattaaagggaagctgattgatattgtgagcagccagaagrtttggcttcctgccacatgatcggaccatcggctctggggaatcctggtgaatatagtgctgctatgttgacattattcttcctagagaagattatcctgtcctgcaaactgcaaatagtagttcctgaagtgttcacttccctgtttatccaaacatcttccaatttattttgtttgttcggcatacaaataatacctatatcttaattgtaagcaaaactttggggaaaggatgaatagaattcatttgattatttcttcatgtgtgtttagtatctgaatttgaaactcatctggtggaaaccaagtttcaggggacatgagttttccagcttttatacacacgtatctcatttttatcaaaacattttgtttaattcaaaaagtacataytccatgttgatttaattctaagatgaaccaataaagacataattcttgtgacttttggacagtagatttatcagtctgtgaagcgaagccagcttcaaaacatatccccaagatttgtacttatattttcaaaagggcctggccagttatataaacctgtttttgaattataatgattaattaaaattgcaagtaggtgttttttccagtgtagttagtaaaatacttgtattttacagtgttgcataaactctagtgcttaactaactttactctaaaaattactgttgaacatcttaaatatttttctatattttctactttcatagccatattttaaccttttcaacttactggtgaccaagcttttaggtgataaagaataaaagagggaagggaagagtaaggaagctataagaaaaatagatctgattctttgttcctttacctgttagacttacaaaaagtttgtttttctaataaaatttgtatcaactttggggcatattaggttgaggccttggctcctgcctgtagtcccagctacttaggaggctgagagaggaggatcrcgtgaacctggaagtttgaggctgtagtgagctatgattgcaccagtgcactccagcttggatgacagagtaagaccctacctctaataaaaatttttaaaattgtaaaacattataaaattaatcagttattttaatctgaagccaagaacatgtagaatgttatgattagagtttatcacatattaatgtatactggcaaattgtgttactggagtatacccataggaggaataaattcaaacctgttttatttatttgaacctatttacggtatgcttaagaattgaatcagtataaattctcaaatatgggagaaattttgttcttgagaattatctgagtcattaatatttttcaaaaacagctctcactgacttgaacctcttctgtaagctctaaccttttacctgctttacatttccacttgaatgtctagtaggcatctcttgaccaaaaacagcttttgattcctgttctccaacctgttcctctcctagttttctccatctcagaaatgttacttcctctgcaaagtctttccctgacttatctaaaataataacctcctctgtttgctgtgggaatttgtatagaatggtgggaaaatttcaagtttcatatttggattagctctgacatttatttatctgaacactggtaattgcctcagtaaagacactgataataagtaccttttagagttattttaatctttaatgctttaatgtgtaggaagagtatagtgtcctgttttgcacagaaaggcattctgtaaataataagttgccttaattttcctgtaatgttcattatattgttgtgggaaggtatttactcctattattaaaaataaaaatgtgtaaaatttactacctgaagataacagttcaaattttgatggaaaaatcaacctatgcttgtgtgtgtgtgtgtgtgtgtgtgtgtgtgtgtaatgtgtacagtgtgtgtggttgttgagataagcataattatataaaaatacataaaatatgtacacttcaatgtgcagttgtaaagttaacattcacttaaccacaactcaattgtagaaagatcatttacagacccttaagaacttcctatatgcagtctcccaatcacaacccacttctttcccccagaaataatcacaaaatagactttggtgataatcttttccttcgtgtgttttagagtgttctcagctatttatgcaaataatatcatttagtttatgtatttttaattaatatggtttttattaacgaactttatatacattttgctgtatttttcatgtgttgattttttatagccatgcttttgtgcatattgaattcattaattttaatttttatataggatgtatttatgaacatcccactaactattctgctgctaattgatatttggattgtgtacagttcgatgctattataaaattcttctaaggacattcttgtacatgttcatttgttttgctaggtcctagagtctaaggtatatatccagaagaggaatagctggatattaggatagaataatgacaaactgttttctaaagtgattgtacagattagtgtttccataggagaaaagtgtacagttactggaaaaacagtttggaatgatctaaagcataagaatgttcatagcaacagaatgtatttctagtattccaaattttcacctacagttggtgtggtcagtataagttgttgtttttgtttttgttaatgtttttttttcctttgagacagggcctcactttgctgcccaggctggagagcagtggtacaaacatgactcactgcagccttagccttgcaggctcaagcaatcctcctgcctcagcctcccaagtaactgggaccacaggcacatgccaccacacctggctaacttttgtattttttgtagagacagggtctcaccatgttgcccagtctggtctagtctgttttaacaagttgttgctgtgtaatgatatatgtgtggtgttaatttgcttgttcctaagtttaaatgaggtagagcattttatgacatgcctgttctagtcttttgcttatttttctaattgccttttctttttcttaataatttcagttcttcatatgttcagcatactagtcctttgtcaatttacatgtattgaatatrtatactctcccattctgcggcttattgttccattcttcatgaacatttgtaattttaatgtcctatttagacctttcctctgtctattgttttatattttgtattaaaggagtcattcattactccaagatcatgaagattttcttgtatgtaatcatgtaatcttcttaaaagcttyatggcttttgctttttttttttttttttttttttttaagagtcttgttgtgtctccaaagctggagtgcagtggcacaatcacagctcactgcagcctcagcctccctggcccaagtgatccttccacctcagccttctgagctgggactatagccatgcaccaccatgcccagcaaattttttattttttgaagagaccagatttcactgtgttgccgaggctggtttcgaatgcctgggctcaagtgatcatcctgccttggcctcccagagtgctgggattacaggtgtgagccaccatgtctgcctggcctgttttttggctgatttaggtctataattcatctgaaattggcttttgtgtagaatgtgaggtagagattaggtttcatttttttccttcatatggctatccagtttagcactggttattgaaaagatcattattttttttcactagtcttcattgatatccaatcaagtactcaaatgttttaattattttttatactttgtattgaatcagatccaaataaagtttaaacataataatcgattgatgtcttttaagttgcttttagtctgtaagttccctctttattcccttttttttctcttgcagtttattggttgaagaatccagctggtttactctatgattttcttaagtctagatttgtgggtttgattgctatgatagtttcagatctttcttctattttctgcatatcctataaatacattcgagatactagtcctgtgtcaattatatgttgcatataggcattttataaatttcctaagtaccatttttcttcatgccacaaatttttatgtgtactatttttgttatccagctcaaatttttttctaatattgttatgacttttttctatatttttacattgtagttctcagatctttatatgatttattttttgatccataaattattttgaattatgtttctgaatttccaggcctttgggaattgtttttatttaaaaaatgtttttattgagatattcacatagcttaaaattcactttttaaagtgttgtactccctttaaagtgcacttctgtggtttttagtatgttcataaagttatgcaaccatcaccactctcaaattctaaaacaatttcatcctttcagaaagaacctccctgctcattagcagtcactccccactttttcttcctccagtctctggaaaatactaacctacattttgtctctgtggatttgcttattccagacatttcatataaatagaattggataatacatgtgtggcttctttcacttaatggtttcaagattctccatgttgtagcatgtatcaggactccttatggctgaataattttcgtgtgcgtgtgtgtgtgtattgtacattctgttcattatgtggacattttagttctttttacttcttggttattatgaataaggctgctgtgcacattcttttacagcttggtgtgtgtccacacattttcagttttcttgggtatgtacctagaagtagaattttttgatagtgatagtttttacaattgttgggtacaggcttctgtatatctccatgtaattaactgagttaatcatattcagatcttacatatctttactgcttatacagtgaattactagagaagcatgttaaaatttactatgatttggatttgtgtatttttacttgtggttctcatttttttctttttttaagagacagggtctcattatattgcctaggctacactcaagctcctaggctcaagcgatcttcctgcctcagtctcccaactagctgggactacaggtatatgccaccatgcctggctaggttctgttaattttgctttatacattttgggactatttccttaggttatatactgatacatacttgtcatatcttcttagtgaattaaaccatttatttatttagaagtaacttctttatagatataatacttttgccttaaatattctttatctgatattaatctagccccacttgctttcttttggctaatatttatatgattttcataaaggatttattaacaaaaaaaaaaarraaaaagtttgcatggcataacttttttgagacggagtttcactcttgttgcccaggctggagtgaaatggcgcgatcttggctcactgcaacctccgcctcctgggttcaagcgattctcctgcctcagcctcccgagtagctgggattacaggcatgcgccactacgcctggctaatttttgtatttttagtagagatggggtttctccatgttggtcaggctggtctcaaactcctgacctcaggtgatcagcccaccttgtcctccccaagtgctgggattacaagcgtgagccactgcgcctggcctggcataactttttatctttttacttttacttttctaaatcatataaaatgtccctcttttaattatcttaaaaatccmatctgacagtatttgtttttcaatggaccattgattccatttgctttcactgtaattactgatatatttggatttatttctrtcatcttactttggttccactggatttgcattcttttctaccattttttttttgccttaaaaaattttttttcttgcttagtattttatttttgagacarggtctcactctgtcacccaggctagagtgcagtggtaccatctcagctcactgccacctctgcctcctgggtgcaagtgattcttgtgcctcagcctccccagtagctgggattataggcgtgtgccatcatgtctggctaatttttgtatttttagtagagacagggtttcatcgtgttgtccaggctggtctcaaactcttggcctcaagttatctgcccgccttggcctcctaaagtactgacattacaggmgtgagccaccgcgcccaaccttgcttagtattttttaaaaatcactgtatttatcctcctctcctaatttggaatctatatgcttttttttttkgagggttactctagctattacaatatgcatacttgttatagtctgaagtcagtctcttgtcctctttctgacaatcaaagatctttacacttttataatttatatacaatkgtctatttkgataatatatatgtgtttctatgtgaatatatgtacatacatatctttgaagagatagtagattkgcatgtagttgtaagagttaatactgagacatcctgtgcacctttcactcagttttccccactggtatccaataaaataatataacgaggatattggcattgataaggtcaagataggacatttccatcagcaccagaattcctcatgatacccttttatagcaacattcactttcctcccacttctggcaactaytaatcttttctctgttcctgtaattttgtcattataagaatggtatcttagcctgtttaggcttctagaacaaaaacactgtaaactgtgtggcttataaacaacaaacatctatttctaacaattctggagtctgggaagtccgagttcaaggtgccagcagattcagtgtctggtgagggcctcttccccatagatgtcacctttttactgtgtccccacatagtggaaggggcaaagcagctctttagggcctcttttttaagggcactaattccattcaggaaggtcctgccccataacctaatcacttcccaaagtccccatttcccaatactatcacattgggaattgggtttcagtatattaatttgtctggaggggaatacgagcattcagactacagcrgttacataaataaaatcacatagtattgtaccttttggaactggcttttttcactcaacataattctctggagattcatccaggttgttagcctgtatcaagttcattcctttttattgctatgtggtatccacggtattgtttaaccattcacctgttgaaggacatctttgttatatctactcttttgctattgtgactaaagctgctataaatatctacaggcttttgtgtgaatatagtctttatttctctgggataaatgtactggagtggcactactcaattatatggtagtcatatgtttagttttcragaaaactgccactcatttccagaatggctgtaccattttatattctcaccaccaatatatgagtaatgcagtttcttcacatcctcatcaatgttgtcactattttttgttttagccattctgataggtatgtagtaatatctcattgtgagttgaatttgcatttccctagtgggtaatgatgttgaacatcttttcatgtactcatttgtcatctatgtatctttggtgaaatatctcttcatgtcttttgttcgtgttccmattagatttgtttacmttgagtttttaaagctacttatgtagtcgagatactagtcctttgtcaaatatgtcatttgtgaaaaaaaaaaaacaaatatgtctcccattctgttgcttatcttttcatcctgttaacagagtgctttatagggcagaagtttttaatttcaatgaaatccagtttaccaattttttcttatatggatcatgtttctgttgtctatcctagaataagcctagattctgaagattttttccagtgttttttcttaaattttgacagtttaagactgaagcatttcaaattaattttcgtataggtgtgaaccttaggttgaatttcatttttttgcctctgaatcttaagttgttccaccatttgttgaaaaggctatccttcctccactgaattgctttttaaaatttaatattagagagcagtttttatttttatttgtttatttttatgtatttttccttttaagttccttgtagattctggatattagaccttcgttgaattatgtggtttgcaaatattttcttcctttccatagattgtctctttactctgttgatagtttcttttgccatgcagaagctctttagtttaattagatatcatttgttaatttttgtttttgttgcagttgcttttgatgtcttcatcataaaatcttttccagggcctatgtcaaaatggtgtttcctgggttatcttccagggtttttatagttttagttttacatttaagtctttaatccatcttgactttatttttgtttgtggtacaggaaaggagtccagtttcagtcttctgcatatgggtagtcagttatcacagcatcatttattgagtcctttttccattgcttgtttgaatccactttccatttgagtgcttttccccttgcttgtttttgtcaacttggtcgaagatcagatggttgtaggtgtgcagcattacttctgtgctctctattctgttccacaagtctatgtgtctgcttttgtacttagtgctatgctgttttggttactgtagccttgcagtatagtttgaagtgaggtagtatgatgcctccaggataatagccattttaacaggagagatatctcaatgtggtatctcaatgtggtaatatgcatttccctgctgattagycatgttgaactattttttttttttttttttggagacagagtctcactctgtcgcccaggctagagtacaatggtgcgatctcagctcactgcaacctccacctcctgggttcaagcaattctcctacctcakyctcccaagtagctgggattacaggcacccgccactacgcctggctaattttttgtatttttagtagagacagggttttaccacgttgaccaggctggtctcgaactcctgacctcaagtgatccacccatctcagcctccccaagtactgggattacaggtgtgagccaccatgcctggccgaacattttttcatatacctattggccatttgtatgtcttttgagaaatgtctgttcagttcttttgcccattttaaaatcagatttcttttgttttatttgctattgagctgtctgagtttcatatgaattctggttattaatcccttgtcagatggatactttgcaaatattttctcccattctgtaggttgtctcttcattccgatttttttttgctgtgcagaaatgttttaacttgatgtaatactatgtctgtttttgcttttgtttcctgtacttgtgatgtcttccacagaaaaacctttgcccagacccgtgtgtcctcttagtgttttccaaatgttttcttctagtagttttatagttgcaggtcctacatttagaactttaattcattttcagttgatttttgtgtgtgtgtatggtgaaagatacggctctagtttcattcttttgcctatggatatccagtttttctagaatcatttattgaagagactgtccccagtgtaggttcttggcatctttgttgaaaatgagttggctataaaaatgtagatttatttctgggttctctattctgtttcattggtctacgtgtgtatctgtattccagtatcggtctgttttggktactatagctttgtagtataatttgaagtcaggtggtaygatgtctccagctttgttttttttttttttttggtttctgtccttgattctattgatgttgatatgtcatgtttattgatttgcatatgttgaactacccttacatccctaggatgaattctacctgatcatggggaagatctttttaatgtgttttttggattctgttttgtagtattttgttgacggtttttgcatctatatttatcagggatattggtctggaattttctttttatgttacatctttgcctgattttggtattatggtaatgctggcctggtaaaatcagtttgataggattccctcctcttcacttttttgagtagtttgggtagaattgatattagttgttctttaaacgtttgatagaattcaacagtgaatcatcaggtcctgagcttttctttgatggaagactttttattactgctttgatcttgctactcattattgatatgttcaggttttctatttctttatggttcaatcttgataggttgtttgtatccaggaatttatccatgtcttctagcttttccaattttttggcatatagtgttcatgatagtctctaatgatcttttgtgtttctgtggtaccagttgtcatttttcctttttcatctctgattttatttatttgggtcttcattccccyttttttttttttttttttttttttgtagtctaggtaaagatttcttgaatcttgttgatcttttccaaaaaacaactttttgtttcatttatcttatgcacttttgtctaaatttatttatttctacattgatctttatttctttgcttctattaactttggatttgatttttttaaaaaaatttggttctttgttttagttccttgaggtgcatttttaggttgtttattttttttctgtttttttatgtaagcatttattgctacagatttcctttttagcactatttttgctggatcccatagattttgatgtatgtcatgtttccattttcatttgttttaagaaatttttaattttmcttctaattttttttttctttttacttattggtctttcagaagcacattgtttaattttcatgtwtttgtacaacttccaaagttcctcttattattgatttctagttttattccagtgtggttgggcaatatacttgatatgattttgacttttttgaatttcttgagacttgttttgtggcctctcatatggtctgacttgaaaagtgttccatatgtgatgacaagaacatgtattctgcagtagttggatgaaatgttctataaatgtctgttagatctgttkggtctaaagtatagtttacctctgatgtttctttgatgatctggatgatccgttcactgccaaagtgggttgttgaagacccctaatattactgtattgcagtcggtctcttcctttagatctagtaatatttgctttatatatttaggtgctatggtgctgggtacatgtatatttactatttttatttctctcgctatattgacttctttaacaatctataaggatgttctttatttccttttacagtttttgcttaaagtctatttgatataaatacaggtaatcctggtcttttttgctttctgtttacttggcatatatttttccaacccttcactttcagtttatatgtatcttcgtaaagtgagtttcttgtgggcaggatatagttgaatcttgattttttttttcaatccattcagacaacttttgttgttgttgttgttgttttgtgtttttcggtgtttttttttttaaagaaaaatttacctttgttatagattaaagggtacacatgccggtttattacatgggataatttcacgatgctgaggcttggggtcccagtgatcctgttaccaaggcagtaagcatagtacccaacagatggttcttcagtccattcccccatctctctctctccctgctattgatccccactgtctattgttctcatctttacattcatgtatactccatgtttagcttccacttataaatgagaacatgttgtatttggttttctcttctcgcattaggtcacttagtataaaggcctcctgctctatccatgttgctgcaaaggtcattatttcattmtttttcatggctgcatattattccttgtaaatgattcctctctattgtaaatgagattgtgctcttgaattggttctcagctggaacactattggtttataaaaatgctagtgattgtcgtacattgattttgtcaattccaggagccttgtgtcagattctttagggtttttcatgtatggactcatatcatcagtaaagagagagagtttgacttttcctatttgaatctctttcatttctttttcttgcctcattgctctggctaggacttccagtactaagttttttgtttttgagacagagtcttgctctgtcacccaggctggagggcagtggcacgatctcagttcactgcaacctctgcctcctgggttcaagcaattcttgtgtctcagcctcccaagtagctggaattacaggtgcatgccaccacgcccrgctaatttttgtatttttggtagagatggggtttcaccatgttggccaggctggtctcgatctcctgacctcaaatgatccacccacatcagcctcccaaaaagtgctgggattacaggcatgagccaccacacctggctgatttttaaaagagtttccagtaagttttagttactatgttcattgtaaggattagtctaaataatgtatcccatcattaagtctcagttgctagtatttttcctctaattaattcagtatgtatttccttagaataaagaccttctcacagacaacctggtttagttaacagaaatgagggtatttaacattgatataacactattgtctagttcaaggtccgcattcaaattttatcagtcctaacaatgtcttttgtaaaaaaaagtttttccccttgcctgtgttcaaacccagatcatgcatggttttcatgtccccttagtctcctttcatttggaatagttcctcgatgtttatatttcttgaccttgatactttagaaaaatacagaccagctattttgtataatttccctaaattttgttttatctcatgttctcacattattgggttcaagttatgcattttcacaagaccactgtagtgatgatgtatactcaattgttgatatttggatttttgccattttttttgtttaacatttttatttgacccacctaattgttgggggttttttaaaatttcattttaatttctcatttttaattaattatttatttatttttgagacaagatctgttgtctcaaaaacagaccttgtctgttgtccagggtatagtgcagtagcacaatcatagctcactgcagcctcaaatccctgggctcaaggaattctcctgcctyagtctctgggtaactgggactataggcgcatgtcaccatgaccagatacttttttaaaaaatagtttttagagagggggtcttgctgtgttgcccaggctggtcttgaacttcagggcttaagcaatcctcccatgtcagcctcctaaagttctgagattacaggtataagccaccgtccccagccttcattttatttattagctttttaactgtacctttctgtattttttaaattcttttttccaaggattatcatatcttatcacagtttaaagttaatattgtactacttcacttaaaaataagaacctttcaaaagtataggtccacttatctcctcatcctttgtgctattattgtcatatatatctacttacattaaaaaaaagtctgtgcaggcatggcttttaaaattcagaaaaatagtatgtatgtcttaaatttacccacatctttactatatctggaactgttcatttctccctgtaggtcagggtttccacgtggtattgtttctctttagcctgaagttcttttagcttgtgtgcatctactggttgtgaattctcttagctttggtttatatggaaatgtgttaccttcgcttttgaagggttattatcttggagataacattctgctgacagtattttcccttcattacttcgaagtatctcctcttgttttctgctctccattgtttctgatgagaaatcagtcaacatttgtatcagtgttccactatatgtaatgtatcttttctttagaccagttttgaatttttctctttgaatttcagtaatttgcttattatgtgcctaggtatatttctttttcttttcttttttcctttttttttttttttttttgggatgaagtcctcgctctgtcgcccaggctggagtacagtggtgcgatctcgggctcactgcaacctccgcctcccgggtttaagtgattctcctgcctcagccttccaaatagctgggattacaggcgcccaccaccacgcctggctaatttttgtatttttttagtagagacgggatttcaccatgttggccaggctagtcttgaactgctgacctcgtgatccacccgcctcggcctcccaaagtgctgggattacaggcatgagccactgtgcccgaccatgcctaggcatatttctttgtatttatcctcccttgagtttattgagcttcctagattttataagtttatgtttttcacccaatttggcaaaatttagttattatttatttaaatgtctttttctgtctcatctctttcctattctcaactgcaatatcttacatattatttgttatgttccacagttcactgaagctttattttaattcttttcctgtgttcttccgatttgataattactattgatctgtcttcaaatttggtgactaaacatggtctccaatatgctattaaaccatgtagggatttttctcaattattgcacttcttagtacagtaaatacaataatttccattggttcatttttatagtttcagtatctgtgtaagattcattgtctgtttattcgtatggcactattttcctttacattcttgaatgtatctttaatagctgtttattgcctttgttcactttgttccagtatctgtgattcatatgggggtcaaggtctatagactgcttttttttcttggctatgggtcacaattccctgctttttctatgtgtaataattttttattacatagtagacatagtaaatgaggaattgtagagattctgtactcttctgttcctctgaagagtattgacttttgttctattaggtctgtctccttcaatgtggacagaagctaaaatcactgccctattttttcagctttcagatgttattgtttttgagcctcctggagtcagtgaccagacaataatttggtcagaggttatcctcaaatttaggggcttctctgtggctgtcttattttcaggagtaccccctaattttgcagctgctctgctagtcccaacctatgttctctgaaacttcaaaccagtgagcctgtggctttttgccagcctgtgatgcatggattgagaagtaccctccagcataagctcacaaatctctctttttagtggtgacttctcttcagttcctttggaggagctttcaaatcttttttttatgttttgtccagaacatataattgttacctgtgagagggttacttcaaattattccactataaatggaagccagaattttcctacccttaaattttttttttaagatgagtctcactatgttgcccaggctgtctttgaactcctgggctcaagtgattatcccacctcagcctcccaagtaggtaggcctattgacatgagccatcatacccagttaattttttaacttttkgtagagacggggtcttgctgtgttgcccaagckggtctcaaattattttcctgcctcagcttcccaaagcactgggattacaagtgtgagccatcatgcctggctccttaaattttaacaacatatttgaacttacatttttccctcaacacctatacctagtagactattatttatcttctcccttcaaaaaaaaaagttattagtgttgacaatgttggcaggctttcatttcccttctggccaagttgaraattcatttaggattttagttcctgctttggggattttatttttgtatactattttatctaggggtatgagtataagttcaaaataattttccttcagaagtttgaagatgttccattttcttccagcttaccattattgccagtgaagagcttgttagcaatatattttggggaaggggtcatgatgtgtatatatgttgaaattttaaattttatatacagtaaaattgacttcttgttgtactgttctaagagttcttagaaccattctggctactttcattgtggtggaaacagctcagatttagatcttgcagatttggttgtggaatctgcctatagctctctgtagctctgtaaccttggtaaatttggaacaacatggagtatgaataaagaaaacatctctgtgtcacatttccttatttgcaaaaaaggatgatgccatctttcctgtctaccactctgggatctttcctgaggatcagatgagaccgtgtatgtgaaaacatcttgaagaacataacacttatatgagggaccgtttagtatttccatttgccctcctatcctgtatagatgattcagtaacattgtgtgtgaaaaaaatgatttaagcattatgaactgctgcaatatatagcaaataaggaatcattatactrttatcattatgttagtagtggactactgaagactagaaactctcaagagccaaagaagagttgagtttttgtatgccataataaatggaagagtgtgtagggatggaaaagggggggtgtcagaagtacctgcacgtttacaccctgtaaaagattaatacctactttgcattcctctttgttgtctctgcccttggagactcctttactttcataaatatggaatgcttaaacaatgcacccagtttagtgtcggtgtggaaggaagctcatgttgaccctgcaactagattaatgggggaaaaaaaggtctgtcttgagcctgtgtgctttaaccatgtgaaatttattgaaaaaaaaatcaggaatattgagagaaagagttggagcagggaagacaggacagagaagaatggataaaagcatgaatagaagaagaaagataggatgtttgagcatcctaatgctcaggcagaggcagatgtggtcagttgttgactggggaaggaactaaatataaaatgagccaaatagagtgatggaggctttttactgcctgagtcaaaacaagcaagggcccaggcttctagatcttattgcagaaagattgatttcgacagcatataatttgcatcctcgttccatgggagaagaggttcatagatgggcacatgttctcacacccttgaaccatgaattggagttttccacctgaaaggagcagagacagactagtgagcagaaagcttcgtcctccaaccttagcctttatctgtgatgctcagtgtctccatgcaggatggtcaagacctccacttgtccattatcccwtctctttctcttctatttgcttcctctgggaacttgccccccatcagttgcccactcstttcttatattgtcagtccgtttctatggactccttttttggtttacaaggatgctcaggttaccccaaatttaaaatactttctcttaatcgtgctactcccctagcactatccttcctttccttacagccttcccagagtctgcctatcctcctcaccttggcccctcacagtttgaatcatgaccctactatgccgaaacctctctcaaaagtcatagagatctactcatcaaattctgcatccttttctcaggacttttttaacctctttgcttgcacatcatactgtggactacaccctttcttttcttttcttttttttttttgagacaatctcgctctgttgcccaggctggagtgcagtggtgcaacctcagctcaccgcagcctccacctcccaggttcaagcgattgtcctccctcagcctcctgagtagctgggattacaggcgcaccaccacacctggctaatttttgtaattttattagagacggggtttcaccatgttggtcaggctggtctcgatctcctgaccttgtgatccgcccacctcagcctcccaaagcgctgggattacaggcgtgagccactgcacctggcctgaaactacaccctttcttgatactctctgcttctgacaaggtcttccccactgctcatctactcctctggatccaattatttctgctctcccaagttgaactgtcacattaccaactaaccgatgatcacctccatgccaatatgctaagggcatctaaaacttactatgcccaaaatgaaactcattactttcctccccaaacctgcttgtttttgtgagtttcctttatatacttcctgtaccacaccttcaaaacctctgtcatctctgattcttccctttgctttttccatccaatttgttgtgaaggtctgtcagttctacttgcaatctagtttgtttctgtcactcggtttccatttatcaaacatttggccgggcacagtggctcatgcctgtaatcctagcactttgggaggccgaggcaggtggatcacttgaggccaggagttcaagaccagcctggccaaaatggtgaaacactgtccctgctaaaaatacagaaattagccaggcaggcgcttgtgatcccagctactcaggagggtgaggcaggagaatcgctggggggcagaggttgcagtgagctgagatcgcgccactgcactcagcctgggtgacagcaagactccatctcaaaaaaaaaattaacggacctagtaaggaactatgctagactctggagaatgcaaagattaataacatcatttgatgtcaagagctgagagagataaaaatagccaattattacatgcaatggaaaaaccatgttatatgctatgctggcaaataaatgattaattttggtattttgattaaggggggcatagtatcaaggaaattcttaggaaggaagtgagactgaactaagctatgaagaattgttagcatttcgattagaaaggaaagaggataatttcaggctgaagcataactggagaaaacatgaaaacatgaaactgttcaggaagtggtgacttgcgtagctggagtaagtgtagagtgtaaacagggatgcagaatgagtgaaaagacatgggagagatgttaataagtctttccatcagtcactcctattaccttttactgaaatattacaatagccctttaacaggttctcttgtgtccactgtaacttgcttctaaggtaatcttcctgaagaagcgctttgaccaacctggatgggctactggctctgccttttcctagtaacaggtctttaggcaagctcctactttgtgaggattaaatgataaagggtattttaaaatgcatatcatactgtctggaagcaataaataaaggagaactattaaattcaaactctttttaactgacactgaagctcttgtatcagctggctccagtcaacctttccaagtttatcttctatgtctctgctcaccatcctcaaaaaactctttgctctttttcctatttacatcctgcacttttctgacttttgctttcattccctgtctctggaatacccatcaaccattgctgtatgactaaatcagtatctctttaatcttgactgcacatcggaattgtctaggagcctttaaaaaaatactgatgcctggattctattcccagagatcctggtttaattgctttggtgcaacctgaacattaggattttttaaagttgctcaggtgattgtaatgtacaaacaagattgagaactcctggcccaaatcgtaaatgttccctcaaagcattttctgaataccaccttctccccatacttctctgcacctctaatctttcctttccctgaactctctgcactttatatgtgcctttcttaagacacaattttctcccttgtgatattgtttcttatttcttacattataacataatctctttgtacacagtttatatttgagtcatctttctgtagttcatggtatgtgtcattaatgttttccgagtgatggtggatgaatgtctgcatgtagaaataggaaaatgacatttctagtgaggaagaagaaaaactacaagaggagtcaggcagtgtggttcctgggatggaaataaccagtatcccttattttagggatgaggaactgagagtaagggtaaagaggtgtgggaatatactcagactggtctggtaacctgtgaacacagacttgtagacagttgtttattagtttatccattcaatatttactaaatgcctaccatatgcttgacattgtgctaggtcccaggaatatatagctatagcttacagtcaatgtcccaatggctcatggggcaatcaacacattgctttaatgggaagagacagctagtctctctgccttctcttaggcctaatgggaagggcatctatctcttcatcagtacctggtggtagaataaagaattctattctttattttctttctttctttattttttttagatggagtttcactcttgtctcccaggctggagtacaatggcatgatctcagcttactgcaacctccgtctcctgggttcaagcgattctcctgcctcagccttccaagtagctgggattacaggtgcccaccaccacacctggctaggttttgtatttttagtagagatggggttttttcatgttggccaggctgatctggaactcctgacctcaagtgatccacctgccttggcctcccaaagtgctgggattttaggtgtgagccacctcgcctggcaagggattctgttcttagtccttgaaaaaataaagttctgaatcttcaagttccttgattctttcctgggcccctgtcattccaactgccccctaccagaagtaagttgatgtgttctcaggcagaaattgcctcatgaagtccccatataccttcaaagatcttctttaacatgcactgctgggaattctgagtgatgcaggttccctctccacgaagacattttccttgatcattcatataagcacatgtgtagcaatttaatattgtgcctgaaaatttaagataagcctgatgacatttccttgtggaccagatgtgtagccttgattcacatctgggaggggtaatgggcaataggtagcatggatactacacatttatttcttagttctttttggggatctgggccctgtgtctgatagacctgtgccagaggaaattccttcattcttcttcatctctgaccctcattgctgatgaatcccaaatttctctctctaatatttttactccagtccatatctgcattgacttcctgggcatttatcattagatacccttctgtcatgtgacagcataggagcaaaatgtatgtgtgattttcatctcccttttgtactccccatcatactctcacccacaaggcacaaacacttggagtcatatttgaccgattaataagctatgttagaatgctctaacattgcaaaccctgtgaagagtgtgtccttctccattttcaaattgaccttattgaaggtcactaacagcactatctttgaaatacttccatgttgcctcttttactgtctctactgctaatcccccagtttgggaagcctaaagaagtggaaagattatgggctttgcacagtcctaagtttgaatccaaagtttgccactttctagccatgtgacattggacatattacatttgcctcacttctttcatctgaaaatttagaataatgatatttaaacaatagagtgaaatgtgaactatgtctggtaataacttgaggcatcaaactttgggtcttgttttctttcccagaacaaacccttttaattaagagccacagactagcagttgtcctaggaactcatttctggatctaaaagaaaatagctttacattccatgttcaaacaaaaagaaccaccagctgcacacatctctttacagaatttgtaaagttatagcattctaacatggtttaagaggcagggttagcataaagctaatgaaggttagtcttcagaactctgcactttcatgatccccttctagggaagtcggaagggctgtgtattcataatttcttatggagagtgaagttggaggggtactggcattttgtatttgttttatttttcttatagagggccctccatattgtttagctttcaggctcccacatgcctcttggtatgattgtgacgagaactagagagactttgagagagctgtttgtgaagtgttaacaattctttcttctgcactccttccctaaaattgggttttcttgatgtgttccccatttcccacctgaagtcaatgactggcacccatccaaacatggctcacctgtagatgtgcttgaaattggtgcacctgaagcctgttcccctgaagcgtgctcacctgaaggctgttcacccgaggcctgctcaccagaaggctgttcaccggagccatgttcacctgaaggctgttcatctgaaggctgttcacctgactcaagctcactcaaaggctgttctccggagaggtgttcacctgaaggctgttctcctgaaggctgctcacctacagtatgctcaccttcagcatgttcagtcgcagcgggctcacctgaagcatgctcactctcagcatgttctccagaagtgtgctcggccacagtgtgcttgcttgaaccatgctcactggaaccatgctcacttaaagtgttcaggcctgaagaagtctcatataaagcctcagcatcagaagggttttcaagtgaaaagaactcacctggaagttgctgaactgaagtttgatgatctatggagccagaaagctcattaggctgacttgatgttcctgggatggagaaggaacagaagagagttggtgaagctgacagaatgggataaagactatcttcctatggagttaggctaatgttatgagactcctaggtttcctatgggcctagattgggcacctgaagactgcagatgttgggaaaaatcaactaagtatcccaaaaggccatggaggacagaagtgtttagtgaaacaaacagaggccacctctgggattgaagggaagaatcttaagttccccaatattaagaactacttaggagaatccactcatccatgtacaaaaaacccctgaaggaaaatgaatgtgcctccctgacaaagtcagcatcaggaagtcaggataccatccctgatagaatcagaagttcgccaccaaccctcccattcctctatgggtgaaagacaagaagagtagagatagaagagggagagagaaagcaagtagttttcaatacctgagtatttgtaacctaaattaagggcggaagagttaacctttggacagggatgacaagtatgagcccacaaaaattatcagaagggattaagccgcctgtatttggtaatgtcaagtattttctcacactcaatccccaatccatgtgggttggggattcagagagcaaagttgctataagctattaaggtaaaaaaaaaaaagtctaggcatattatatatatatatatatatatatagacacacacacatatatgaattgtatccttgtgacataccatttacattcacttcatggagttgtcctgagtacttaataagataaattgtgaagtgcaccattgcctagtactcaattttatttttcttttcttcccaccttacactgggaattacaaaactcttacatggttatttttttctggccagtctcttctacctttaatccgtctctttctttttttttttttgtttcaaagatagagtctcgctctgttgcccaggctggagtacagtggcacaatcttggctcactgcaacctccgcctcccgggttcaagtgatyctcctgcctctgcctcccgagtagctgggattacaggtgcatgccaccatacctggctaatttttgtatttttagtagagacagggtctcgccatgttggccaggctggtcttgaactcctgacctcaagtgatccgcccgcctcagcctcccaaaatgctgggattacaggcatgagccactgtgtctggccaatccatctcatcattgactgtcagacaaatattccttaagtatattttaagtgaacagaagcacaaaacagataatttgattattactctttgattaaactgagccacctagaggaagacaagtagactacaacaaccaagttatttaattctagccaaaagctgagaggaattattggatctttgaggctgaggtagtctaaaaccccagagtactcaaaactctaagaatcttgcgatagatatattttcttggcacagtgcagtacttacaatcagtgactttctaaatgactagggtgagaatatgttgataaaggaaaggtaagatttagtaaagcttttaggaggtttttattttttaaacttattacataaatactatctacttgactggtttttcaataattaacacaagttttgataaagagatgtttctgatatagaaaggagacataaaaagcatgctaatttcttgatcttatagtttatgactcgtgtcaccatgtgactggcacatactatcacctggtggctgtgtatctacatttttgagtcaacttttgaaggtctaacaaagcaaaaagcaaaacctctgacagtcgacattatagaaaatacattgttttttcactaaaagctcagagctcatggcctctttctgctgtaggaggcaggagggaacacagcacaccatgaatgggggatcccaaaagaagagatgatacagaaaacctgattgatataacacagccatgaagaagaggcttatgaagtctctggcctatagctctgtcgtgttctgaggttgttttctgaacacattacatcttcccatctcccatctttccttggcacattaaccacacaaggatccctcacatttaattggtgggacaaaccttcattgggcttctacagaacccctaagcctactttttcatctcatgcagcatcaggtataaatgttgagtggctaaaataagtagaaaccagactgtgccaagccagtgggaccctctgactgtaaagctatgactagagaaatcaactggttcaggagctctccgagttggacttgtttagctgctcttgattctgactcagattggtttgggtgactgagagactggtcttccttcttcaaggcctgaaatgtcttaagggagaccccttttgtatttacctgaagcctagatcaaacactcacctctggcagatccaagcagataaagactcattagcaagagaaacctgttcatctggatttaggaaaagaggggaccccagtgtgggccacagcttcttcacagagctatgaagcaaactgcgagcaaaagcttccagtgctgaagcagagcttctgggaattctagaacctcagaagtaacccatgtttcttcacaatgggttgggctctgaggttcttgtgtagcctgttcaggcaagttggcccttagcaacccactgcttatttcactagtgaagaccaatgattattttctgtgtgcagggtagtgtgttggggctatctgccctatctttaaaaaaaaaaaaaaaagtattaccaaaaagcacatattttttgtaataaagtttaaaagatatctactgtcttttaaaagtgtttttgacaatgagatgtaattgttgattgttttctgtttggctttctaaatcagcctttcttggctctgatctgtaccctggaaggttgacctctgttgactttatcacctgaatgctggctggatttggcttcagattgggtttatacaggattggaggggagaagagagaaagagagagaggaagagggaagggaggaatggggagaaagagagcgagactggaatatttgttcttcctattcccttcctgccacagttgacactggctgagtctacatgacagagcttctgttgggtgtcctctcttccatggctccagctctcatccatgctatggtaatatgtttttctccccctgccctcttaggcctagggatgataatggtttcctgctgttactaaaatctggatgcccaaacttatctctttttttgtttgtttgtttccttaaccttgcccacttctgtaaatagtcttttcatacagacctttatcaacatggttttagcaggaaacaggtggcaaactcaaatgggtaactgaggagagtttacacagatatgggcagagtaaagagatcaagagacagtagaaagctgcgttttgagctgcaacttggtagcaagggggtggccaagctgagaagatggatgcagtgaggcatccacctgatataaaactagaacttatggaggattgagtggcaaagatctggtagcttccatttctcgctgcttctctgctcagctctcttgaacaactttgttttatataccactgaatgctaaatctagaatagatgtacttattgttacattttgaaaggaaggtgagggttaaagaaagagagagtggcggctctacatcaaatccaggctttctgtctagcataagacctacagaggtgggggactagcttaatgccagtgcccactgcttcgtacaggttggggtacttgtaggtatgagcaggacgggtctgggcagtatggcttgctgcctgggaagatgttcccataatgaggcattttggcccttgttcccgcagaatgtgatgctgatgttccttggactttttcccagcagagtgtgataaagtcagg

SEQ ID NO: 94773 - DNA, 140396 bp, Homo sapiens
  misc_feature (1)...(140396): n = A,T,C or G
acaattggccactaggtatatgaaaaagtgctcaacatcactaatcaccagggaaatgcaaatcaaaaccaaaatgagatagcatctcacacctgttagtgcggctattataaaaaaaaaaagataatgagtgttggcaaggatatagagaaatcagaactcttgtatactgttagtaggaatgtaaatcagtacagcattatggaaatcagtatggaggttcctcaaaaaattaaaaatagaactaccatatgatccatcaatcccacttctgggtatttatccaaaggagttgaaatcaggatcttggagagatatctgcactcctatgttcattacagcattattcacaataaccaagatatagaaacaacctaaatgtctatcaatagatgaatggaaagaaatatacatacacacacacacacacacacacacacacacacacacacaccagaatattattcagccttaaaaaagaagggaatcctgccatatgaaacaacgtggatggacctgaaagacattatgctaaataaaataagccagtcacagaaggacaaatactgcatgatcccactcacatgagctacctaaaatagtcaaactaatagaaacagaatagaatgatgttgcctggggctggggggaagggagaaatagcaagttgtttaatgggtataaagcttcagtaattcaagatgaataagttctagagatctaaacaacaaagtgcctatagttaataatattgtatcgtacactaaaaaatttaagagagtagatctcaagtgttcttaccaacccccacccagccccccgctcctggcacacaaacatgggagcagtggggagcttttggaggtaacggatatatttattactttgattgtagtgatggtttgacaggtgtatgcatatgttcaaactcatcaaatggtatatattaaatgtgtgcatctcattatatattaagtacacctcaataaagctattttaaaaataaaagtactaaagaaagttttctttaaataacttcaatcctctagtttatttccataatggtaccttacatgtagtggcatccacatgttgattaacctgactgattgatgtttgtttcatgaatagctgtactttatactaataagaagcccttggaatgagcacaggtcagtgatttggattttcttgtgtacttctgtctttgttaatataagaggcaaagtattcattctagctttgtaatctactttttctaagcaaagttgtctaataaagatttcatcagttttttatttgaactaaatctaaatccaggcctaagcctagttttttgttttgttttgttttgttttgtttcgtttttgagatagagtctcactctgtagcccaggctggagtgcagtggcgcgatctcggctcactgcaagctccgccccctgggttcacaccattctcccacctcagcctccccagtagctgggagacaaatggtacatatctttttttcaggttcacaggctgtctgcttcagcaaaataatatacagaattgtgagccatgaagtcttctttcctcacatttcagatcactttttcattacctctttgctaactcgtctcctcattccacatatttatttataatccactttattctaagtaggttatagaattaattcttaagtctctcactatcttacttaattctttctctgtgtacacctttttaccttttaaagtgttctgttaacattttttaaccaactcaatgctaaatatcatagactcacagcatcagctgggaatgctgcatctgaaagctcaagcaaaaaggaatttggtgactagagtgctttccctcactgatactaaaaccagagacggaaaagaaagatggggattgtatgaagctctctttcttctccttttccctcttatcttttattcttttttcctgcggatggtgtgtgtgtgtgtgtgtgtgtgtgtgtgtgtgtagggaaagagaaagaagaggagaaagagggagagaggaagagaaaaggaaagcaggagttggataatattaataattgctaaaatgtatacagctatcatttaattggaaacaaaaatacataagagacaggcagggttgaaataggacagggatgagtaggtcttttggattaaggaaagagttgaatcacagaatccaagattgcagtattctaaattagtccacatatatgtatttcttcagggtttcatttacagcctaccagtaacgctgagtagcacgcccactgcatttccacatgagtaaggctgatttttggcacagccccttctgtctcttccctctttctggcctcctgttctctaacttgtagacacccagcatgctcacactaactccagctttccaaaacctttcggtactctctgtcctccctttttcttctttccagccccaaatcaattcttattcccagactgtgcaagtaggtgtttggcctggttatctaatttaaatactcaaatgaatccatttccattcaacaggtatactttaaaggatgaggttgttcactgtagtgggtctccctgcgtattttctggttcttggttaagtggcttttcatcagattcccaaaggaacccacccccagaacaattaaaatacaatcatctggctgggcgcggtggctcacgcctgtaatctcaccactttgggaggccaaggcgggcagatcacaaggtcaggagatcgaaaccatcttggccaacatggtgaaaccccgtctgtagtaaaatacaaaaaattagccaggcgtggtgctacgtgcctgtaatcccagctacttgggaggctgaggcaggggaatcgcttgaacccaggaggcagaggttgcagtgagctgagatcatgccactgcactccagcctggcgacagagcaagactccacctcaaaaaaaaaaaaaaatacaatcatctaagtggcaaaatgcacatgggaactatttttgaactggtatacatatgtaggttcctagcctaattagaatacctctcactagttagaggaccactcatacaccactcccatcaattcagaaatctgatcagccttacagctttcccccatttctcccctcacttttgcaaacaacatacctcatggtagaataaggtattgcttggggagagtgaaaagcagaagcacagggagcagtggagggcccaaaagccatcttgcactaaaaaatatatatatataaattttaaaataaaataatacacaatatattaattttcattaaaaaattaaaactacagaaaagttgcaagaacagtacaacgatctaccacatacccttttacctaccttttacctattttatcaatttaaaactttgccacatttgccttatctatctgtgctaaactacttgacagtaagttgcatatatcaaaaggtttttttttgttgttttttgttagagtctcactctgtcacccaggctagagtgcagtggtatgatcttggctcactgcaacctccgcctcccaggttcaagcgattctcccacctcagcctccagagtagctaggattacaggcgcaccaccacccaggctggtcttgaactcctgacctcaagtgatatgcccacctcggcctgccaaagtgttgggattacaggtgtgagccaccacgcccggccaaaaattttatacctaattgtttagtgtgtatctcctaataacggatactctctcttataatcacagtacaattataaaattcaagaagtttaacactgaaacagtatcttatctaatatgtaatccatattcaaatttcagtagttgttctgaaatattcctttatagcatgttttttcaagaccacatgttgcctttagtgccatgcctttttaaatcccttaaatctagaatggttcctcagcctttctttgactttcatgacactgatgttttttaaggatacaggtcagttgttgagtagaatgtttcttagtttgcatctttctgatgtttctagatcataatatgcatttttgacaggaatactacttaagagatattgtaacctcagtgcctcacatctggaggcacatcatgtcattttatcacataattggtgacattaactttgatcatttggttagggtagtgtcggtcagatttctccactgtagaggtacccttgttaaccctatatcatgaataagaaatccaaagactgtgcaaatatcttgttccccagccaaattttattcaatgattttaacatctattgataattgtctgaatccattattactgtaatggctgccaaatgatttgctaattgtcatttcttctaacatatattagttggcattccaccgtcatttcacttctcccctctttatttttctgtttaaaagtaagtatgctctacgattcttttaaaaaattcaatgtgttagaatcaatttctatatttatttatttatttatttatttactgagacagagtctcgctctgtcgcccaggctggagtgcagtggcacgatctcggctcactgcaacctctgcttccctggttcaagcaattctccctgcctcagcctcccgagtagctgggattataggcgcccactaccacgcccggctaatttttgcatttttagtagagatggggtttcacacaggctagtcttgaactcctgacctcaggtgatccacccgcctcagcctcccaaagtgctgggattacaggcgtaagccactaagcccggcccattatttattcctgatactcaaactgtctcagatttggtaaggggggagcaccttcgagccatctgctttcttttgacatatcttccttgacatagccaagaaatctccttgctttaaggagcaggatctttcaagggcattttatactttccctgtctctgccctcgaatgagccatctcgccacggagtctggctcctttaggtggagaatggtatttagaaaccaagatataaaggcatatgatacatctcaaaatagtgaggtgtcactgtccctgtttccttgagtcacatttggaagcgtggtgtgatttataatcctacctcgactattgcctgtgtgacctaggcaattccctttattccttgaggtcttcttcgtcctttggggaaaaaaattggattagagaaatatttctaaacttttttagagtcaccaacgcgtttgggaatctgacagaagctacgggtccatctccccagagacatgctcacacaagcaaaaactggcctgtgttttagggggttccaaactctgaagctcacatgaggctccaaatctctggattaagtgatctccaagatctcttcagcgctgacattgacattctgtgagtctataagcgactgcactgctgtcagaatgactcctcggagacatcaaaacgtggagggttttattatatatagcaacgagaagagaaaaggacacaaagaaaggagcctgtgagcaacgcattgctcagccacagttctttgccggtgccaaatttaggacgcgctgtacttgtaggtgagaggttttggcgggaaggaccccgggtgggcggagaacgccggggcggggaaggagatcgcaggccgcatccaggtctctgcacccctccgcacggtccgccagggctcgctcttgcccttcgcctggaaggccgaggaacggagcgggccgagcagcgaccccgcccctggcagcggtgaggcggaggggcgaggggagggcgtctgagcccggaaggagcgcgccggccaggctcgcgcccctccccgtgcgccgtcccccactctccagcagccgacgtcggcggtgcttcggtcgccatggtgaccaatccaggctcgggcccgcccccgcccccctgccccggccccctgacgtcggcgcacgtcagcggcggcgcgcgcctggctgggccctggggagcgggagggaaggagcgaaggagcgaaggagcaagcggagcggccgtcgcccaagccaagccgcgctgccaaccctcccgcccgcccgcgctcctgtccgccgtgtctagcagcggggcccagcatggtcatggcggatggcccgaggcacttgcagcgcgggccggtccgggtggggttctacgacatcgagggcacgctgggcaagggcaacttcgctgtggtgaagctggggcggcaccggatcaccaagacggaggtgcggcccggggctcggcgggagcgtccgaggcgagggttcgggagaggagctgcttaccgagaggggcggccgcagtggtgggaccggggagacccgagaggccgcctcactggcggaggcgagcgggcctgggactgtgaggacccaggaggtgcagggggtcggtgagcagcgaagggatcgggcccgggcacccggacccgagtgtcgtccgactggaaacgcaaccagccggggctttgctttcccctacgccacccccggtggccacccggaatttcgcccagagccccccacccgggccgtgacctggtctgtggcctccgctccggagcccaagttccgcgtcttccctgctttcggctgggggtggggtgggaggggaagtctcggtgttcccaggctgcgccgtgagagacgtcgccggcccgaggaggggaccgcctgcgcttgggctccgcggatgggggatcgtgcggcccccgtgaccccggcgcccctcccctgcccgacgaggaagggccccatggctgggaatacccccacggccactgtccatctcctctccttccttttggcccagggtgtctctgatttggtgtctggctagcttgatctcttgcctggggcatttccatttaatgccccagacaatagaactggttaaaatggtcatctctgcatttgcacrgtgggtggattggtcttctacttgtctagggttgtcactgtaccaggtgtgcattctggctgtaatacgcattctttaaaccatatcagattctgcctctactcataaagccctcaactgcttcctgacggtgaatcctgcaccctcttcattgcacattctaatgcaccgcacatactctctcacaagtctctgttcttacctaacccgccccccttccttccactgcctcaagctgctctcctcagggtctctattttaagacgtgcaaattaaataccttagaagaacggtagaaacaaaaccattctttagaataaaacctagtggttttgacgtactctactctgccttattgtagttcctcctggagtttcatccttttcctgtttgtttgccctccagttttggtcctattctgctttttcccttgttagtacgaatgtactggagtttgagtgtagaataaagtaggacttcttttcagaatgacttatgtaaggcgaagggcacttgcaaacgtgagtgatttttggagttgcagttgtacttagaagttttgcttaatcccgtttccaaaaggaaggggtatatgtcattctgtcttctttactttttgccttcccctgctggtcctgaaccagtccaaatctgacttatcttttagaatcaggaccaaggtcagatattttcttctcacagatttaccagttagcaatttagattgtttgtaatgataatgataacttgactatagtgatattgttaaatcttaatctgatcccagcattttttaaaatgaagaaattggttccattcctctgaagagccatggcctatgccatgccatttccctttaagttacataaaagaaggcattttaaatgcatgttttatgagtccttgcttaatgactttctaaaaacaaacaaattgtgagttatagagaggttctacaaaacttttgaactgtagtatatcgtgtggttgaattccaaatccatcagttcttaatatttttttctcatcagctcttactgggattaatagcaagatttaattaagtcatctattatttatcaggtcaaatttagttaatacagtaagagctgcttaagtggagtgattgacactttgaggttgacaattcaaatggtgtccgttttaaactaatatatcttaaagagctagggggcactatggagtaataccgtggtttggctrtcagagtgagatcaatgcattcatttgtaattggaacaagcaccggtcagatcgtgaaagaggacttagatcctaaatcgtgtgtgtagtatatatgtgtaaaatgatttacgttaaaagctaaatgtttagtccgcagaacccatttccctgtgcttttctaaagaagctgttattaacatataaaaagaaatagtgtgaatttgagatgggtgagggtatctgtggtaatttggtgggtgtgattggagatattaaggtagagagggataagtgaaatgtcaaagcaatctttgaacagaaaagttctctggatctctaggttgtaaagttgctctgaatttttttttttttttttgagacggagcctcgctcttgttgcccaggctggctggagtgcagtggtgcgatctcggctcactgcaacctctgcctcctgggttcgagcgattctcctgcctcaccctcccaagtagctgggattacaggcgctcaccaccatgcccggctaatttgtgtgtttttagtagagacggggtttcacagtgttggccaggctggtttcgaactcctgacctcaagtgatccacacgccttggccccacaaagtgctgggattacaggcgtgagccaccgcgcctggcccaattgttwcttaaagtattccatgggagtaacaattccattgttaatgatgttttttacagcagttatttatccttattcgttcattcactggataaatgtttgtgtgtttttgataaatacaactaccttaaaaactataagatgtttaattaaaacttttgttttaaattcagttttcatggcagaacatactacagtagttatagtggaacaatgaatatggtataaaaataatatcagcaaaatatcacaattatacttattgacgataaaagtttctttatatactatgctttaacatcgatacaagtttgtgtgttttaaaacttagaggtcttttttcccaagtttgactctgaggcaaattttagggcttaatcatctatgtaatgagcaattaggacccttttatttttaactggttcttctctgtctcttgttctatatcactcacaaatgatgtatttctacagaacttgggagattcaagtctgtttcccttttaggaaaaaaatagtggacaaaagagatcttcgttttggtcgaatctatcaaacagtttaacattgtttatgaaatataattacatcatcatctgaagtggtattgtgttagatctcgatgtgaattttgcatccaaaggggaagacaggtggtggtagaatccagcttcctaatacgctttgcaaaggctttgtagtattagtttgtggtttatgaattagagatgctaattttataaaattagcataatgggaaaagaataatagcatgtcagctgttaaactttgaggcaatagtggttgcttgtttgctattcagtgagtgtccttgagtagtttattttatcaatactatacagtattaggaaataactttttccttctagttagtggtatagctagttttttgtctcttaagtaaaattctagaaaagccaattgtatccttaaatgtttttgtattctatttaagaaacagtttctttcttgttgctttcaggacaaaagaaagaaaaataaataaagaagtagtctcttattataatataaaaaataagagtatagtgaacaaaaaagtatacatataattcctccactaatgggaataacccattcttaacattatggcactagtctttttatttaaatgcattttttccatagatgaaagcacatggtacatatatataaattatgttcttttttctacttaatattataacctaggcgttttgtttattatatataactttataaaaacatttttgttagctgcatggtgttctaccttgtggatgaatatcgttttacctaacaattcccttattaatgartattatgyaattttcagtttttgtttatagtaaataatacgcagtgaatatttttgtgcctrtaactgagtgtgcattttacattttttttagggaggagaaatkgctggtaaagtcctaaaaggaaatttcctaagtaacaaggtattatttttacattaaagagtagtgtatttttattaccaaatctgtcgtgtttattattgagaaatttaaaagtataaataggaggccaggctagatggctgacacctgtaatcccagcacagtgggaggccaatgcagatgggttgcttgaggccaggagttggagaccagcctggtcaatatagcaagacccagtctcattaaaaagaaaaaaaaaaaaaaacttayaaataaatgaaaagaattccccataaaatcacaaccccaaagataaccataactagttattttcagaccttttctataatagataacttgagttttcctcaacaccatatacctctcatattgcttagctaaagagcatgtaaatgtatagtctgtggaatcataaagatatttcatagaggttctaaaaatgaccttattaaaatggcatgtgggtgtcaggctgcttacttacccttaagagaacttggaatgcaaaactgataacaaggacattttgaaaactgtatttgtttgctaaaaagctttccatgtgcattttggggattttatagttaggcctaattctttaccaccttaaaatgtaagatttttaaaaggttttcagaattgttaaggtattaaaattgcatttttatagcaaagtcagaaacaagagaaaggcatattacaccctgattatgatgtttcttgaagagaactcattttaaaaatacatttgaattttctattttgctttaaaattttaagactcctttcagtagtcttggtattaatcttgtactgtgaaatattccagatttcaagaagcaactgtactatgtgcaacagaaggacttgttaccaaataactcaatcgctaatatttgtatctagtcttatgtatgatctttaattttgtattgaaataaaattgtatttgtcatggaatatatatactttcatagaatttttctgtagtttttggcaccccagacaaatagtatttgtcaaagtattctgctaactattgttcaaaatgatctgctcttttttgggagtgggaacaaacatgcaaaataagagttgtgtaaatgtttatattctgtagaaattttaactttaacagagtttaatgtgttctgattttaaaccctctgggaaatactatctcagtaccagtcaattaagaaaacaattatttggaaataactgaaactggcctatcttcttggattcacatgatgacatttgatttatgacccactgctgatggcagattcatttccttggaggcaaatgggttccagaattcattaggatatcgttctttccgctttaatgtacctagtacctcttctaccttccacctccatcttttcgaaataaattatataaaactttctttattcagaacattggtgtagaatactttcccatccttcacagagaaatagcctatatatccattttgagatattagaagatcgaaagataaacttggaaattccatcagaaacttcattttaaaaaaatttttaaatactttaaacagattaagagatgaatattggatgaattaaactgagaaacaatactaaaatttattttaagttcttcttgaaagtaaacatagtattgatatggtttcccccagttatagaagtcaatgcatcttcattgtaaacattgttgaaaagcccaaagaagaagattaacatccttacttccactctccagacccagagataatgcctgttaatatttggttcatcttcttctagttattcacatatattttatatgtatgtaataaaattgatgtcatgtatgcatataatctgtgttttttacttaacatgttgttaacatttccgtaagtttgaaaactatgtaaagcatagttaaatagtatttgtgcatttgactatccatattttatttaatcaatttcctattactgaacatttagtctatttccatcttcctgtctctctttctaaaataatgtttcagagggcatccctctacatacatctttgtgcatgtatctaattatttcctcagtgtaattgcctagcaatggaattcttgggtcaaggagtatgtacattacctatcttacggtgtaggatgccaaattaccctccagaaaaggagtacccgttaattttcaccaggaagaactcatattttgcaggaatattattttctaaatctctgccaacttgatagcagaaaataatattcttcaytacttttaaattttttttctatttttatttttaattaacaaatacatgtttacattttgttacttcaatttgcatttctttaattactttgtacagttttatatgatgatgatttgcattccttttataaatttttttgtcctttgacccatttaattgcattgtcttttttgttgatttgtttaaatactttttaagataggggattatttttaatcacttctttaatmatcttaaaaattctcagtttaatttttgtgagtatataactatcggaccatttaccttttcccccaatctgtttttcctacccactattataaaagtcaaatcaattttttttttgggggggggacagggtctcactctgtcacccaggctggagtacagttgcgagattacasctcactgcagcctccacctcccaggctcaagtgatcttcccacttcagccttccaagtagctggaactacaggtgcacaccaccatgcctggctaatttttaaattttttgtaaagacaaggttttgccatgttgcccaagctgttcttgaactccttggctcaaacagccctcccaccttggcctcccaaagtgctgggattacaggcataagccaccatacccagccttcaaattaaatcctaatgagaatttattatttgaataattttaaaagccaaatttacattggaaaaaagtctcctttttatttattctgagagggtaactagagaattctctattttactactgacttttactgctttcagaaagtctttcattatagaccactcaatcacacttgcttttcaatcaaatgataggctagtaggttgtaattccaccaatgatttgttgtataagctgaaagttgtatttattttttaatttcaaaggtctaatgtatggtatgatagagctaatgttacttggtacttcagaaggacagtgtagaattagtatattagtaataggactggagtaaatattatctaagacaagaaacacatgttaatcccttgtaatttgttattagaagaatagctcttatttgtaacttctttataaaatctccaaaagctactttttttggctttaatctgtggatttatagaacccaaaagcaacttttgtatatgtggtttctttaaatgagattagtatttcttttatgagaagttaatttgtttttctaaaatcaaagagacaggataggccaggcatggtagctcacgcctgtaatcccagcactttggggggccgaggcgggtggattgcttgaggtgacgagtttgagaccagcctggccaacatggtgaaaccccatctctactaaaaatacagaaattagcctggcgtggtggtgcatgcctgtaatcccagctacttgggaggctgaggcaggagaatcactttgaaccctggaggcagaggttgcactgagctgagatcgcaccactgcactccagcagtgacagagcaagactctgtctaaaaaaaaaaaaaaaaagataacaaacagtttgaaaaatgaaaaaattccatttattcatcagtttaacactttttacatttctgctcttacatttaattctttgtcctgtataaaatttgtattttacatagttgttactttcatagtgttttttaaaatttcacattgttagaaacatttctgtatatatggtcttcttaatatttaaatcataaaataatatagccattttctaaagaattttgaaaatgagaaaatgaaaactaatatatctcagagaattagtatatgataaataactgtcattgttctgggttttttcttattagaaaaataatacatgttcactgaagaaaaattgcacagaaaagtacaaagcagttttttgtcatctttttctactcataccttatgctgagactgcactgatatctcagttttctaatactctattgattatatgtacacataaggctgggtgaggtggctcacaccagtaatcccatactttttggaggccaaggcaagaggattacttgagcctaggagtttgagaccagcctgggcaacatggtgaaacccactctcgaccaartgtgtgtgtgtgtgtgtgtgtgtgtgtgtgtgcacacctgtagtcccagcttcttgggaggctgaggtgggaggatcatttgagcctgggaggcagaggttgcagtgagctgagatcgcgccmctgcactccagcccaggcaacagagtgagaccctgtctcaaaaaaaaaaaaactacacataaatctttgtcctcatttcagattatttccttcaaataacttctcagaagagtccttaagctacatggaatggatgatttttaaggttcataataaagactactaaattgcttcccagaaaaattataatctattttatattcctactaactatctgaaacaaacatctcactgaactttagctgaccaggttatttattttttaatctttataaatataataagtgaaaatggtattttgtttttaattcatatttccctgagtattttgaagttgaatattcaatgttgctactttatgtgggatttagtttgatagtaatcattctagtttgtcctaatgttcttcagtttatacaggaaacctttattcagtcctttagtagaaggagtattcatttttctgtcatataaatttattgaaagtttttttaagataatgtatatataatgattagagagttgaatagatgaacaccaccaaaaaaggggatctttccattcgtggagttcctttcttgacctactttcttgttaccatgcagattttgtctcttatactatgttgagaactaaataagagaagggatatagagaggaagttcccagaaatctaagttcattctaatccttaaaaggaactattggaacacaacccttttgcaaattaaggactttcagtgcacctttggggaaatccccaaatacttttttttttgttggtaaaatgtgttcatcttcttcttacatacctattaaattgttgagggtaggaatcaaatctcattcatttttatatcccaggcataattcctggcacacaacagatgctgtgtaatgtattactacaagaccctttgaaatagtgaaaagattaaagttggagttagaaggcctagggtttttcttccttaattcattagagctttaagacctttgttgattatgtgacattatttgaacctcagtttcaactcatgagtgtactgcttgtttcatttacttcacagaattgggaaataaatgagataaaatatgctgaagtatctttaaaaatgctgtgcagttgtgaaagtcatcaccattgttagtattatacatatttctgggaagtacttgatagagagctccattgttaagaaattacttggatgagtttggcagactgctagctgatcattgaaaactctrctgtttcctcttctttctgggcctacagctggactgtttctatgccacccttgcatttaggtgtggtcatatgcggagttctaactaatggaatgaacagaagtaataggcaccacttccrgccctggcccataaaatcacccatgaagatccctcagagttcttttttccttctgtctagctggaatggagaccgccttcaggttaaccttggaagccacacattaaagatattaaagcctctttgaatttcaaaagtctgcattcatctagttctgctacgtgagcaagaaataaacttctgttgagtttgaatcataagttttggggtgtatttggtaaagcagttagagttcccatgttacaaggaacatgttaactcatgctctgctttttctttagagaagcataatcctctcctgtaatagccttagaaacaagggatagcaatgggatawatatatatatatatatttatgatcataggatcatagatggataaagtctgtgacccaagataaaattgaagggagaattatatcatttgagttattttgttaagaaatgttaaatgagatttataatttttattaaaatttaattagataacattttaaactttttartatatgtcatatatttttcactttttcattgttgaggccaacattccaaaagggtataaaaaaggagctttctctgggtaataccttgctttaattgatatttaatatctaaactctttcatcccattaaatatgacactcaagatatttacattataaaattgtctcatgataggaatcatgctgggtttttaaaaaccataatcccttytttccatcttcttctattagatggttgtgacccatctcattataaaagctttttcctgggggcagggggtgctgatatmtagactcactcctgaaattgtagggtaagacattttcttcaaaatatgcatgtccgtgaaacttgatgtgatcttcctaaggaatattgaggatattcaattatacacttatccttttatctggcagctgttacccaaagttacccaaaataatggataataatggattgtatcatactcttcattgaggggggtttctttaaatgtatttaggtttgaggtggtccaataatatttctaatagcgagtatataatattaatcgttctacttgcctagcagtcaaagttttactttctagaatattttcattacggtaataattaaaacaccaccaaacataatgaaaagagctatcacagaacctatgtactttactccctagaaaagaagcttttattcttaggcgataaatttaattttatacattatgtttagtaatcggatttcccctgggaagcttgcagagttctacaattaattcaaatcaggaaacaacctgtggacagcaagttagaaatagagaaaggtgagaagtaaaacttacagtagagctttaggacataacagcaaaggatagagcagccataaagaaagaagaaaaacmttacatttgacccttgaacaaggcagaggttaggggaactgacccccctcgggggtcagttgaaagtataactttttgactctccccccatttttttttttttttttgacagagtctcgctctgtcgcccagactggagcgcagtggcacgatcttggctcattgcaacctctgcctcccaggttcaagcgattctcctgcctcagtctcccaggtcaacctgggattacaggcacccaccaccatgcctagctaatttttatgtttttagtagagacagcgtttcaccatgttggccaggctggtctgaaactcctgacctcaaatgatcagcctgcctcggccttccaaagtgttgggattacaggmatgagccacagcgcccagcctgactcccccaaaatttaactaatagcctactgttcactggaagccttaccaataacagaaacagtccattaacacatattttgtatgttacatgcattatatactttattcttataataaagtaaactagggaaaagaaaatgttaagaaaataacaaggaaaatacatttattactcattaagtgaagtggatcataaaggtctccatcctcattatcttcacaytgagtgggctgaggaggaggagaaagaagagaagttggtcttgctgtcttagtggtggaagaaaatttgtgtatcagtgaacccacacagttaaatcccatgttgttcagggttaactgtaattgtatgaacaggagactgtgggaattatgtgaaatggcaagctgagtcctattttattggatagcttttggaagcattgagctgtcatagcatgtgcaattgctgatattaaaagttatcctcggctgggcacagtggctcacgcctgaaatcccagcactttgggaggtcgaggtgggcggatcacctgaagtgaggagttcaagaccagcctggccaacgtggtgaaaccccatctctaccaaaaatacaaaaattagccagacgtggtggcacacacctgtaatcccagctacttgggaagctgaggcaggagaatcacttgaacccaggaggcggaggttgcagtgagccaagatcgtgccactgcactgtagcctaggccacagagggagactctgtatcaataaataaataaataaaagttttcctgaggccaggcatggtggctcacacctgtaatcccagcactttgggaggctgaaaagggaggattgcttgaggccaggaattcaaggccagcctggtcaacataatgagaccccatytgcattwaaaaaaaaaaaaaragaagaaaagttaccytgaaacaataacataaggctaaattatgtttagaataccctttgatataacttgaagtacattttagagttttttcaaaacwgataattaaaktggggtgattcccaattatctgaaaaatttatttaaatcagaatgctttattttccaaccaaatatctactaattttaataaattagttctttttaattgcatgaaaaaaatgtgtgtaatcattgatttctgcctacctagtcattcaccttcatatgtaatcccttcaaattattaaccttggaattgtttgggctcctctctagttataacagaatgaagtcacagtttctgaaataaaattccttttacaaagttaaattttagtgcagttactaacattttagtttttgcacttcaatttttaaaagaaagtccmattgtattttctcatgtaatgagttttaatattttatattcagctttttgtctgtattctttgaaacttatcacttgcttttctaggaaaatagtatttcagtgcaacagaagctatcttccgaactgtcttctactttgctgatcatttgtttataggtacttcacagcaggataactagttgatatagctactaatttaatcaaataaagattttattttttcagtttgtacaggagaaaaaagacattaccattgtactgaaagagaaacatgttttcraattattcttcatagcacactaaagacactgccaaacaacatctactgccttacacatggtattagtttaagaaatatttgttgaatgaatgaacattgaatttaaactgctatcatcagtgtcaggaacctacaggtgaagtctcatgtcatttattgacaggattcttaactagaaaatgttaactattgtatactaattgtatttatttgtgttctgggatgcaggtggcaataaaaataatcgataagtctcagctggatgcagtgaaccttgagaaaatctaccgagaagtacaaataatgaaaatgttagaccaccctcacataatcaaactttatcaggtatgactcagcctaacactatstccattcattccacaagatagttctctatttcgtatcatgatttttcttcttatatttgtttttctaatcaatgaaagaaaataaatgtatgctatttgttactaagtacaccatttttctatattgtctttaaacttaaaaatcagaaatcttaagtcatctctcagactgcaagttgttttaaaagtttgcagtgtgggctcacacttgtaatcccaacagtttgggaggctgagcagggaagattacttgagtccagcctgggcaacatggtgaaaccccatctctaccaaaaaatatatatatacaaatattagcctggtgtggtggtgcacatctgtagtcccagctacttgggaggttgaggcaggaggattgcttgaggttgcagtgagctatatcataccactacactttagcctgggtgacaaagtgagacactgtctcttaaaaaaaaaaagaagtttacaatgtatgatacgctgctttttaactgcagagttttggtgctactgcctaataaggatgtggcagttttgctcatttaaaaaggatactgtatgttttatgaaaatacaaccactaaactagtatattattcagtgacatactttgtcatacataggactgtatttatttaattatttggcttattttagtagataaaataaatttgctttttttaaaaaatcaactttgttataataatttttgtaaaataaattgaactcattttaagtgtaagccatggggttttttgtcattgtttttcattgttttttrtagctttagggggtacaggtgcarttttgttacctggctatattgcatagtggtgaagtctgggcttttagtgcacccaccaaccagccatggtttttaaaaggagtgtttttctcaaatttttaacgagtaattcatgtttaagaaggataatatagtacaaaatattgaaaacaattatttcttaacatgtagaatttttctgttgaaaagctctttttaaactgaaatgttccattatcctggcccatgactttgatctccagagtgtgatgtgtatgcccatggtatgctggactccgcctgtaccggctcgttgagagctggttgttaaactttcagaagctttgcaagccaattaacatgatgttagtagctcaaaatctgcattggtaggaagatttacatcacagaaactggcttacaaatcaggacctttttattttttgtcagaaagctggtttactggcacaccagtatgtgcattcaaatagattagcacaaatgtgcttgggagtataagaagaaaatatcagaacctctagttatgtttattttttatatttgttttgttgtgtatattttataatgtacataatatttatacaatggcacatgtatgcaatgtgtgtttatatatacatgtcaccatatgtgccatgtgtgtttgtgtatgtgtgtgtgtgtatatatatatacacacacacacacacacatatatttggcaactttatttttaatggattcccataggaatcatgtttattgtattttattttttttagagagagggtctcactgttgttgcccagactggccttgaactcctgggctcaaaggatcctcccgcttcagctaggactacaagtgcatgacagtgtgtttggctctaaaccagtggtgcccaacttttttggcaccagggaccagtttcgtggaaggcaattattctacctcagcattagattctcataaggagtgtgaatcctagatccctcacatgtacagttcacaatagggttcctactcctatgagaatttaatgccactgctgatctgatgggaggtggagctcaggtggtaatgggagcaatggggagccgctgtaaatacagatgaagcttcactgtgtggcccgtttcctaacaggccacggactgcaccagtctgtgacccggcggttaggaacccctgctttaaacaacttttattgatagagattttcaatgtaaaaaatgtgaagaccattggcttatgatatgcctcctgagaatgagagactatgatgtgtcactcaaagcatttcctaaaaatactaaaactacagaggcctcttagatcaaatttatatcagattagcccagtgcagtgacatgtagtcccagctactggggaggctgaagcaggagggtctcttgagccaaggagttccaggctgtagtacaccttaattgcacctgtgaatagccactgtactttagcctggataacacagagatcccatctctaaaaataaataattaattaattaattcagattacttctccctttaaacttaaaaaaaattattaatttttttttaaaagaaaacgtcttgctctgtcacccagcgtggggtgcagtggcacaatcatagctcactgcagcttcaaactcatggactcaagtgatcttcctgcctcaacccctccccaagtagctgggactacaagcacatgccactatacctggctcattttttaatattttttgcagagacaggatctcactatgttgcccaggctgttctcaaacttctgggctcaagtgagcctcccacgttggcctctcaaagtgctgggattacaggaatgagccacccatgcctagccattgtttttttaattcctgaagaagatacttctaagaaactaattatattcttcaaagtctctgattaaccataaactagaccgaggataaaactaacataatttgcatattaattctatctatttgaggtaaataattggttacagttgatttactgatttgtttaggcccaaactgtaggtagcttttagttttctgacctcgtggagaatagtcttaaacctacatcttagaacaaaattaattttcttcctttcagtagatagcagttaagagtattacagakaaacactctaaaaattgttcatcttgaatctaaacactcattttctttttattctatttgtatttatttttatatatttattttttttgagacatagttttcatctgtcgcccagatacaagcagctctcccacctcagcctcccaagtagctgggatcacaggtgcacaccaccacacctggctaatttttgtattttttggtagagacggggttttgccatgttggccaggctggtgtcgaactcctgacctcaagtgatctgcccaccttgacctyccaaagagctgggattacaggtgtgagccaccacacccagcctcattttctttttaaatagacttctatttagtgtagtttgaaaaatcagatktatgacgatgacacacttcattccgaatctagaaaaatgcatttaaataaaagtattttacagtagagctatgaatatgaaacttttaaacaattagagtactttgtaacaatattaaagtatagtacaagkaatatcacattgtgccagattagctaggctaccaaccaggtaaactaaagtactctatttttttattcttttaatcggaatctaccatgataacataggactagaaacgtcagtgaggagatgttgaaaagtagatcttcaaaacttatattatctatactagtacttctcaaactttaatgtacataaaaatcacttggcagttttgttaaaatgtaaattccaattcagtatgtctgggatggggcctggaattctgcatttcttacaggtggttgaatagtgctactactgctggtccaaggaccacacttagaagagcaaggatctcaatttttcacaaacacattaatcagaaggatattgtcaggcttatgaacttagccatcttcggaattgttcataactgtgattcttttattagtagtttcaatttaggtaactcgatagaatattgtggaaaattccagtacatttctgtcagactaatatggaattatttatcaataggtaatggagaccaaaagtatgttgtaccttgtgacagaatatgccaaaaatggagaaatttttggtaagctttttcctttaaattttctattaatttgaaaaattcactaatctgcatgaatggggkattttctgttaattttctgcttatttaagtgttggtaatataagtgaaaaaaaattaagtgttagaaaatattcagtaacctaaaatatgaaatataacttatttccttgtatttattatattaaaggtactrcttctgtcatctctattagagactggagaatcaaacatatggaggaacttttagtcatattgcaaaggatattttctttctttttatcttcctttttacctttcttttctatggaaagattagtcagcaaatatttattaagcttctactatgtcccaggcattgtactaggtaatggggatactctagtgacctaaatagcacaatctctgttattgtggatcttacagtttagtaaagtattcactataggggtaagacctcaggcaaatcactaaacctctctgggacttgattcctttatctctagtaagaaagtatttgattggtgtttatgattcattcgaactttaaaaaaaatttaaatattttattctagctttcacctaaaatatctgtttatttttactgtgtggaaccagagcactgtaggtatctaaatcttttttgttcttaaagtccaaaattgttttttaagcagctttattgaagaataattcatatgtagtaaattacacgtatttaatgcgtacaatttaatgttttgatacacgtttgtgaaacaktcaccacagtcaaaatatccatcacttccagaagtttctttgtgccctctttgtaactcttttgccccatctgacacccaaaaaaccactgacctgttttttgtcattatggatcagtttgtatcttttggagttttatataaatggaattatacaggatatactcaaatgtaatcatacaggatatattctttttttggtctagcttctttcctttactataattattttgggattcatcccattttattgtatatatcaacatataatttctttttattgcaagtagtattatattatatgaatataccccagtttgcttattcattcatctatctattgatagacatttgggttggtttcagtttttggctattatacataagttactatgtacattcgtatacaagtctacacagtctaccttcaggtaatacttaccacttcgcatataatataagaaccttggctgggcacagtggctcacacctgtaatcccagcacttttaggaggtcaaggtgggtggatcacctgaggtcaggagttcaagaccagcctggccaacatggtgaaacccctccctactaaaaatacaaaaattagctaggtgtggtagtgcatgcctgtaatcccagctactaggcaggctgaggcaggagagtcacttgaactcrgaggcggaggctgcagtgagccacgaccgcaccactgtactttagcctgggcaacagagtgagatttcatctcaattaaaaaaaaaaaaccttacatcagtgtacttctcttttgcccctcctggcctttatgttcttgttgtcatattttacttaaacgtattttataaaacataatacagtgctatttttctttaaacaattatcttttaaagagatttccacattttttgaaaattatctatcagtgtagctacctttttctttaaacaattatcttttcaagagatttccatattttttgaaaattgcatctatttatcaatgcagctaccatttctgcattcatatgtatgtatatatttttatctaatgtcatttttcttttgtctgaaggattttcttttctttttttttttttttttttttttttgaggcagagtcttgctctgtcgcccaggctggagtgcagtggcacgatctcagctcactgcaagctccgcctcccrggttcacgccattctcctgcctcagcctcccaaataactggtcctacaggcacccaccaccacacccggstaattttttgtattttagtagagacggggtttyaccgtgttagccaggatggtctcgatcacctgacgtcgtgatccgcccgcctcagcctcccaaagtgctgggattacaggcgtgagccaccgcacccggcgtctgaaggattttctttagtgtttcttgtagcacagatctgctggtgatgaaatatttcagcttttatatgtctaaagtagtctttatttttgtctttgtttttgaaagatatttgtactaggtatagaattctaaatggactttttttctttcagtactttaaatatgttgcttcactgtcttcccatttgcactgtttctgacaaaaaaaccactgttatctttttctttattcctgtgtatataatgtgccttttttctctggctgcttttaaggctttctatttaccactggtttcaacaatttcattatgatgagcctttgtgtggttttcttcatgattcttatgtttggtgttcattgagctttttggatctgtgactatactcttttcatcaaatttggatatttttcagccattattttctaactaatttttctcttccaccccctctcttctccttcagatattccagtcaaatgtatattaaactgtttgaaattgccccacagctcactgatgctcttttccatttttaaaaaattcctttttttctatttcatgttgagtagttgctatttctgtctttaaattcacgaatcttttcttctgccattaatcccatccagtgtatttgtcatctcagacattgtagtattcttttctataaacttgactaggactgttttttaatgccttccatgtctttactgatctttctgaacatctagaatccagttatgataatttttaatgtccatgtctgctgatttccagcatctctgtcagttctaggttggttttgattggttgatgtttctcctcagttttggttacattttcctatttcattacatgtctggtagtctttgattggatgctagacattgccaattttaccttgagcaccacatatttttgtgttactttaggttttcttgaactttgttctgggatgcagttaagcctacttggaaacagtttgatccatttgggtcttgccttcataattgaaacagtgctcagtctgggtctagttacttcccacttctgagtactctactcaatgccccatgaatgctgaggttttttggcctgacaagtaggaacaggcaccattcctggctttgtgtaagcaccaggcagtgttctctctcagcctctcagatggttttttctctggcctctggtggttttccctcacacgtgagccaatcagcactctcctgagtgctcaagggacggatccctctgcagacctttggacttctttctgtgtgtagctcactcttatctgggactctcagcattgtctactcaactcaaagacattgctgggccacacctgggtttcccctccctgtgctgtggcgtagagattctctcaaggcattagttggaacattcatggtctcgcctcatttgtcacctgttgctcagggttcactttcctttgcctgatgtccagtgtcttataaaccattctctcatgtattttgtatttttgttgttgaagatgggaaggttgtttcaggctggaggacaaatctatcttagccaaaagcagaattatttagtcctttcaaatgtgttattaatttaaggtattttaaagagaaagaaccatatgcacttctatagttttgaaaaatacactatttgcagtwggattctaaataaatagttctgactaaactcattgtatttcagaaaagttgtctgtttccctcttttgcttaattttttcttttatatgctactacttaataagcttattttaattcttaaaatatttgttttagctagcagcatcttgactgatgctataataggctgttatgggctttgaagctaagcaaatctgatttacaatgccggctataccatattaattgttmacattactttgggcaggtttctttccttttcttccctttttcctctttattcattttatttttcttgcctttctttcctatttcttacattcacttattcattcatttattcagtctttcaagaaatccttattgaaaaccaattacttgtcacacactgttatgtggtaagaaaactgcaatgaagaaaatagacaaaaatctctactcttttacattctagtttgggagagagaaacaaaatagctgaattatgtagtagattagatagtgatgagtgctatgtaaataataaagcaaggctggttggttgggaggcatgggagttgattgcaaaattaaatagagtggtcagaggctggttggttgggaggcatgggagttgattgcaacattaaatagagtggtcagagaaggcctcgctggcatttgagcacagactttaaagcacagtcatgtcgatatggtagaacagagattacccagggagagggaagaataaatgcaaatccctgaggcagcagtgtgcttggtgtgtccaaggggtaacagggaggccagtatggctcaagaggagcaagcaagagagaagagcaaggadgaagaacagtagaagaggaggtcagagggtaaatgagaggcaggagtagggcagatttgggggcattgtgtaggccattagaaggattttgactcttacatgaataaaattagggaaccattttcggctggatttcagcacagaagtgactgcatctaatgtatcattttaaaagcatcactctggctgctgtgttgagaatgggaaagggtggagacagggaaaccaggtaggaagctgttggagtagttccagtgaggggtgttgacagcccagaccggggagtagcagtacaggtagtcctaagtggtcaaactcagaatatattttgaagtacaatcagtaggacttctcgacaggtggagactacctaagtaataggtataattatggaagaggccaagatctgatccctgaggcatttaaacattaaaagatttagaaaagaggagaaactagcagaagagacagaggaggaagaaaaccaagagaatgtggtatcctagaaaccaagtgaccaaagtattctcagaaggatcaagtgaacatctgtgacaaatgatgccgatagatcaaaaatgatgaggaatgacagttgaccattgtatactgcagtttggtaagagcagttttggtggagtgactgggccaaaagctagattgaaggggcttacagagcaaatgagagaagaaaaatggagagagcaaaatagacaaccctttcaaggagttctgctgcaaaaagggaaaaaagaaatgaggtagtaggtagaggcaatgagtcaagagaaggatttttaagcctttgcccattggaacatttttaaagctttggactgtagttttacaagtaaagtagaaatagctgttacatgttaggcatcatttctatgaaaataggatagtctaaattgttctttcttgctaagatctttgaaacaaatttggattacattgttttatacacattgagacataatttggggatttttaaatgtataaggtttatatttaaagtaaaatctctagggtaaatggtcaattggagttctggaaagaagaatctgatgtccacagaaaagttggacagtgaatgctattatcttattttccactcttgggtacagttaatttcttgaccattgaagataatgagtaatagaattaatttaaaaagatcatgaaatctttggatagtcttcactagtttggaagggaagaagctgaatttaaaggagatgtggagatcatttagttcaatttgtttttatttgccttgactttgtcatacagcttgaagcccagcagaactcatgatcttttttttttttttacaaaactatttctctcttttcccytactkggcttaaactggraaccttgatgtcagtattgattccttttccttcctacctgaatgaggttttgaatcctgcctattctacttcctaagtatttctctaggaggtccccatctctataaccactgttaatgcctcaggttagggtcctcactcttccttctctgtatgttgtgtcattatctcctaactgatctatttttcattttcttcagaattgtctttctgaatcacaaacgtaatcatgttgcttttatttattttctgagttttctagtaatgaccattaactacaaaaaaaaaaaaagtaattttgaaaacaaggtaatggcctgcaaacagttttcagtaggattaatgctcagtgtactgtactctgttatcatgtactttattaccatgggcccttaaacatgccttgctcttaattactctttataaggaagattccttatactgctccatgcttcagagctgttttaatgttacacagcaaccctgttttaatttttccatgtggtcagttaaaagagttgggcattatgccaagagttgaaggtagaagaaaaagagattggtgcccaagaagggtaaggataaggaatccaactaagaaggcgggaggcacagggagcctaggagaaactaagatgtaaatgggcaaaaaattgttgcctatatatgaaatatatagggaagaaaaagcatagtaaactgtagattcaggtaggcacaagcacggaatggtctggtagccagcccrtttctgacatggagcccatgaagatattaaaatagaaatgagaagattccatccaaataacattaatcaagtagtgaaaaatatgtacattagtcccccctatcagaggggactttcagcggtttcacttacctgaggtcaactatggcctgaaaatattaagatattttgtgagagaccacattcatataccttttattacagtatattgttataattgttctattttagtattgttgttgttaacctcttactgtgcctaatttacaaattagctttatcataggtatgtttatccaggagaaaacatagtacatataaggtttggtactgtctgcagtttcaggcatccactggaggtcttagaacacagcccctgcagataagcggggactactgtataagattttaagtgaattaagcccaaaatgttttaaaccaattggagacttagatggaaaaaaaaccatagataaacagtagttaactttgtactttgaactgtatattaagatttcaggtttataacttcagagtcagtctttatttaactttacaagtattcctttattgcttactctgtgctgggagggtgttatgttcccaatgtttttttcattsttagttttgtatttagttggccagcagatcatactctgttcttgcaaaatgacttgaaattaaatccttctgtttccccagtcatcaccctgccctaagctttcaacacttcatgtcttaattagcgaatccttcatgttttaccattctctctttcttctctagtcaagtacattttatataattcctgtttaatcttcctaaagtattatttttattatattacaactgtgttcagtaactttcactcaccttcctattgctcattggataaaatccaaactcctcagtttgcaaatagggtagctgccctaagtgaatggatgtgtccaactattcctygcataggtctatttatttaatattatccgtaggtatggacaaccaaattgccgagtatagtgtctgcttcattataaaccaaccttcctttctttctgtttgtgtctcttgggcttatctatcttccaagtttttatttttgcaaaagttaaacatttactagtattagtttaaggagtcaaataattgtgcaaagtttgttacggatgatacagtccccatgctcctgccactcctcccccattttctcctctttagaggcaaccgctttcatatctttctttctttctttctttctttctttctttcttttttgagacaggatctcactctgtcacccattctggagtgcagtggcgcaatcacagttcactgcagcctcgacctcctgggctcaagcaatcctcctaagtagctgggactacaagtgtgtgccaccatgccaggctaatttttaaatttttttgtagagatgggatcttgccatgatgcccaggctggtctccagctcctgggttcaagtgatccacatgcctcagcctcccaaagcactggattacaggtgtgagccactgcaactggcctactttcatttattttagctgactaatttaaacctaccttcatttccctaaataatgtgcttrtactggtatttctggatttttttttctattttagacacaatcttttgaatctcttggattcttcccctatccctatatgtaagaggcatattttagagagtcgtataaagaccagttgtgggaaaccttaagtattaggagtaggagaaggggttaggatctttattagaatggccatctgagagccaggaagtgatgatgcctayaagggagttttttaggaagataaatccagcagtggtgtgtcagctgaattagaggaggagaaaagaagccatttaggagtactttaattgtttagatgtgagaggctgaatgtttgggttaagatgttagttgtcagaatcatgagaaaaggttttaagcaagaggcatttctaattctaaaaataacaactactgttatttattgagcactatmtttttgttgggtactgtctaaagtacttgatttattttttaaaaccttacaaaaaacttacaaggtaggtactgaaagattcagtaatttgtycaaagtcacacagcaaataagcaacagactctggatttgaaccaggcaatcctagagcctgtactgttagtaattatactttagcacctgtcaagaattcctgttgagtgtcaagaagcaaacaccaagttaggatttaaagcaaacatgattgaagaatactgtggtgtggttgacagtagtgcctaagtctgttttcagagtgaaaaatgacaaattagattttaagtatggtttggagataatatcaggacagttagtttgctacggacaattgatagttgaaaatatgggagcaaatgaaattcaacagataattaaattcaaccataaaaagacaacccaatttaacaatggacaaaagactggaaccagacaaaagatatacaaatggccaaaaagcacatgaaaaattactcaacgtttttagtcatcagagaaatgcaaattaaaaaccacagggagatatcatttcacatcagttagactgattaaaattgaaaaaactgacaacaataaattttaggctgtgaagcaactagaactctcatacattgctggtaggaatgtaaaatggtacaaccagttgggagaactgtttggcagtttcttatgaagttaaacatgcatataccccatcacgcaacaattcaattcctaggtatttgcccaagaaaaatgaaaacaagtgtccataaaacgattttgagaagaatgcaaatttttatagcagscttttttcacagtcacgcaaagtcggatcaacccaaatgtccatcagtgggaaaatgtatccagaacaaatcgtagtatagtaatacaaaggcagatgattcaaaaaggaaatgaactatttatgcatgcaacaacatgcatacatcttacagacatgtgctaagtaaaagaagctggacacaaaagagtacagattatatatggttctatttacgtgaaattctataacagtcaacactaatggatagtaatgaaagctggaaagttgcctccagggagaggggagaactgactggagagggacaagagagaactatsttgggtgatggaaatggaaatgttttatttttgttttgaatggtggttatacagaatatacaattacctcatatagttaaccatctaagagtttgcatcttattgtatataaatcatacttcagtaaatccttgtctctctcaaaaaaaaaaggagagtttagtaatagaagtatagatttgaggattacctgaatagaagtgatcaatgaagctgtaataatgagatttcagaattaagaaggctaagaagtgagttggttatgccttttattagaagcaggtggaagaaaggaattgatggagtagaagagtggcttgggaaatatggacagtttctttcctgattagccaaaggagcttggaatgaagtgggggtatttggtcattaagagatcaccagtcacttcaaagaaagtacttttcagtaaactggaagctacaaccagatttcaagaggttaaggatgcatgggtgataaagggagaaagatattataaaactaccttttgaagttctcaaggtggaaagaagggaaggaaagaattgaggggtaatagggtctacataggattcagtattatgtaatggttttggttgtggtcttggtgtttgaaacagctagaaaagaaaagaatgtaggcaggaagaaagagatggtgaaataaggtcccagagtagacaagagacaatgggattaagggcacagagggaatgattagtttagaagagaggaattcctccttctctgaaaaggtgtgcattggtgcagttacaatgataattagagattgtgccaaggatctggcctacaaaggctctttgtggtagaatagaaggaagatgagtttgttgattcaagatagaggtatttcattctgtagtgtagctgatgagacatcagagaaaggcagtacattagacactgtagtgagagaaaggtttagaacagctagcagtgctcatatgattgtcaggggatgaatagaaggatcaataattagcagtgagggagtttatggtagactcacatcagcagtgcttttcaatccaagaggagaaaaagtagacaatatgaatgaatggcccaggttgaggattagaatggtggaagatgaaatgcatgtaagagttgctgtggtcagagaggtcattgttgaaaaggctgattgtgagatccaagttcaggagagagataagtgaagcaacaaaagggccttatgagctggaataatagaagagtggagagactgaagaggttcaagtactttaagggaacaacatttatatattaaaaatatttaaaactctagccttgagtctgtgcataactcccagcagcttgccactttcaatttctcttctactcttagcacagttgccttaaccgtgccctgctamttccaggaaggccttaggtctttgcacttttctcttctacttcttgaatagagaggcttcctgtgccatctggttttcttgctccatctgactaggcttacgccaaaagagcaattatggtggcatgctgggaatgcatctacggtgtgtgattcatgcattatgaggctctgatggttatcctttatttttgttcagttaattatattgtacctcattccacaaagagttgaagtagtttcaaaggagaataatacccccaaaattctagaatataaataagaagaaagagttgaatcagaaaatagatataaaagtagaaaacaattgtcaggaggaaaaaggaacagaaatatgcaggacataagggcctaagaacttcacatttggcttcaagctttgtggctgtcaaagtgaatagaagatgcaggcatttaccgaattttatctaagagaaggaacggtacctcttcctcgaagaaagcaaaacttttcttagtagtaaattctagaataaaattttcctttggcatttctaataagaggtactaagtaagtcatcttgttaaaataaaaatttgatcctgttaaaaattttcagggacttcccttgcttttggggtaaagtccaggatccttaacaaggtcatcaaggatcattgcactctatataccctacccttaaaaataatagcaagaaagattatcatttcttgaactcttaccatatatcaggcattgtgttcagtcctgtacataaactatgtcatttcatcctctcagaaaccttataagatggattttacagttgaagaaactgagggacagagaccttacacaatttgcccagggtcacagagcaagtaagcaagtaggtggcataaccaagacttgaagccatattctgacttcatgtactaactgattatatgccgccttagagttctttgaacttcacaagcttccgtctgctgattttgcacatttctgtttcttctgccccgcccctcatctccttaagcatgtcatttaattgaattgaatcttgatggatatcattaatttaatatattaacagtaaagaatagaaacagggaaagcatttaatggttttgtcaactacagtgaatataactgttcctcttaatttaatatgtggctttggtcctgtattccctccttatctataatggaagtaggaagcgtttgggctcctgtcttctgtacttttggaaactggccaatgaactgcttaccagatctaatgaccaaatctaattaactcccacaaaacccatagctaagctaatctccatattctcaaaatagaacatgtaaatctctgattcaaactctgtgctcatgttgatctggagccctaaagccctttgctctctgcctattgaaatactgcctatttaaaagttctaactgaagttccagctcttcagtcaagtttttctcaattaattctatccacattgatttcttattaggagaacactgtagttctctttcctgcacaactcattttagaatttatctacacactgcctttcactgttatttaaagtctgcatgtgtatcttttatctcttaatagattgtaagcttctgttgaggactttagcacaatacaaagtgttttacaaatacctgttgaatgaatggtgtaatagtctgttttggccttgtagaccttatttaccgagtgaagccaacaggagaacactgccaggttaagtagtctgaggtacttctttgttcagtttttgaaaggagttttctgttggtttactcttcacgagataaacatgaacgaggaaatactaactgaatcaagggagaaaattggcttcctccagtatactgagcagtttttgagtgcttactggtagttaccaccatacaattactttttcttctaactcccacacctcccttcacataaccttttcagaatataatggtaaataagaacatatgcatttaacctgggtaacttgttctccaggacttttatggcatttggtgctcatctctgaaggataatattttcttggtctggcagcatggaatatggaatggcaaatgaatttgcttaagagtccttgggttatttatgagtacaataaggccttaactacattttttcctctggaatcacaggtgtgattaatgaaagttattcactattcctacattctttagaactatttcttatattcatccatgtggtcatgtgcagtaaatggcacaaagatcttagggtgatcacctcgtcagacaatttgggcrctgttcaaacaattaaaccggcagttagcagattctggcctggtaattaaattacccagggtctttatttacagatttctgctycttgatatgctgtgtctttctaggctgagcatatgcctggggtttattgattcatttcctgtctttctctttcagtggtaacatactaggatgccagctgtggtaattgaaaaagggctttgttttagccaaaatacctttggacactggttacttagagaacctgagggacagtttttgtggtctttggttaatatcttcacagcctgaaggtagtactaggaaagtagttcgtttgttttctactacaagtttaaataaattttgaaggtttttcgcactttattttgccagtatgaacctaagttttaattcttttttttttccacttattattaaccagcgtcccaggtcagtatkgcttaaatctgtccttacttctccaacatcttctatcatggctttaattcagattgccatcatttctcacttgaatcacttcaacacctaagtcctttttgcctccagacttgtccctcttctaatccatcctccatattactatcaaattgatctttctgtaatacagatctgattcttgtcatttttctgcttaaaatatttctgtgtcttcccattgccctcattataaaatcaagttagtgtggaattggtataatgatctgccccgtcttcctttccaatcacattccgggcacatgttgtatgggttttattgactgaacatgatctgctatgcagatttacagacaaactttgcttcacatgtgtgaggatggtagatgttaacatagaaagatattaaattggtgtgtacttcagaagggttatgcaaatgttgaatgcatgcagatgaaattagactatccttggctgtaagatgtaggatctttccttttgaatttttattagatatgtataatagttatctttgaagaggtcagatctaattggattatttataaatctttctagttaacttgtagagagactagtaaccacatgaaagagccagcatgattcatgattcagaaaattgttattgttctccctcccayctttgtttaaattgggtcggacattaaaagaaaagtcaggagtaagctgtgtgtggtagtcctagttccgccattgacttctactataaacatccttgattaagccacataatgtttctgaacctcagtgtgttctaaaaatgaaargggtatatgagtttagtaagtgatttatgtgctggggaaaaaagaaagaaagagaaagagaaaagagaagagaagggaagggagggaagaaagggagaaaggaaggaaggagggagggaggggggaggaaggaaggaagggagggagggagggagggaaatgagtaaggagggagagagggcagagggagggagggagggagggaaatgagtaacttgaccactgctctagtggagttcacagtcaactttctacgcctaaatagttgtctgtaaatcgaaggaaataaagttaagtttttcaacatggatttgaagaatggaatggatctgtcagagatgattaaataaattgtttttaaacttcatatgtttggaaatacaagcataagaagccttaataaaatagacaagtttctgaaatgcagtccatttttcctggtaacctccattttagatttcagctatctcctgctgattattggcagcctgccgttagttatggttcaaagctgacattctgtactgtgagcagtgagctgctcccatgtctggcagctgcagttgtagctaggctacagtgaagggagagagagaagcatcagctattctgatcttggccataaccatacccaactgaattctattaatgtgaggattttggcagtctgtgtttcatttgttccctagttttctgtttctttcaggatgaatttctattaagtgaatcattgtattaaggaatttcagtaagattaaattaattcagaaaaagctaattctttgtttgtgaaaggggataaccagaggtagattttatctgctaattacggtgataaaagaggtagatttcctacttaaaataaaatgggaaaaaccatagtccacatagggaggatcttttcttctcgctttggtgaatgtctttctgctttcagaaagaggtctccaagtgagatagctgaagaccttttatttctgttgtatttattttcttgtatttctgaaaatgcctttgttttactctcatatgtgaatagtctaattattgctactgctcyattacccacttttgtaaaagtattcttttatttctatcagagcaatacattatttattgagggcctgttatgtgtcacacatggtactaggtgctaagaaatcatmagttaacaaagtctctgccttctttgagtttatactttagtgagagtgttttaagttgtgggattaaaagaaaatatgtgatgtcagtgtttcaaagacaaataaggaaggtaagatggataggaaggccaggggagggtaaagatgtgttcttttatcaaagatgatcagggaaagcctctcttatacatacttcagcaaaaacctgaagaaaggatacataaatattgtgagatcttacacgtcttaagatgctgtttctctaccataatacagagtagtttgtctgggaatagaattttaacttggaaataattttctttcagaataatgaggatattgttccattgtcttggaatttccagggttgcttttgaaaaacttaaagcgattcaattcctgatcctttgttgtgagttactgttttctgtctgtaagcttataagatcttctttttgtcctcagtgttctgtaattttccaatgatgtgctttggtgtgggtctatttcaatttgtggtgctaggctatctgggaaattgccttgaattatttagtagatgatttatttccctacttttctctgtattctctttcaaaatgccttttattcagatattaggctttctgaactggctttctaattttcttttttttcttttttatttttttgttctcctatttaccatgtctttgtcttgttgttctgcttcctgagggatttcataaactttatcttttaacctttgttttgctaccacattttaatatctatgagtttattttgttccctagttatttcttttaaaataacactcttttttcaacttcttaagcattttactttttttatttttatttttttagtctaaaatttattgcctaaaggctttaaattcttggatacatrtgcaggatgtgcagatttgttacataggtaaacgtgtgccatggaataacacccttatcttatctgatcattttgtaatatctttttttttttttttttttttgagaaggagtctccctcggtcacccaggctggagtgcggtggcacaatcttggctcattgcaacctctgcctcccaggttcaagtgattctcctgcctcagcctccccagtagctgggtttacaggtgcccaccaccacgcctggctgatttttttgtactttcagtaaagacagggcttcaccatgttgaccaggctggtctcaaactcctggtctcaagcaatccactcacctcagcctcccaaagtgctgggattacaggcatgagccactgcacccagcctataatatctttattaaatctctctcagaacaacaataattttgttaaattttcatttctttgtatactctttatctttcatttgtatttcatttcttcgtgtagtctttcttctctgtgatttgttttttcctgttggtgtgtttgttttagtgtatatattacgtgttagagtttatttaggtgattactacgtatatttgtttgtcaattcctatttaagagcagggaaccaagaagctaattggaaactgagccagtagaagggattttttcactgctagggtgatctgactgtgttcttatattggggatttccaatgtttgtatctttacacttgagttgatggattaccaagagaagattctttgtcttctacccataaggtaaagcctggttgccatagttttggccttatggatgaggaatgctaacgcatgtcagtatccggtatgcatgtttacttaagctttctgttttcaactgcacctagggttcttaggtctggagacccttcattttagtctctccttgagaggataagcctctagatttctactggggtagaaatcagggcactcacccagtccataaaatgaagggaggagatttggggattgaattattttttaaaccatcttcacctgatcatccttattttagcttcattttacaccaacttccagtttcttgtgccatcagttcctgagtctttggggcattctactatgtaaattatattgattcaaggcattttccattgctgaggcttcaagtttctcaagtcagttgagctggtatttcaacagtgagattttttttgtttccaagttctttagtttgttctttttcctgtttcctgttctattctgtaaaatatatgtgatatagtctctyatctctgggaagatagtaaacatatatatttatctctagatgttccttttttcttatgtttttctttaaatacttgaacatagttgtaataactattttaacatcatcttataattccataatctataaattctaggtctatttctgttgtccttctcctgcttataggtaatattttcctgcttcttggtatgtttaattttttgttgttgttgtttttttgttttgttttgttttggatgctagtcattgtgagctttacattgccaagtttctggattttgttatcttcctgaaacagtgttgagctttagtgggcagcagttaagttacttatagtttggcttgatcttttcaagttttgttagtgttggggttgcagtagccctatgctagttgtggtccttctaaggtttctactgaatgccttgaatgatcagtaaacagtctccagtttggctgaaagaagtttaaatggtcctcagacctatatgagctctgggaaccattcagctcacaacaccttgtcattctttgccaaaccttatagaacttcatcctaggcacatatttcttagtatctagcaaagacttaatagcagatttctgagcctttattattattttttttctgcatagtccctcttctccagaaatttgctccacatcttctggaaaccttagacttctggaattctaatttctgtctcctttactcaggaaaacagccatggcatgcttgggatgcctgtgcctgctcagaaatccagaatttgccttcaggcagaaagccaggagatcataagcctcacctgattttatttttgccagttttctggttgttttaaaagaaggttaaatccgattcatgttacaacatcatggccagaagcataagtcaaacatgcttattttaaaatcctattccatttatttgttaaccctttttctttagatgtgtacctcatttgctgaagttgttttctgccttaaatgagattcacattcctcaagagtctgcccatcctttgattgtatatgcatctttctcattgaaattcattgttatactctctcctgcttctgtttaggcagtctgcttgggaaggggactaagacttgccatgggagttttgactcaggattttcagtgaaagtagaggagtgtgtagaaagtatttctgggctggatatcctggagactgctctactaggaatgaatgcttcctttttttccccagccaccttggacactgccctgtctctaagatttaagattaaatctctaatatttaatactctcttcaggagttgtatactctctgttactgcgcagggtgtgtggcacaggatgtgaacatggattgatctgacttgactgcatcccttgtggtattccaactaataagactgttgactgtccctcagccctttcctgttccaatacttcaccattgggcatgaaacactttgggcatagaactctcttgctgttttttgtgtctgtatatcttagcttgtgattttcctctttagtttgatctagtctgttgtaaatcacaaaatattcccagttgctagtccatcagttccttttgttcttgtgtgactgttaattaattttctttcatttccaggaattgatgtaggagagaaaactagctggttcccagtctgctatcttgaaacaggcagaataatctcttttgccctgcctatgcacaatcattttaagatagatttgcttttcattaaatattgggggttcttaaaatgtaaatatccagctttgttcttaaaatgtaaacataaaataacatttaatgtttaaatgttaaacattaaatagtataacattttctctttgtttctttatcccattatgaaccatttatttggcccttcattcaagaaataatgactgggtttcctgtcttggtatttgaggaggagggtactatctaagggagaattaaaaacacttagaactatgctatactatgctataagtgctacgggaaactatgagaaaagttctttagaaagtcagaagaaacaggcaattttttttttttttttttttttttttttgagatggagtctcactttgtagcccaggcttgagtgcagtggcgcgatctcagctcactgcaagctccgcctcccgggttcacgccattcttctgcctcagccttccgagtagctgggactacaggcccccgctaccaccctcggctaattttttgtatttttagtagagacggggtttcaccatgttagacaggatggtctgcaaatatagtatttgtaggcataaagttacaaactcggtgccagtatagcatctggtaaaggcctcagtgaactaatggcgaaatttacctcctttttagtcctcaccctctttaacttcactgcagcaacttgactcttagcatgcattctctttttttcttggaaattgccttttgtgactgttttcttttcctacttttaagaccattgtctatctcattttcctgtcctgtaagagaaggagttctatgcattccctcactgagctctgtattcccaaggcttcaggcctctaggcagatgaacctcaaatccataacctgagcctttacgtttccctaaattccaggtccctacttactgacttgttgaaaagaaaattacaaactgggcacattaccttcttctcctcctaaataagctcttcccatattcaaaattctgttagcagtttgaccattcattcttcttctgaccctgaattaccttggactcattcttttttatatctaattagttgcttagtcttacagatttttctttgaaatatcttattttctgcttttgtttactttatattttctgcttttgtttactttatattttcattgccttaaccctaatttagtccctcattaattcattttcagctcatgattaggatcccaagtggtttcttgcctctttatttcccttatcagtctttcctgtgcacagattttcactttatttcttaaaaatcttctgcagttcctccttgcctaccaacttctttggcacttaagaccttttatagtgtagacctagctcttttttccaatttcatttcctgttattccctatgtgtaccgtatgagagacaatgggctttggaatcacagactgggattcttgtcccagctcagccattatttaactgtgtgcataagtaactttggaagagtcgcttaccttttctgagtctcaggttctcatttgtaaaatagttgatgtatgaataaggtaaactaaaatttctggtactacagtaccagacttagtaaatgttaatctcttctttcactttcctcaggtcagtttggttgccctgttcttggaatgctccatgttttcctacacttttgccatcacccttctgaacggtttttcactcccagcacttctgacaccaaatgcggagggtggaggggctccctccacaccaaccaattttccagtaccaactgagtgtcctagaattcatttcaattctgatactaactacgcagagctagcctcagatgtgataggtttaagggctcattcccacaagactgccctcacatcagaggccagttgcaagtagcaggtttccaggttacccacaccttccgtcccacttgactacaaagttgggaattcccatgactctctactcaggttctataatttgctagcacgtctcacagaacctaggaaaacagtttacttacatgcactggtttattataaagaatacaactcagaaacagccaaacggaagaaatacatagagcaaggtatagggggagggcagagcttccatgcctctgggatgccaccctcccagcacctcagtgtgttcaacaacttggaacctctccaaaacctgtctgtggggtatttatggaggtctcattacataggcatgattgagtacatcattggcctttgatgattaactcaatctccaacccccatcccctctctagattcccagaggtggaactgaaggtaccaacccgctagtcacatggttggttcctctagcaaccagtgtccatcctgaagtgtctggggactcaccactagtcacctcattagcataaactctagtgtggttgaaaggggcttgttacaagtaacaaaagatattcctgtcacttaggaataccataggttttagaagctctctgtttggaagtggagacaaagaccaaatatakattcttattgttgcaactctataattccctcacccttattttcaccaggcaaaatttcttcgttttttttatagctcagttcagatttcactttatttgtgaaaccttctcatctgtccgctagttaaaagaggcctttctttcattctcatggttttgtctattgtaaagtactattattattggtttatgtatctttcttcaacccactgtgattttcttgagggcaggatctatttcttattcatttactatatcctcaacccctagtaaagtgcttttgcacatcctaggcattaagtaactaaatgatgagtaggatttgttttgctttaaaaatttattatattttagggaagggaacaacacacaccagggcctgttggaaggttgggggcgaggggagggagagtatcaggacaaatagctaatgcatgcagggcttaaaacctagatgatgggttgataaatgcagcaaaccaccatggcacacgtatacctatgtaacaaacctgtacgttctgccattgtatcccagaacttaaaaaaaaaaaagttaattatatttgaaaatgtagagtagacaggcaatcattgcaaatgtataggctgggcacggtggctcacgcctgtaatcccaacattttgggaggccgagactggcagatcacctgaggttaagagttcaagaccagcctggccaacatggtgaaaccccgtctctactaaaaatacaaaaattagctgggcatggtggtgcgcgcctgtactcccagctactcaggaggctgagaggcaggaaaatcccttggacctgggaggcagaggttgcagtgagccaagatcacaccattgcactcaagcctgggtgacaaaaaaaaaaaaaagaactgttcattgggcgttttagaattagctaggcatggtgctgtgcagctgtagccccagctactcatgaggcttaggtgggaggatcacttgagcccaggaggtcgaggctacagtgagctgtgattgtgccactgcactccagttggggtgacagagtgggaccctatctcaaaaaaaagaaagaaagaaaagaggccaggcgtggtggctaacacctgtaatcccagcattttggaaggctgaggcgagcggatcacgaggtcaggagtccgagaacagcctggccaacatagtgaaaccccatctctactaaaaatacaaaaaaaattagccgggcatggtgacttgtgccagtagtcccagctacttgggaggctgaggcaggagaatcacttgaacccaggaggcggaggttgtggtgagccgagatcacgccactgcactccagcctggcgacagagcgagactccatctcaaaaaaaaaaaaaaaaagaaagaaagaaaaaagaaaagaaagagaaatccgaaatccttattttcctgaaaggagtaaagccmaaggaaactttttttacatttaaaaaaaaaggtttttttcaaatgtaaaatttgaaaaaattgtggccgtaaaatacagccacaggcacgtatctcgttttctgagtgactgcatcccacctttcaactgcttaagctttattatcattactagttttggaaaatttaaatttgcttgtaatgtaactgctacagttacctgttagtttatttctcatcttatattctaaacatacagtatgtctcatactgcaaaacaaaggaatctgaagaagaggaaaactaaaaagctcagaaactgttatgaagttttgctgccacgttgtatgaggaatttgatttgcaagtttttaaactaacacacttaaaagctctttattcttcacatatatatacataggtttccatagttggaatctcatatataagttattatgtatccattttttatatataacataagcattttttgagtcactgagtaacgcagttgtccttctgctaaactcctggctgaagttactaatgggctgggattttcatttattcttctagtaattcaacaaatacttgttcagagcctgtcgagtgtcaagcattgtttcagtcactgttcatgtgcaaagagtagagcaggggacaagtcaggccaactcccagctctcatggaggtataatagagactgagggaagatgttaaacaagtaaacataagcaagaaaatttcaggtagcaacaagtgctgtggagataacacatggatatggatcaacaggtactcttacatactactggtgacatataaattattaagtaaaatgaaaagcaaatatatcctatgaccctgaagttttaccctatttcatgtacatataagccagatgcacctaaaagaacattcatagcagtgttattttcaatagttcaaaactggaaacaacaaaatgtccatcaacagtagaatggctcaatactttgtagtatagtcatacaatacagcaacaaaagccagtgtactacactcaatgtgaatgactcgtaaaaacatattgttgagggaaggaaagcagacacagaagaataccttctatgtatgtaaaatccaaaactaaggtatgtagtttaggactatgtgcgtagtaaaattacttttaaaaaacaaaaaacaggccaggcacagtggcttatgcctgtaatcccagcactttgggaggccaaggtgggtggatcacctgaggttgggagttcgagaccagcctgaccaacgtggagaaaccaaatctctactaaaaacattagccaggcatggtggcgcatgcctgtaatcccagctacttgagaggctaagggaggagaatcacttgaacccaggaggcggaggttgcaatgagccgagatgatgccattgcgccctagcctgggcaacaagagcaagaaaaaaaaaaaagacaaagaagcaactaccataaaatcagaataggactccctgtgggggcgagagggaggaagttgtgattagaaagggaagtatgggggaggtgcttctggagttctggtaattttttatttcttgaccttcatggtggttatgtaggtatttataataattcactaaactgcacatttatgttttagacactttcatttgtgttttatatttcaaacaaaagcagtgtgatgatagcattaagtatagttttagtgcatgtgcgcgcacatgagtgtatgtgtatattttacagctttattgaggtatgattgacatacaataaactatgcatttaaagtactcagcttggccgggcatggtggctcatgcctgtaatcccagcattttgggaggccaaggtgggtggatctcctcaggtcaggagtttgagaccagcctgaccaatatagtgaaaccgcatctctactaaaaatacaaaattagctaggtgtggtggcgcatgcctgtaatcccagctacttgggaggctgaagcaggagaatcgcttgaacccaggaggcagaggttgcagtgagctgagattgcaccattgcactccagcctgggcaacaagagtgaaactcctttctaaataaataaataaataaaataaagtattcaacttgaacacttatggcatatgtattaacccatgaagccatcaccacaatcaagacagtgaatgtgtccaccacccctaagtttcctcaatgtccctttttcatctttccctcctgcctgctccttcttatcccctcacccccgggcaaccactgatctgttttctgtcactacagctgtacatagattagcttgtatattctagaatttaatagaaatagaatcacataatgtatattcttaattttgtctggtttctttcactcagcataacttttcgagattcatccatggtgatgcttgtatctgtgattcattcctttttattgctgagttgttgtctcttgtgtgcatttgccacaatttgtttatccattcacctgttgatgaatattttggtagttttcagtttctggctattacaaataaagttgctgtaaatattcacatacaaatccatttataaacatatgatttcttttctcttggttgaatacttgggaataaaatggctggatcatatgatagatacatgtttaactactttaaaaatataagtatagttttgtaaccctgtatcttcagttaatatgaaaatattttcaagtcaataaatacattcctataaaattattttttaactgttatagtagtccatcaattaaacatgccataatgtatttaaccaattctttgttgatggrcatttagattacttccagttttttcactattataaacagcattaccatgaatatccttgaaactaaatctttgaacatgttcttaattatttctttaagataaattactagaaatgagattgcctggccaaagttttattacagatttccctccagacatatgacagattaaatcatcaatcagatttttttatttgagtactagatttagatacagttagccaaaataccccttttttccagactgggcaacatggcgaaatcccacatctacaaaaaatacaaaaaatacgccaggcatgttggcattgagactgcagtggccatagtcacatcactgcactctagcctgggtggcagagggagaccccatctcgaaaaaaaaaaaaaaaaaaaggctgaacacggtggctcacagcctgtaatcccagcactttgggaggctgaggcaggtagatcacgaggtcaggagatcgagaccatcctggctaacacggtgaaaccccatctctactaaaaatacaaaacattattagccgggcgtggtggcaggcacctgtagtcccagctacttgggaggctgaggcaggagaatggcatgaacctgggaggcggagcttgcagtgagctgagattgtgccactgcactccagcctgggtgacagtgcgagactctgtctcaaaaaaaaagaaaaagaaaaacctccttttttgtcatgaagatggtttttttactttttttctatttatagatgaaaataagtctgcagtctcaaaaatggagtattccatttttatcatatagtaaatgaaatttctctttctaaatcaaatgcagctggaaaaagaattacccttggaattagggaatctgtaatgttaaaaaataagttgtttaaggatgagcttgcagtcaaaaaaagaaaaaataaagaaaaaataaaaataagtaattaagagattttaaaacatagttgtagaatactatgcatggtatgatttcatttgggtttttaaatatattattactatttactatttaaagcagtttattttaatgccttagttctcttgagctgctataacaaaataccttaaactgggtaacataagcaacagaaatttatttctcgcagttctggaggcttggaaatcctagatcaaggtgccaatggtgtctggtaaggacccactttctcagatggcaccttctcactgcatcctcacacggtgaggggacaagttagctctcttgggtctcttttaatgggcactaatcctgaacagtgccctcatgacctaatcatctcccaaaggccacacctcctaatatatcacatcagggattagatttcaacgtattaattttggggaaacacaaacaagaccatagcatataatatgggctcctattgatatatactgtaaatatatttatacatgaaatatatatatttcatgtatatatatatattttcacagactggtgaaaaagtttagaaaatatgaatcaagctgtacagtggttgtatctatggagttgggattatggggaactttcatttgtacattgtatgtttgttcttgtgttttaaattttttcacaatgagtatacactgcttttcctactggaaaaaataggtactgtattttcatctggaacaaaaatgagacagctctacagttcaacttagagacatgttagcatgtagatcttttggagaagctccaacgagagaggaagctaaggcaagtgtgtcttattgctgcagtatatgtctccctaccaattatggtctcctgctcaatgtgttcttgaattgttagtcagcaaaatgaatactttttactctttcctaaattctgtcaggctacacatattttataattgatatgtagcttgtcattccagtgttctagtgccccttatatttcagcatactgtagctggttaagatagtgtcacatagtttcattcttttttctgtgcatttgtctctccatctgtgagtacagcgttgtgttgatccttgcacatattccatgtatctctctatactctgactttgaatctgctaatcaaacactgtacactttagttggtgaccactgtgtcctaaaataatatattgttactgtaaatacatgataaattattttctctgaatcaggtaacatctcactataaatgaaggtaaccacatgaaggtatttgaatatattacttacagtacttgaatatagtataaagtttttactttatactataaagtataaaagtaatacttttatacttttttccctaataagggaaaagtcacttattaggtaccaggagacttgtgtaattatccagctctattatgtacttgggtagttacattatctacttggggctaataatgcttgctgtggtaacctaacaaggaatgaacattcattcatttgttcattcatgaggattaagcaagataatgtatgtgagagtattctataaatggtaacatacaatgcagatgtaagtctgtacttctgttattgtgctaatacagagtctctgtgatggcataggtggcagtgatgtcatgatggtggtgggagtccagaaggragatactgcaaatacttttttcaacatcactttctcataactaacaagatcttttctccagaatagctctatttttttaaaaaaattaattgtgctaggagctctcataagtatttgcatatccagaagttgacctagggaataaaaagaggcagaaaaatagtttagtggcttactaattaacacaaatttgagttatatgcaaactcagtagtgtcttctcagcattaactatagacagttcatttgtcctgaaagctttattgtttgattgtgattgtgtagatctttctcccataaaacattggattagtaggtgtacatatatgctaaacaactaaaatacagcttaatatccttaatttagatacattttaaatcttaactttagcaattatcttttcctttggcttctctgggcaactagatttcaactcatgacttgattaagccatctccattttgaactttctgaaaaaacggaagaaaatctctgatttttcatagtaaaacataaatttaattactggtaggtatatattctacttgctttttttgaaagctttagggagaatttcaacctctgcattaaaagtcagtaagaaaaagctcttacgacaataactttcccctaaaaagcacaaatgcttctttgcctgtcatttaaaaaatatttattgtgcactcaatgcagaaattgtaatgatatgatgctctagtagagttataaaatctttgacgtaattattagtttggagaaagtaaaggcctaggtatcaatatctaaaaatatataaacatttttttgatcttaaacagtcattctcaacctcttccattttttctattcatacctcttataattcaaacagcaaaatataaatcctttgaattgattatgttgcttgttttttccaagttactctatgttgaaaataggaaaaatatataactttcataaagttatataaggtagatgaaagtaatagacttgtgaagcaaagttgtattcaatagagctaaaaccaaagtgagctctactttaatgtttaatcaaagtcctaaaaatacggttggtcttagtaggcatgagttttctagaaagagtactattttgttgaattttggcatagaggaaaagtaatgttttatatcttttgattttatacatgaaaataaaaatgatttttaccacttttaatggacctctgtcttttaggagcacatctgacttcacgttagagttatatattaagttttctcaagctacatattctttactgagatgcttaatatttcacatatcatataaaaggaagattgttctttaatttactaaggtaaaattaaccaaaagtaatttaaatttcagttattagtgtagcaatctgtaggaattaggtagactctgagtttgaattggaaacttgcttgtatttagttgtgtttttttaaggtaaaataatgtgcttacaaagacatggaatcaacctaaatacccatctatgatagactggataaagaaaatatggtacatggaatactttgcagccataacaagaatgagatcatgtcctttgcagggacatgggtgaagctggaagccattatcctcagcaaactaatgccggaacaaaaagccaaacaccacatgttctcacttataagtgggagctgaacaatgagaacacaaagacacagggcggggaaccacacaccctggtgcctgtcaggggaggtgatgggagggagaacatcaggataaatagctaatgcatgcagggcttaatacctaggtgatgagtcggtaggtgtggcaaaccaccatggcacacgtttacctgtgtaacaaacctgcacatcctgcacgtgtatcccagaacttaataatatgcttacacttgatgtgtatataggtagccattgtttgtacattcattcattcatttaacagatatgcattgaacacctacactatggcaagaactccattttaattattttgctacagcgtaagttgctatttggctttgtcagtggcaaatacattattccagccaggaggactttgcaagctctatagcttttttcttggtgagctgataattttaatggaagtcatttgctactccaaaagctttgcatgaatgytgcataggaataattagaagctgtaacaaggagtcaattctttgtacaaatatttatctcacataactttatatgattgaagataatacatcggtgcttctaagatcccacctaaacacaatttctttacaaacctgtcaaaattattgagtatccgctgtgtaaaaatacagaaataaaaaagataaatattacatatatacatacatatatatacacatacatatgtgaaacaatgtaatcaatcttgagataacaaaaaacacatagaacttcaagtcttgtcattagatacactaaatctgtgggaaattggcaatgaaaaagttatgaccaaaatgaattrcttctgagtttttagccatttttttcagtcagttgggacattcatatgtgaggattatggaatgtaaggaatgacagaaattggtagagcagcgaaatctagtctcccagtttgcagttttgccaagaattgcggtgagagattgtatgtcattaatttcatcttggggcttccttttgatataccactccaattttgagcaagttatcatgaaaaacatggatcacttagatgtgaatgagagtaacttgaataatgtaactgggcatctaattaatataagttcttgaagaaacaaaaccaactagattcagaaggccttgattagaaaaggtgcttttgaaactattgttaataatgctaaatacaataacttgactaaaacttttattaataattaccatgtggcaagtactctaccaatcatcttgtatgtcttttctcatttaaccctcacataggtggatgtgttatcattatcttcatatagatgaggaaagggagactcaaattgataaaataaatttgctcatagtgacacagttaataattagaagaagtagtcttgattaaatcagaggcaggtgagtcttggttttaaaaacccatgttcttaaccattataatggtgtttctcaaagtatgttttgtagaccacaaacattgaaattatattaggtaactatattaaaaggttcctaggtcccataccagaccttctgaatcagattccttgggtatgggatccagggctctgaatttttaacaagcttttcaaggtgattcttacggacgctaaagtgtgagaaccactgcactaccagggctgagggtcaagttaggccaactacccttcccctcaaccagaagggccaccctgagagtaggtctgagaggaagccatccaacagtaaaggtaatgggaaaagacgttattactttgattatgaaaagacagtttagttggagattctttagtcatagtatacattatagaaataacttcagactcgaatttgattgctgtcatttatggaactgttctcggaaccatagattgagaaaaacaacgttgtatcctttctcctaagctcagaaatgctcagtaacttgaccttcagctttggcaccaacttccctttccttgcaccagaagaattcttccaacagaaggcaagaaaagagaagatccaagaagatggacagtgagaaagggaattggcattttcgtaggaaagaggactacttcagagagaggttcctaaaattgaggtgtaatgaaggcttgtcttcctcacagggtggagatcagattggatacagatatgaacgtgcatattgccttgcaaagaagctttctaaggacattaaacagtgagaaatggtcagttgtggcaccaggacggagatttatgccaaagaatcttatcggaagtagattccatccattttcagtgccagcaccaaaatgttccacccataattttaggattgccctggggcaagctgggaggtgtctgtggtgtaaattagctttttcccttctcagatctgtcttcctttcccttccatgttatctacatttcataagttatctatacagtttaaacacctcttttgttttactttgctttgttctattttattgaccattctttgacacttgccatgtgtgttttgaattccaaagtcaatttcaagatggtttccattgttaagaatttgaagcaaaagactgtgaggaaagcaaatatagaaatttcttagggaaaacatgattgtaataaagtatatgttagtaaatatttttctgctctatagcagtggtcttactattccttcctaagggaatttctttattgttttttcaatttttaatacaaaataagtgcatctgaaggggaggaagaactcttaaaagctccaatgattgggtgaatccttatggaaaaatcataaaaagaaaaaacccggctgtcagagttagagtatctaatttccttttctctgccagatattttatttgcctgttgaaatctctgattgttatattatctcctatgctgtagatttttaatctttggaatgtagactacttcaagatctgagttattattattcagtaatgacaagagtatttggccattgtcagatcatttggccaaaagagatcctgtttgcctaattctttttcttatttcttgactcagttgtgtaatattgtcacttgtaccctgtttatagttctatctgtgtaaaaaccaaattatgagttacttaaaggtaagttctttaatattatgctttgtttaatcagtataaaacaacttttcaaagtgttgttctacagttctgagataagcatctcaagtagcttttaaattagttccccacacctaaatacaagtgagaattgtacatttttctgcttgtcatcaactgcctcttctcctcagtcttaaccatgtttcactaaccatgcccatctgttgtgtcttattaagaatctgtacaccatcagcttcacacttttggagtattgtacaaaagcttcatggagaatgtgactatgttttaaatgaggtgaaattttcctccccaggtagggactagttttgtttctcacttgaaattgagacatttcagaagattattatgagtatgaaatctgatttcagaatacattacaatcattctcttgacagaaaatttaatcagaatatttaaagcattgttctacaatgmagcaatttgtcagttttatcagtagattcttcaaataaatatataaattttaaaatttttcaaaaaaatgtttttctctggctgggcacagtggctcatgcctgtgatcccagcactttgggaggccaaggcacgcagatcacttgaggtcaggagttcaagaccagcctggccaacatggtgaaacctcttctctactaaaaatacaaaaattagccgggcatggtgctgcatgcctgtaatcccagctactcaagaggctgagaggcgagagaattgcttgaaaccaggaggcggaggttgcagtgagccaagattgcgccactgcactccagcctgagcaacagagcgagactctgtctcaaaaaagaaaagaaaaaatatgtttctcttcctttgtttgccttatttaccaataaaatctgaaatcccaaactgcttctataggtcaggcaatatcagtaatttttattttagtgttttatattaactgctgcttaaaatctgtggggataatctgctgtattttggggtgtttatacagaggctttgacaatggtaatgatggcggtgatagattttcttggaagacagtggcctgagaagactctcttggctttatagctacctaggtggaggtctcttgttatggtccttcctagaatggcctgtgcatatctcccagtgctttcttgctattttacaattctataaactataggtctgtgtcatgtactagactgaactctgtgggggcaaagaatgtttcttatttatatttgtatctctagtacatggcagaatgcataccccacagcatattgtaaatactctatcaatgtttattaagagattgagaagaccaggtgcagtggctcacacctgtaatcccagcactttgggaggccaaggcaggaggattgcttaagcttaggagttcgagaccagcctgggcaacacaaccctgtctatactaaaaatgcaaaaaaaaaaaaaaaaatagcctggtttggtgctgcgtacctgtggtcccagctactcaggaggctgaggtgagacgatcacttgagccttgggggcagaggttgcaatgagccaagattgcgccactgcactccagcctgggtgactgagcgatactgtatccaacaaaaagagagagagattgagagaattaacactctgacattgacaattactgttttgaattatcaaaacagtggaccaagatagagttggccaagaacatatttatattacttttaactatttctctgttaataatggctctagttgttcatttactaaggaatgtgttgtttttcaatttaccaagaaggttcaacattctaaatgtatttatatgcacataattttgttcaggaatatttatgttttggttattatatgaattcaagctactttttttacctactctccctctgtacaactcaccagttttaacattccatgaggataactaacatagtagttgtcgccattttttaaatgtttttagagaaactcattaaggttaatggaaagaaacagggacaagtcattcaaaatgcaaaattcagtttgtttctgaactgcatttcttaatgtttctgaaatgtctgttctgaaattttgtttcacattgtgccttatttattactggtgattttggcatttcaaataaaattttaaaattatgctatggaattcttacctgagttactcgtaagctagttgcccaattctcatttaattttctgacttaatcttttctcagacccattttatgttcttatactctagatgtttagctaacttaaatttcccttgagagataaatagaaactttaaaaaaggacttttgtattattttaatctgaagatagaaatggaaagaaacctcagtatgctctttgttttccaatagcctaagaataaatttatgcaaatacttattgagcatctgttacttataagtccttattcttagtgccatggactacaacttgtataagatgtgtttttttactttcaattattttgaataaatgagacatatttacataacaaagcttaaagagcaaggcaggatttttaaaaatgagatggcatttgaattggaacttgaaggactattgaaaatatgtagtctgcctgactggtatttttggatagatcttgaattatcactgcctttgctgataaactctcattttgggtgcatgttttttccgttttggtaaatattgctggttttgtagtctttgaggtgattttgcatatgtttactctgattcattcatatgcagattttattaattagaatatactgggggtctttttgggttttgttttgttttgtttttgagacagggtctcactctgttgcccaggctgaagtgcagtggtgcagccatggctcactgcagcctcaacctcccagcctcaagcgatcctcccaccccagcctccagagtagctgggactacagacacatgccaccatgcctggctaatttttttattttttgtagagctgggtctcattatgttgcccaggctggcctcgaggtcctggcctcaagcgatccgcctgccctggcctcccaaagtgctgggattacaggcatgagccaccatgcctggccagagtagaagtaatagatttttatttctrcaaggatggaagagaattggtggggggaggtggggagtaagtgtcagatgaaagtaacagcatgagctccagagtacagaaagttatgaggtttatatgagaacaaagcagttcaggttggctagagcaaatggaagaggaaaggtagataggaggaggagatgtaataagaacagagagtaagggaataaaatgggctgcaactatacgtcatgcaggttcagtattctgactaggctaaggagtaacatgggcttaattaattccataggcgtggaagagctattaagaatatttaaataaaaaatgaccttcttgaagttctgctttagaaagatgattttwatttacttatttattttttcatttttattttatttatttatttatttatttatttatttatttatttatttatttttgagacagagtcttgctctgtcacccaggctggagtgcagtggcatgagctcggctcactgcaacctccgcctcctgggttcaagtgattcttctgcctcagcctccctagtactaggactacaggtacgcaccaccacgcccggttaatttttgtatttttagtagagacagggtttcaccatattggccaggctggtctcaaactcctgacctcgtgatccacccgtcttggcctcccaccaaagtgctgggattacaggcatgagccactgcactgggcctggaaagattaatttgtattagaatcgagagatacggccgagtgcagtggttcacacctataatcccagcactttgggaggccgaggcaggcaaatcacttgagcctaggagttcgagaccagcctgggcaacatggcaaaactccatctctacaaaaaacacaaaaattagccaggcacagtggcatatgcctgtagtcctagctactcagaggctgaggtaggagaatcacctgagcccggtgatcaaggatgcagtgagccatgaccacaccactgcactccagcttgggtgacagagtgaggccttgtcacaaaaaaaaaagaagaagaagaagaattaggagatactagagccatagtgattattttaagaagtactacagtaaccaaatgaaatgggtcagtactaatatgaggtaatagcaacagaactcatttggggaagaggtggtaggggaatgagccagatgggagagagattccagaaagaaaatgcagagcccggcattcttttccaaaaacataagaataaatgaaaggttaacatgtgtcagagaaggatttgaaaatcaaatgcttgatccagatacctttgtattaatactatctatagaacatctttgccagttacatgatttgctgtcttttaatggccagtttgtgtgatactgattacrtgatcattttttcatttttatttactttcataatcttctttattaagttttactatcattggagctattctttagtctcttatctgttattgtcggtgccttttaattttgcaattttactgttattggagacattttttgtctctcatctgttattgttggccccttttaatttgcaatattagtctgatttgacttttgccttttcatctacctcccatgttctagacatggcttgttaagtaggagaacacacacgcaacccaactcttgtgaagggaaatacagtgtaaggttacaaagatgtctcatggtaattcaaggataggaagtgcagcttaggcaggcatcgtgggaaccagaaagctaaaagataccttttttcttaaaagagtagtgttgttctttttattggcctctctgcttcttgagacacatctgtctatgcctcctcactgtcccagctggcttcctccgtcgcttattccttttacaatggctcaaacgcattctccattttttaaagctctttcagctcagttccacacagctcactggcagcttccgtctttgtctctcattttcccaagaaagggaatctgattcacccacctcacttttcartccaagtcacagaatccttcctgagccattagcctttcagctaaaagtaataaaaacctgattcaaattggctaagaaatgaggaaatgtattatctcctgtaacaggaaatccaaaggaggggcaacttttagagttgattggagacgcaacmgtgtcaaggagacacaggttctttgcatctcctcactctgccagcctcagctttatctttagtaaaatggctacagcaatttcaggtgtcacatccagatattcagaaaaccgaatggccatttcttcctgtggctttttcttaggcgtgagaaaacattttcctaaaatctgccctgaaaatgaacctcatgtttcattggctggatttgcagttagagacctgtttggattaataagctctgttggtgagaaagagaaaccaccaaaatataccatttctatacccatcactggccagggggaaggattgccctgagacgaaatcaggcccatttgtgaagttgggattgaggtcattttcctcggtggttaatgaagccttgtatctggagggtggaagggaatggcagtctactgatggggtcccagaaaagcccttaggtccatatgcaccgtgtataagctcttcttctaaaatgaaaattactgtgagaattttacctgaagaaaattgagtttactgcaactatctttgggtcaggtgtgtacctgtgtagtatatattacatacttagtgtttatactatgcatggtgtaaaaccaggccactttgtgctatgagtgaggactccccaaaagggcatggcagacaggtaccctgaaatatatctggtatatacctctttgagatcagtcttctgaaatcttatagatacagtccttcctcagattttccataatgaattatattgatttcagttaaacactgcttcaattttgtcataaaaaatatttagcagtcagtcacatgaaatttttacaaagtttggaatatcttttagggaaaagttgcttggccacaatgactgtaccatgtgagattatagtaccagtaaagacatactttccaaaacttgaacctaatggatttaatatccaagctgtgaagttggctttttttttttttttttttttttttagttcttsttttgtttaagagatgaggtcacactgtagtttcccaggctggatttgaactcctggcctcaagtgattctcctgcctcaacctcttgagtagctgggattaaggcacacaccaccgtacccagctgagctgtgttatctaatatgactttcaggattcctagtaaggagtgtcacactttgcatggtatcttgctgagtttgtgcataccagtcgagatgaatctaaaaatactgagtatatactctttctctttgcttggtacagcatgcaagcagaagattcaaaatacatcattgaagaataagactatttatgcatcacaaggaatatactgcactaggttagaagcccagaaagttcttctttttaaagatgtatgtcaatacccataccagcagtttgagattgattgactgattgattttttataagccttattgctaacagagagaagccacagaatggggaagagggaaaagaaaaggaagcaggaagagcactaaagacagctgtcttcttttcagttttaccaagagccctgatgcctacttttgaaaatggttttagatacttctataagccaatatttcctacatgttctacagaagccagtccctgaccagctcctttaaaaaggattctgtagtcacaaataccatagtggaaaatattaaattcttcttctgggtatttacactgcatgttagtaaattaaaagactgagactgtgtattagttgattctcatactgctattaggaaatacctgagactgggtaatttataaagaaaaagaggtttaatggactcacagttccacatggccagggaggccttacaatcatggcagaaggcgaaggaggagcaaaggcacctcttacatggcagcaggcaagagtgcatgtgcagaggaactgccctttataaaaccatcggatctcgtgaaacttactatcatgagaacatcatgggaaaaccctgcccacatgattcagtttacctcccaccaggtccctcccatgacatgttgggattatgggagccacaattcaagatgagatttgggtggggacacagccaaaccatatcagtstgtaataaataactcaaatttctttaatcctatattttccaaactttcttagtcaccaaatgtctcttttcacatacatcttttaacatcttgcagggcacactgggaactgctaaggtcagagaggagtgttcttgagcagaggaatgacattatgaaagcagtgttttagtcaaagtaatgtatataggatgattggagacagaagagattggaaacgtaagatcctgtttggaagctattggaatattttgggataaagaagatgtcacagatggataataatagcaaatattcattcgtcaattcagcaaatatttattaagcactaactatatgacaagcattgttccagatccaggggatacagagagaaaacagttcaaaatccttgtccacattcacatcctaagmgagggaaaaaaacagtaaaacagacacatatataaaatggcaagtggtgaagagtaccaaaaagagaaacagagcagggtaaaggggccaggtgcggtggctcacacctatagtcccagcacgttggaaggctgaggtgggtggatcgcttgagccgaagagtttgagaccagcctgggcaatgtggcaaaatgtcatctctacaaaaaattaggcccagcacagtggctcacgcctgtaatcccagcactttgggaggccgaagcaggcagatctcttgagctcggtagtttgagaccagcctgggcaacatggcgataccctgtctctacaaaagatacaaaatagtagctgggcatggtggtgtgtgcatgtagtcccagttacttggggggctgaggcaggcagattgcttgagcccaggagatcaaggctgcagtgagccgtgatcatgccattgcactccagcctgggagatgggcgagaccttgtctcaaaaatacaataaaacaaaatatttttaaaatagcaagtggtgaagagtactaaaaagagaaataaggtaaaggggccaggcacagtggctcatacctgtaatctcaacactttgggaggctgaggcacgtggatttcttgagcccaggagttcaagaccagcctgggcaacatggcaaaaccccatctctacaaaaaatacaaaaaattagccaggtgtggtggtatgcgtctatagtctcagctacccaggaggctgaggtgggaggatcacctgagtccggtagtctaggctgcagtgagtcgtgatcacaccactgcactccagcctgggcaacagagtgagaccctatttcaaaaaaaaaaaaaaatagtagggtaaaggtagagtctctgaggtggtggttagagggagacctttctgatgagtggtcatttaagcagaaaagttaggaattaagttaggaagaaagcaatgtggatatctaaacacagagaacagccagacgaaggccttgaggtcagaacccaagactagagggtggtagagggtggtgggagatgcagggaggcgtggtgaggcatgggaagggacaggatatggttgagatcacatggggtctaatagaccatggtagagacttggaattttgtactgagtgagactggaagccagtggagcattttgagcagagccgtgtcatggaaagactcattttttcagtggttactytgacttctgtgtggagaacagactggagtggagctggagtagagagaggagactggttaggagcattgccacagtccaggcatgagacgatggtgtcttggccttaggkggtcatggtgcaggtggtaggaagcaagagcttcggggtacgttttcaaggtaggagttgacagaaatggatgacaccatgctccagattttaagtgtttaagcctaattatttgatccttataaaaacctttgggaatggatagagttattatcactgttttgcatttgaggagactaaagcacagaaaagtagcttgcctgagatcatacagccaataagtggtggcactggatttgaagcttcagatcctgtgctctaatcattatgctacaccctcccccactccccactctccagggaggaagtagaaggaaaccctgggccagggccaaatagcacataatgcctctgccttccaccttccagccagtaagtgcaaaattcctaagaaatgaaatcaaaatttctcctctttaatcagcttttaaagtgttgacctagttctgcataaccttgtccttttctgtatttttctatggaacaatttttggaagactttcagagttttggggggcaaatcgtgtcttctatttttcaccaaagggaaagattggggcagggtaaactggtagtgggcagactggagtgtgggagagcatgaaataagaaccaggtattcggccaggcacggtggctcacacctgtaatctttgggargcygaggcgggcggaccacttgaggtcaggagttggtgaccagcctggcctacatagtgaaagcctgtctctactcaaaatacaaaaattagctgggcatggtggcacaygcctgtagtcccagctactagggaggctgaggcaagagaatagcttgaacctgggaggcgaaggttgcagtgagccaagatcgcgccactgcactgcagcrtgggcgacagagcgagactccatctcaaagaaaaagaaaccaggtattctttcagggttaattctgacagttttttgaaacattctattccccccatcaccaccccccccacacacacacctctacacccctcccattagagaaatgggatagcaatcaaggcattgtacactgtcttttgtttctctgcctaagatggcctaactactttgattctgatgggtttagttggaacagcggaactcttagtactgctgatcgtatcaccctttcttttccttttcccctattagcttgggagcttggggactttagagcactttcaggaagggagaagacaattctaagaatttacacatttgaagtatttttttccatttacagtggctctaagctaaccaagtaaatcaaggttaaattaaatatctcccacaatcctacagtccactgaactctgcttctaaaatagtggacttggagaatggttgaagtaagaaaggaatggatccagatgctgtaggaatttggtaggatttggtgatgtaccagggatactatggggcaagtgtagaccagggatgggatggaatgatcacagtaaggccagagtgggtaggagatattagaatcaacatttagaaatgtcagaagttcaagaccagcctgggcaacatggcgaaaccccatgtttacaaaaaaaaaaaatacacacacactagccgggtgtggtggtgtgtgcctgctgcagtcccagctactggggtaggaggtgtgtggtgggggtgcttctgaggttggaggaaagtagagacagcgaaaccctgtctctactaaaccttgagctcaggagatcaaggctgcagtgaccgtgattgcrtcactgcactccagccagggtgacagagcaagaccctgtctcaaaaaaagaaaaaaaaaggaaaagaaatatcggggctgggcgtggtggctcacgcctgtaatcccatcactttgggatgccaaggcgggcagattgcctgaggtggggagtttgagaccagcctgaccaacatggagaaaccccatctatactaaaaatacaaaaaaattagcgggatgtggtggcacatgcctataatcccagctactcacgaggctgaggcaggagaatcacttgaacccgggaggcagaggttgtggtgaggtgagattgtgccattgcactccagcctgggcaacaaaagcaaaactccatctcaaaaaaagaaaaaaagaaagaaagaaaaagaaaaaaaaaaagaaaagaaatattggaaaagcactaaacctatggttctgttttccatggactttggttctccatgcattgctctctaarttactagaccaccgttaagggtcagaaccttggagagttccaggcagtagacgctttacaatgtgtgtgactactgcactagcatgaaatggacaggatgaagctagtataaatgatgctgaagcagacctctcatgtgctttctgttgaaatctccaagtttaaaaggctgccacctctacctccccgcaacctcaaggagatgttggtgcagtgaaatatttcagtccatcttgtgaaagaggcatgaaatcagcatagttaccgtagggtttctgttaaattttgatgttgtagaggggtgttggagttcctttcaggttctgtgctttctcctgaggtcttttctaagggtatggtattgcttctctgttatttcctgacctgttataaaattaattggaatctttgtagggttggaagagtgagtttgcctaaatctacccttgtcgttttctggtaagtgcttatatttgtaacagaaagattaaaaaaagatactgtatgttatacagatagtttgtaaaagctgaaggtaagtttaggctgttgctagccataacagacttttgcagtataattaagttaaggctatctctgctttttaccacctctaatttcagtaatcttgttttgttttgtggcactaaaataaatctagacacttaaattttcattgttacaatctctttttcttcagttttaggaaaaatgatggttttcacatcagattactaaatttctgatgctttgattaaaatttcatcatactgtttttaaaaatgtttaaccatctgcatttatgatgtcatatcaggctaaaaataggaacttgagtgtaaatattaggaaacacctaactagcaaatcctgggcataataatagcagagagcagaaaattatatgaaaatagaattttttgcagataaatagtcatgacatatttacactctgtattacagttccaagatgtagtcattatcttttttattttattttatttatttatttatttatttatttattgagacagagtctttttctgttgcccaggctggagtgcagtgacacgatcttggctcatcgcaacctccgcctcccaggttcaagcaatcctcatgcctcagcctcccgagtagctgggattactggctaatttttgtatttttagtagagatggggtttcgacatgttggccaggctggtctcaaactgctgtcctctggtgatccacccatcccggcctcccaaagtgctggaagaccatgcccggccgtagtcattatctttttatactatttgagagaacaggagcattacagtaaaattcctaagtagccaactgatttgcagtgccagaaatgaataccgatcctaaaaggtgtgtgatgaaaaggcagtctccagcattacattagcatttcaattagattttggagatgatttagctatggataacaataatagggatcagtgagaaatatgtaagatttttaaatgatactgatcaatagttattgttggttatctttttttttttttttttttttgagtcagggtctcactctgtcgcccaggctggagtgcggtggcacaatctcagctcactgcaacctccacctcctgggctcaagcaattctcctgcctcaccctcccatgtagttgggattacaggcatgtgcccaccacgtccggcttgtttttgtatttttagtagagatgaggtttcaccatgttggccaggctggtgttgaactcctgacctcaagtgatctgcccatcttggcctcccaaagtgctgggattatagatgtgagccaccacaccaggccactgcaacacatttctatgtaatgtttaagatcactggggtaaggccatagttgtatgtcagtggtagatcttgtggcatataaataaattatattgaatttgagagaaagagaatagataacaattaattcgagaatgacatttcaagctaatttttagaatatagaaaatgtagattttttttctttattctattcagcaaacattaagtgcaagtcctacccagacaggagtcaggaaaggctttcttagtgagatgatactctgaaattagtcttgaaggatgagcaggaattcttacagtgaggagggtggagatattcagagggaatggtaagggctctatgtaggaagctcytctcagtatggaataactaaagtaaggrgtgtgtgtgtgtgtgtgtgtgtgtgtgtttgtgcacacgcatgcatgtccatccacatgcacaagggaaagagagacacttccgtgtaaatgcttaaggattcatcacatttttgcagcttcatagtattccatatagtatgattatatgccataatttatttaaccattcctcttttgatagatatttgttttctggtttgggctatttcaaataatgttgcactgaacaaacttgcacatgtgttcttgcaaacttgtgactgtaattctgtgtcaagggttaaggtttggttttggtagtcaccattgataaatttgagtacacaccttaggtctgagctatgaccagtcacacttcattatattttataatttttgagtcctcatctattttgatcaaattaaagatgtcttcagtttccgrtcatatgggagcttattgtgccatggtaacaactttggcttgtagtccgagtgacgtgggaagccattggaggattattggcagaggactgatagaactgtttctaaagattgctctggctactctgtcaagaatggaagacagagatgcaaagataaaaggaaaaccagttaagaaactattctaatagttcaggcaagggataatcgtgacttgcactagaggaggattgatgcagttcaagaaaaatggtgggattctggacatgtcatagttaagagttgaaaggatttgttgatggattggatgtggagagagggcagggtgtggagattagctctaagattagagtggcatcatagatatccatgtggagttggtgaatagacaactgatagttgaggctacacatcagggtgcccaatactttattaatgaatgaatagctgatagataattcaagaaggaaatgtataaaatgaaagttttaaagagaacaagaattacagttaactcctttactatgactcacatggtccttttctctrtgcttccaagcagatctcattttgactagaatacaactaaactggttaagagtttggacagggtgagagagagagtgtgtgtgagcatgctagaggaaatacatttgtatgtgtatatttatttctctcagaatctaagtgtctgtctctcagaatctaagacttgacgtcagaaaaattgttgctactaatctatgtagagatattacaactttatggaattgtgtttaattaaaattattatttttaaaacttcttcattttaacttccatataaaattagaaatgttttcccaaaatcaggcatggtggtgcatgcctgtagtcccagctactctggaggctaaggcaggagaatcgcttgagcccaggagttctaatccagcctgggcaacataatgagacaccccccctcccgccccgcctccatctcttttaaaaaagaaaaaaaaagaaagaaagaaagaaaagttttcccacaccaaaaaaatactaatagactgagttggaaaacttggtaaacaagcaattaggttgttactccttagctgtcttctggctgtggcaatttacccagtatttagactttttggcctttagaccctgacttggtttgcctttcgaatgcatcatttccttaaccccctcccatcctctctgatcttggctccctttctcactggccatagtctatctttccaaaccctgctccatattttcagctcctaaagtatcttttctaccttttttaatacttttttaattgatacatgatagatgtacatactttcagggtacatgtaataatatattcatataaattgtaaagatcacatttgtgtaattgggatatctgtcaccttaaatatttgtcttttctttatgctgaaaacatcctattataattattctcctccgactattttgaactgtacattggattattgtaaattatagtcaccccactgatctatccaacacyaggtctcatttcatctctcaaacggtgggtttgtgctcattaatcagcctctcttcatccctcctccctgctgccacttttgcgcctttaatctatgtgttatggggatgtccatatttgataaaactctgtcccattcatggcacaagctgcaacctaactatagtagtttaaaatactgtgaatgaaatatttgtcatacatctgcatgattaaattttcttcgtgaaacgtaaagccagaaactcagtgcatgtgagttataaatccgtggtggtactgatagcttaatcctgcatatttcaaagaatcaaatccaaagggattgacagatcactgggtttttccagcttgtctggttaatagacacccttatttatataaaagtttaatggtccgcaaaatatttgaatagcacatgaggtaaactgttgggaatattagtgcgtgatgaactttaaatttaaagtagagaaagttcagaatttctgcaaggcttgagctcctcttggatttatgcagttctaacaggactaagtatacaatcaaaattataaaagaatcataattttttcctttttgatggttggcagagctagctggggctttattttggaaaaaaataattgaactggtttttagttgggggcatgggcaagagtgggtaccccaggcaataaactcctccaaggggctgaaggctagggctgagcctcaggtgggtttccttttccttatgctcccctgcacagctgcctccctgacaggctctgggacagccacagaagggggtaggcagggaggggctgccatggctgttcacttggacgggacatcagaggacttagacatcagcttcccatcatggatcttgatcttcttcacaatcaggtccctggaggagctggggcagctgaaggagccggaacccccaccagaaccaaagctagagcccaggccatagttgagaccagagcttgtgagacccctataggcccagctcagcccacctgagtagccactggtggtcttcctatggatactcatattctgcatcccagactccagccagctttccttgccctgcagcagcttgcagtaggtagtgatctcgatgtccagggctaaattgatgttcatgagctcctggtactcatgcagctcccacaccatgtcctgattggcccattgcagggcggcctccagctccaccagcttggcattggtgtgcttaatggccagctccccacatactgctcagcatctgatggcagcctccagggaagccctcggtctctgaggccctttgctgatgttctgggtcatctctgagatctctgtctttgtgcaatgcaagtcatctcagtgctttccagatagctcctgcaactcctcatacttgatctggtacatgctctcagccttggcctggctgtgattggagatgtcctcatactgggcacagaccttggtgatgatgctgtccatgtccagggagcagctgttgtccatggacagaaccacagatgtgtccaagatctgggacagcagctcctggatctccttcatacagctgcttgaggaagttgatctcatcagtcaacccttccaggtgagactccagctctgctttgttcatgtaagcttcrtccacatccttcttgatgaagacaaattcgttttccttctctgtatgcttgttgatctcatcctcctactttttcttgaagtcctcaagctgcccctgcgtatcaccaagctccacctccagcttcagcttctctgacccagagtgtccagctgccaccaaagggtgttgatgtggctctcgaacatctcatccatgttgctcccagccatcttctgctgctgcaggaggctccacttggtctcaagtgccttgttctgctgctccaggaaccacaacttgttgatgaaggaggcaaacttcttgtcaagggtcttgatctgctccttctcctggttacacacggcctggatgttggggtccacttccagcttaaaagagcttagcaggctctggtttaccataatggctgtgatgcccccccataccactggcctcagcatagcctccactcagacctatgctggcacttaggccacccaggaagctgctgctgttgcccaccaggagaagctcaaggagctgatgcaggcaccaggcctgctcgtggaggagcagctgctgaaggccaaggggccagaggtggacaccttgtaggacttctgggtcaccctgatggacacagtggaggcaggagtggccaaaccagacagagatttgaggaggatcagagaagctacttctagattataatttacttttgattaacacctcataataattggatagttcaatagcaattagattaaacatgtcttaattcctagaaagcaaaatgaatttaccattaaattattttttttttccttccactagaagaggaaggaagatggtggaaaagattgattagaaaggtaggtcagagactgtcaagaagctgctgactaaacacctacaaggtagtcagaaaactcttactctgaaatctgtagaaacaacaccttcaagaggatacaaggacttttaatgtctttcaagtcctagaatgatgttttaactttggtaggtccagacctttgagcaaaggacgcagagtaagacactttctaaactctcttgattggaccactattcgtttaaaatctggctttaacaaaacttaagggttagtgagaaagataccaaactgtatttttgagtactatattttaaacttgcctttattttaaactttgtgcatcagcattacatggagtgtttggtttccctacgaataatgattggaaacccatgctaatctcttaactggttaactacacttgtggttcaagactaaccacttaaaccacctggagacatcattaaatgtaaatattgaatctgcaaacccaactctatgaagtcatgtctttttgctgaatatgaatcttttaaaggccacagaagaaaaccttgctcaagactacctgtwcctctgttagtcagagtcattatcactaagttcttagaaccagcaagttttagaaccattgtcagtttcttttgctgttgttgaaagcaacatttattaaatagctacatggtcacaaggtttgatatccattctgtcatttgattgtatttctgcaactctgagtactcctgttttggcacattactgctagctttgtgaaatgtcaggtcttgttttctgaaactaccataggtggagatccaggctctcctgccttgttagatccctgaatactgcccaaactggagctgtttacctttgactttcctgtgggcctcttggatttgttctgttctggcgtctagcaatcagatattttctacttaggatgttgtcctttcagcctcactgctgaatgagaagcaatttcagagctgccattccatacatctaacttctctccagtcctaaaacaagtgccctcagaatttttgtactagaaattatagggtaagagattagataaaaataagccaaaagaatatttgaagtcacatttttatataaaactgataacctttgaaatattaatgttgaattaaaaagcatcctcagagaggctgggcgtggtggttcacacctgtaatcctagcatttgggaggccaaggcaggtggatcacctgaggtcaggagttcgagacaagcctggccaacattgtggaaccccatctctactaaaaatacaaaaattagccaggcgtggtggcacgcacctgtaatcccagctactcgggaggctgaggcaggagaatcacttgaacccgcgagacggaggttgcagtgagctgagatcgcaccgctgcactccaaactgggcgacagagcaagactccattaaaaaaaaaaagaaaaaaagaaaaaaaaaagcttagaggttatgtagttatatttagaaacaggcctacaaagactaaggtgatggcccaggagctgagaacagagcccagtgtttttaacgttagtccatgttgttgtggagctatcgtctttcttttattgctcccttgatttaggagttagccacaactaacccctctgtctcttttatctccctatgtttctggtattggatcatatgattcttcagaaccatgcctacacagttgtccccctttcccagtattgaacttggagataggaggcagtgggtaagtctggtgggtgaactggcttggaaaaagtgctcaagtgacttctttctgagaggaaacttgagactagtcttttctacatcatcttacttaatggggctaataattaatgtagtccgcatgaatagttcccaaccaaatgtttttcaaagccaatcaggttggtcttaatatctaaagatgtcatccagatgtgtaaaaataatgcatgtataatagttaaggaacataaaataccacaatcgtaaattgtgtagtgaaaatgttcaaaagatgtctttgtacaattgtgagttttatagctgagtaaacttgtttccaatattggaaattgtataccagtcatatttctactgtgataatttttttttttttttgagacggagtctcgttctgtcacccaggctggaatgcagtggtgcagtctcggctcactgcaacctccacctcccaggttcaagcgattctcctgcctcagcctcccaagtagctgggatcacaggcgcatgccacttcacccagctaatgtttgtatttttagctgagatgggttttcaccatgttagccaggctgatcttgaactcctgacctcaggtcatcatccacccacctcagcctcccaaagtgctgggactacaggtgtgagccaccacacccagcctctactgtgataatgttacataacaaacagcctctaaaatttagtggcttacatcaacagatattctttgtctatgagtcatttagggtgactccatttcaggctatataattgggttcagatctactcctcatgtccctcattctacatatgcttttctcatggtagatgatagaaacataggagatgaaatcaaagcacacacattctccatgaccaaaaccagaagcaaggcagggatatgcaccacctattctactgggaggcattacaaagtcacgtgacaaagggtatggataaatctcttacaggcagggagtgaagaaatgggaaaagtaatgtactacagcagtatttcaaccctgtcaattcatcactgaattcaccatcctctgtgatttctaggtgagcagatagttttggtttttgcagctggcccttccctttcactgttttctttcttttctctgacaagtgacttcacgatgtcattattacttactgtgtaggacctcagtaaacacatcatagtcaagccactagctaataaactagggcttgacttttcatgaacttgttttcccaagaactttgatttactagttagctaactgtattgaaaaagcttcattgaaaaattgttcctgcttagcacagcttaatctgtattcttgggttcccagtgccaatttttttctttcttccaatttttatgttaggttcaagcgagtacatgttcaggtttgttacatgggtaaattgtatgttcctggggtttggatatacaaattattttgtcagtcagctagtaagcatgtacctgttaggccatctttcaaccctcaccctcgtcccaccctccaccctcaagtagaccccattgtctttcttgccttctttgtgtccctgtgtactcaatgttactcagtgtttagctcctacttagaagtgagaacatgcagtttttggttttctgtttctgctttaattcacttaggataatggcttccagctgcatccatgttgctgcaaaggatagtatttcctcctttttatggctgtgtagtactccatcatgtgtatgtattatgttgtctttattcagaccaccatttatgggcgtctaggttgattccacacttctgctattgtgattagtgtgtaatgaatatacacatgcatatgtctttctggtagaatgatttacattcctttgggcatatacccagtcatgggattgctgggctgaacagcaattctgttttatcttctttgagaaatctccaaactgcttcccaccgcagctgaactagtttttattcccaccagcagtatataagcattcccatttctccacagccttgccagcatctcttctttatggactttctaataacaaccactctgactgttgtgagatggtctctcattgtggttttgatttgcatttctctaaggattagtgatgttgagcacatttctgaatgaaccatccagcttggcttcattgtttttttattgtttcacctgaagaacttaaagaaagaagtaaaagagatatatttgccctttgatttatgaatgaatgatgatgtcttagatctcaaatatttgctaaaaatgtagatacctttagagtacttctatacagaaaccaaaatattaaaattaacaaatctgcttccttcattagtatctcattctccaagtttgacatttgaatcctaattcctaaaaattgaatgttttggtaaatcatagtctgttctttagactacatttctttccttcttaagaaataattgcatatcaatatagctatctggatgtatttatctgtgtaaagaatgtgttagaagtgtaaccagattgcatttataaatattattataacactaccataaatagagtaaatagcacacaatatcagtagttcagcttagagtgactcatttgtcagtccagtcatagtcatcacttagaaataattcacaacagactttgaggtcctggagcgatgataaaaataggtgggatgaaagtacctatttggggaattgtctggaatgtttaataccatccagatgacatcatcataacctggtagtattaaatgtgactctggcactttcccaggctattcagtttttgtttttgtttttaattattgcctaaaaaaacagctctgggacagttaatgaaatgttactacatatattgaaatcagtaagaaaacccagctattgttctggaattatattaagagagttctgatgtttcagacagtatctcatcttgtctgtaagccagtattgcctcatgacatctcttctattattgtcttgaagtactgattaaagttgttttttgttttttgttttttttggagatggagtcttactctgccacccaggctggagtgcagtggcatggtctcagctcactgcaacctccgcctcccaggttcatgcgattctcctacttctgcctcctgagtagctgagattacaggcgtgtgccacaatgcccagctaaaatttttttttttttttttttttttggtatttttggtagagacagggtttcgccaggctagtctcgaacccctgacctccagtgttctgcccacctcagcctcccaaagtgctgggattacaggcttgagccaccacgcccagcctaaagtttttattatttaatcttcttatatgtacttgtttgcattggggactgaattttatttccttgtggttcccacattagcatttaggaccattgtcatagaggtgcttaaattttttgttttaatttctgcttaatgggactgtacagattattaacctgagtttacagtttcacattatttttcagtgctttttacaaatgtaaattagatcaagtctctcatctacttaaagtccttaagtggctatcaatattttaagatacagacccccttgttaggcctagaaatcctcgcttagtttgactttgacttcttcagtttcatcgtacgccttcctccttccctgttctttatgtgttagcctcattggtctcctttcagttttgtgaacgtgctgcacctttttttagaatgcttttctcccagttgaaatagtatcttcaaaaagaagcctttcatgatcaccctgtctacagtggcctcacccagatactttccagttgatcatccctgtacctctaacatttattgccccctgaaattgtaatgtttgtctccttattcattgtctttttctccactcaaatagaagtttcatgaggccaaagtgccaagcatcgtgagagacacaaataagtcactcaaatatttgtcaaatggagtttattcttcaaactcaagtagtgtaactttctttcttaatttgattccatgagggagaaagcactgtgctttgagattgacctgaaaaaaagtcaggacagttgagggccgtgagttctgtgctactgtgctcatcactcttatgtaactgattttattctcattgactgagatatttagggtgctttttaagatctttacatatgtatgaaaactggcaaaaaaaattatgattttctgtacatgtttatcagccttgatttgccctattaaatatttcacagttagaattataaatttcttgctaatgtacattttatgttgtaagtactaggctcttatttgatgctgcagacagcatgatattcttacgtgacaggaaaaaaaaattgctatgtgtgggcagaagccagtaggatagatgtggaataaaaccccctttaagggttctttgccatgaagtgccagttcatgtgcagagcaatttaaggtatgactctcccagcaaaaacaaaatttggggttttttactgacaaatcagagtaacccaaggcctgaataacttgcccaacatgacacagcagtgaagaatagagcctcagttcaaaatcaggcttgtctgactctagaatttatttcctactacattttgaaatcttcctaagtagaaagaaatctagaaatgtattttacttacatgttttattaaagatgtggaaaatgtttgaagtcatctgtttgatatctgttactgtcatcatatattacaatctagtagcttctgtgtgggaattataaataattttaggaaagtttgactatatttgcctttaattaaaccagaaacttgaacatatagtcatgaaagtcaattgtaaataaccttgaaaactttcaactatgtaactaaaaattctcagaagaccatggtttgcttcagtagttgcacatagcttgaagaactgattcagaatctaacagatgcgaacagcctaatgtagggaaattgctgaaagcacaattaaattgccagagtatacacaagcaacaatttccttaatttttgtcgaacacacaatttgaaatgattatgtgcttacaaaaacaaacagagaaaagcaaagtgttttacaatctgtagttttatattcataaatatatctcaaggttaaaagtttaatattataaatagtattataacctaatatttaaaattagggtaacccacgttatcctaattaatacagaatcagacacctaatccattttctgctagtgttcacatgtcgggtggtacatatatcagtgtgctaaaaacagttcaaattatttcatctaatgggacttcctttctcagtaatattccaagattgattggcaagaaccagcacaagctgagctgtcaagattgaagtcttgatctacaataaaaagggttttttttggctgggcacggtggctcacgcctataatcccagcactttgggaggccgaggtgggcggatcacaaggtcaggagttcaagaccagcctggccaacatggtgaaaccccatctctactaaaaataaaaaattagctgggcatggtagcaggcacctgtaatcccagctacttgggaggctgaggtaggagaatcatttgaacccgggaggcggaggttgcagtgagccgagatcacaccattgcactccagcctgggtgacagggcgagactccatctcaaaaaaaaaaagcagtggggggcgtttcatagtaacatttttgtactgatcagaagaaaaaactgttagaggaaaagatgagtatagatttagatgtgaggattgaaaataatagctcttcaaaatattttaaagagagcaaattagccagttttgattaccttattggagcttcatcattcatggtggtcatattcctgaaaacactgtttctcttcaaatttataactagaattgtgaagtctgcagatttgtgggttaggacctcttgccaggatttaattgagtttttttttaaaaaagattctttaagcataaaatattaaattggcatcaacctttttactttactccaaaattacaaaccgatgaaattacaaattaaatccttttaacataatattaaatatttaattccataaattattaatcttttgtgctgttattcagctccatctttgaggaatgctagtaatttctgactgaagaacatgaggcttaaagatagtcatgcaaagattctcacacccctgagacatgagggaactcagctgtctgggtttcctccacttctttgataagatgctgggaaggctgcctcttatccctgggggaagagaagggataccactaagcagtgacgacgatgatgatagcaactaacatttattgagcatttattatgtatcaggcactatgctatgaaatgtacttatctataagtgcagactgaaagcattgattaattatactatatacataactttaatctgtataatttgaaatctgcttgttggggcatcagccttcagggttgatagaagatgactcttgaatttttgaggttgactgactgtaagatgatagttatagtgacttagaaggtggtaatgaagtttataaaaagaaagatgagctctgtcttgataacattgcagtggcagaaagaaaatctgtataagtatataattaggtagctgttgaaatgtcaaatatcattggcaaatttggagattattcttacaaaaattctaaggaatgaatgaaatctcccagggcagagtttcttaacctggtattaaacctaagattttatagacctccttgaaattatatactaaattgtatatgtgcatgtgtatctatgtatcatttttattagactttcagtagggtctgtgagcagaaggcccaaggccagactgttmaggtatctcttgactggggtaatgaaaggcaccctgagacaggcactaaatgagaagattatgaaaaagaaccaacatcattcagctaagaataaagcagatcaaaggttagccacatgaaggtgatagtttattttttttagaaatgatatttcaatatgttgcctatgctggtctcagactcctttgtagtcatttattatggtgcttgaatcatgaaagaaagaaaaaagaaagctgggaaataaacacacaatcttaatggtcatcattggaagtggctagcatgccaactccttactttgaaaattggtacttaaagaggaagaattaagcattcattcttccaacctattgaagtttttttcagaataataactctagttgacaagaaaaaatacttctctacagaagaatttcacctaataaatgtggcaggaatcaattaaaaaatcacaattttgcaacccctaatgaaatcattgattcatgtaacagccactaatgaatactaaaactgttagtgctgtggttctcaaagtcaggcccctgttccagcatcttaaatatcacttggatacttctttaagaaatatgaaaactcaggctctttccaaaaccaactatgtcagaaactctaagggtaagtcccagtaagccgtgtgttaacaagccctctgagggttctgacaatcactggagtttgagaaccatgatattaggagaaagattgctaagaatctttaattgaaggatcaggctgtcactcccagtacttactgaccaatcttagcactcctaaaagaagaatcagatgttatattcctcctagtagaggcacctgtgatgtattattgccgctcccaaaagatattaagcctgaatctattcagtcctttatagaaactataggagatggaagaataagttaaacagtaatgtgaggaagcaaaggacaaatccagaatataggatgaccgacccagtttcttcatgacagtggcataggaaaaagggggagggtgagagtaagggtactgttccagcgtaaaagggctccagaaacaaaataaacaaatataaaatgttcatcttggtttgtatcctgattcaaacaagccaactatggagatttgaattcagattgggtattagatgataataaggaattgttaattatgttaggtttgataatgatattgcacttatgtaagaaaatgtcattttttaagagatacatagaaaagtatttagagtgaaacaaattgatgtcaaaaattgctttatgttacatgaggaaaaaaaggataaatgaaacaagtatgacaaaatgttgataactcgaatttaggtgattcattatactatttaatatgattttatgtatgtacaaaactttcataatagaaaatttttaaagatacctgtgaaataatgtatttattaggacatttctacctatgctaaccttcatcacagtgtattgtaattgcctgtttaccttgcctgtgctagtatttctcagactatcaaactgtcaatattgagtttaaattagccagtctgttgcagaccatgatttttgtaaaatggcagtaaaaaataatgaccagaaaagcaaaactggagggggtgttgacatacaaaatataaccttaaaagttttcattattaaagttaacaaacataaaattatatttcacttaacaattagaaccaaaataaacataggaaacaagaattttctaaaaactgtatttattcatcaaaaatacataagcagatatgagagctatctggctgtgacatctgtcaccccactgatcgccagggttgattyggctgatctggctggctagatggctgtccccttcctccctcacccctccatgtgtgtccctcccaaaactgcatgctcgttcgaagaggacaaccatccccaatagaggaggaccagtctttggtcgagggtatatgagtagctgcactcctctgccagaatctccaaacaagctctcaagaatacacacataagcagttagtatagacagttgctattacattcataagtttgttctgtaaataaggtttttattttttatttttattatttatttaatttatttatttatttatttttgagacagagtcttgctccgtctcccaggctggcatgcagtggcgtgatctcggctcactgcaacctccacctcccaggttcaagcgattctcctgcctcagcctcctgagtagctgggataacaggtggccgccaccatgcctgactaatttttgtatagttagttgagatggggtttcgccaggttggccaggctggtttcgaactcctgacctcaggtgatccgcccgcctcagcctcccaaagtgctgggattacaagtgtgagctgccacaccagcccatcaataaggtttttaatgtgaaacataaatgtgctttttgtatgttaacttcaagaccatgtgcgttaacttgagcttggattgtgttccttgaaggggttgatgtatgcctaaacaaattttatttgcagccacatgtttctggctcacttacttctattactgatttctcagcagatgttacagttttcaaggatgcctacactgcagaaatcataaagcatggggaagataatagatacactggaatgcctgccgagattttcacctgaagagtgaaagtgccacttctctaaatagtttgtctctggaatttagaccatttttctcacactgtgtgtgagattacatttactgataggtgatgattctgtctttacatggtaactttagattcagatatacaatgcctttgtttttcagacagtgccttcctgctgccacgtttcaaactttttctttccccttgcctgtggtactcccaatttggactgatagcttcaaaaaacaataactatagattccattgtgcttcctaggactcattttgtagtcagtagtttggggtctctttctatatatgtaaacttccactcattcacattaaatctgttagatttctctgtgttgccaaaaatctcaaaaatctttcccactaacctccattgactcagcactttcttcagggaaaaaaaaaagttgtctatttggacaagtcagtcatttgtccatgaaaaaatggtctcatttagcggtacagcttaaatagcattttgtgtggaatcttaggagagatattattaactactcaaaagatattctcttatagaaagcatattggcattcccctcagtaggttatatttgcccaaaggtccgtatttatagtggacttcccagctcatccagtgtagaagtgagcctctggttcgctcttatgcagagaaggcacattgtctacttgccagttcttaaacataatctgtctctgttggcagtttggacattttgactaaaaattatgcatacttgttcttaagtgatctgttctcccttagaattatggatagctactatgcaggttctgcaaaggcaagaggaagatgtaatgagctgaccatctcagtttctgatgccaacccataaaaaagaataaaatgcccacttacatttaaagcctgtaatatttagaatatggctaatagctaagtactaagaattatacatgggatgctttgtgcttatgcttagtgctaagcattgcagagtacaaaagagaataatatggttcctgtcttcaggaagcttaaatgaagttgtmtttaatacttcaaaacactatgtgttagagccgcagtccccaaccttttaaatggcaccagtgaccaaataagtggaggacaatttttcccaggttggggaggatgatttggggatgaaactgttccacctcagatcatcaggcattagttagattctcaaaaggagcattcaacttagatccctcacatgtgcagttcacaatagggttcacattcctatggcagggggccgggttcctaacaggccatggaccagtgctggtccgtgacccaggggttgaggacccctcttttaaagtaagggctatgtgtatacacatgtgtgtgtaccttgggatatttgtgatacacatgcagattattacatacagtgtgaggcagtgtatgataagtgacaaggtgttgagagaacaggttatttctgtttgaagtgaagagggacttaaggtcaaggtggcatttaattagagtttcgaaaggatggttagggtctggtgtgatggctcacacctgtaatcccagcactttgggaggccaaggcaggaggattgcttgagtccaggagtttgagcccagcctgaacaacagagtgagacctcatctctacaaaaaataaaatattaataattagccagatgtggtgacatgcatctgtagtcccagctgctcaggaggctgaggtggaaggattgattgaatccaggaggttgaggttgaggtgagctataattgcacactgtactgcaccctgggcaacaaaagagtgaggccctgactaaaaaataaataaacaaataaaataaaaggatggttaggatttcaacaggagtctagtaaagatgcttaatataataaaaaaattatgtcaaatattacagccccagattgactgttcagtcaccagttgtacaaattcagccagattacttaatccctctgattgtcagctttctcatctataaaatgggaattgagtaatagttatcatagaaggttttaggaagatgaaatgagacactgtgatatgaacatgctttgtaaagtataaagtattgtataaatgttagtaaattttatagtaagtaggccaggcatggtggctcacacctgtaatcccagcactttgggaggccaaggcgggcagatcacctgaggtcaggagtttgacaccagcccgggcaacatggtgaaacctcgtctctactacaaatacaaaatttagccaggcgtggtggtgtgcacctgtagtcccagttattcgggaggctgaggcatgagaattgcttgaacctggggagcagaggttgcagtgagccaagattacaccactgcactccagcctaggcgacagacaagactctgtctcgaaaaactaaagaaaaaaatacatagtaaatattgagaaggacatgagccaaaggcagggaatttaaaaaccagtaagctagtaaacactagagcagaaaatgtgtgcaggtgactgggaatattgagtcactcatacagttccctagttaggacaattatgttaaatttaaaagtctttcaagatttgtgttgatcaaaagataatttcagaggactttcaggtctttgggtgaaatgttaatgagtggtaatgtttagttttattgaattgatgtacatagtcacatagaattaatttttaggtaagcttctttattaaagattataacattgcataaagatagtatatcttgcaaaatatatttgtcttacagttgagagaatatggttgtcatgacaatgtttggtttagagcacaagtctgcatgttcttgggtagacgagaattctttcgaacagcacagggtgtgaattatttaagctacttccagttatcaccatatctcatgttacaggtggtttgtataataattgcatgaaaacagtgtttcagaaaagatgtctttctgtgtgacaagatgtcagagaattcatttatttcctctgttttacataaattttatttttttaaagtgtgaaataataagcttttcaacaaatagagagagtacctagacattaaaaaaatcatgttgagttgtactgtgaatattatgctgcttgctgctgactggtcttgggctgtcaccatttatttggactccagtgaaatatgattagaaatatttcttcaggctgggcacggtggctcacacctgtaatcccagtactttgggaggctgaggcaggaggatcacgaggtcaggagttcgagaccagcctggccaacgtgatgaaaccccatctatactaaaaatacaaaaattagctgggcatggtggcaggtacctgcaatcccagctactcgggaggctgaggcagaagaatcatttgaacctgggaggtggaggttacagtgagctgagatcacgccactacactccagcctgggcaacagagcaagactccatctcaaaaaaaaaaaaagaaaaagaaatacttcttcaaagtcaagaaacttggaaaacaccatattactttatcactaattattgttttttttaaaaaaaaaaacttttttttttgagatagagtctcactctcgtccaggctggagggcagtggtgcgatctcggctcactgcaagctccacctcctgggttcacaccattctcctgcctcagcctctccagtagctaggactacaggcacccgccaccatgcctggctaattttttgtatttttagtagagacggggtttcaccgtgttagccaggatggtctcgatctcctgacctcgtgatctgcccacctcagcctcccaaagtgctgggactacaggcatgagccactgctcctggccagaaaaaaaactttttgaggaaaaaaatttcctgactactaatagtggagttattttattttggtgactaattcttaatcctctcttcatttacagactatcttgctaatcatggccggttaaatgagtctgaagccaggcgaaaattctggcaaatcctgtctgctgttgattattgtcatggtcggaagattgtgcaccgtgacctcaaagctgaaaatctcctgctggataacaacatgaatatcaaaatagcaggtaactgggacacaactggctctaataagatccgaagtgagccactgcactcagtgtgtggaaacagacctgcaggcgcagattcagcagcatttctacctgatgacatcaggctatctcaaagtccattttattcatttccttagttctgtgtgtaattaaaagtaagggaatgagttcattattaatatacacaggtcagagctacatctggggtctgatgtgtccagattccattggcagggtttcggggtgctctgctggaagaggtacatttatctgagtgtcagagtgactggagaaaagacagggctggaggagtaatgctggttgctggtactctggcctgctctcctaattatgactgatggctacagccagaagcagagaaaaggcaaaagaagtgatggaggtagaatgagaaatagttgagacagaaaagcacctttccttgatctgatacgatagggttttgatttataacatgaaaattaagttgggtagagattagtttgcctgtttttctccttgccttttcacagttgtaaaatgttttattttatattctcagtctctttatttacatagtcaaaactctcattcactcaataaatatgtatcaggtactgtgctatgttaagtacaatatgatatgtggaaatcatttcacaacatatccatatataaaaatagcatgtacaccttgaatatacacaatttttgtcaattacattttaataaaactgaaaaaatacagtatgatagttgcaattttaaaagtatatacaaactgcatgggagtataggtgagggaacaagcagtctacctgaagagtcagggaagcttcacaaagaaggaattatttgaacttagacttgagagagaagttagagaagcttgtcaggaagataaacagaagcagaatgttgcaggcaggtagacagagattggaatgttggggaactgtaaattcaaaactggttacatgtaaaatctgtaggcatgcaggattgatacagggggagcagataagtaaagaccagaatatgaaacatcttgaatgccatgtcaaagattttatagtttattctgtaggtaatggggagtctagcctactgaaaattatagggcatgggtaggggtaaagtggaattgggataacatgattagatttgcatgtcagaaatatgtctctggcagcagagttaagataggtgggagatgtgggtgaggtggaagacaggaagactaataaggaatctagtgcaatagtccatttaagaaaacatgagtctgaactagagcagcagcagtagaggttgaaggtatgtaagggagattttgtttgacttgggttttgaagagaaagagtgtgggttaaaagcttagcaaagttacacatggtggtgttttgttctaagattgttaaagaagagcagggagacatccagatgacagggactgaccaagaaattattaattgacctgttaggttggatactcattgaacttagtaagtttagggacaaagtagcttcctcggtttgctgtatatggtgtaaaatataaggtaaaaccctcatgtttgtacattgaactgatttgtttctgtgccatttcccattagtttttgtcttaggcaattaggggaaggcaaattatttttactcattttaaatgtcaatattacatatgttacaggatatgtaatggattttccattctatagtctgtgattttttttttctaatgggattgcctgaataagacaaaatgtttttaagttaatttgttatattcatttgtgtgtgtgtgtatgtgtatatatatatatatatcacacatatacacgtatatataaagatttatatcaatttgtcatttttgttgtgaaaatgtgatgcacaaaattagaatactttcatagtttatgtctgttcacttccatttgtttttttcccttcctctgcttttggcccttccatttggtgtcatttatttcactcttttttgccaaccttctgtgaggaacttcactgggatattttgtttaatgctccttgaaagcatcggctgccctaaaattgtctttttcagagaaggtctttctttttttttttttttttaagtccttagctctgtagaaagaagggggaaaactcctgctacacctttacattcccttattaccaaaacgaaatatttaccaaaacaatagcacaaaggagttctaggagttgtttttttttccaagagaactattttatttattttttattttttattattatttttttactttaagttctgggatacatgtgctgaatgtgcagctttgttacgtaggtatacatgtgccatggtggtttgttgcacctatcaactcgtcatctaggttttaagccctgcatggattaggtatttgtcctaaggctctccctccccgcctcccctcacccccaaagaggcccccatgtgtgatgttcccctccctgtgtccatgtattctcattgttcamctcccacttatgagtgagaacatgtggtgtttggttttctattcctttagtttgctgaggatgatggtttccagcttcatccatgtccctgcaaaggacatgaactcattctttttttatgtctgcgtagtattccattgtgtatatgtgccacgtttgctgtatccagtctatcattgacaggcatttgggttggttccaagtctttgctattgtaaatagtgctacaagaaacatacgtgcacatgtgttctaggagtttttttaggcagagaaaggttataggtgtgtaaatcatatgctgtaggaattacaaagtgctgtcactaacatctcaaaagaaaatgtcaaagtaagacaccaaagaaacttgcaaacaaaaaacagaatattgctttgacgttataaccaagttttgcctggctatagtatgtctattataattctggcataaaatatacgtgggtcaaatcagtgtttctgatgtcattgtgtgatatcttaggtttttgttttgtctttttggtttttatttttgctttttagtatctaatcttcaagcccttctaattatatagaagtcagataaaaattcagattggtgaagttctctctggtgaagacagtgtgatgactcacatttaattgggccctcactgttttcaggtattctgctagatacttacttcatcttcacagcaatcttgggagccgcttagctattgccagttactagatgagaaagctgagatgcaaagagattaaaaaattggccgagctgacacagataataagtagcagacctggaattcaaacctaggtctctctgaccacagtatctgtccttctcccactacaccattttgtcatttccaagcattctgtgtcacttcttcctaaaggggtactcactaattgaattttggggtccatcattctatggttgtacatttagtgtccctgcttccattcattacaagcagacacacacacacatgtgtgcacagagtatatctaagcactcaaattttcttgcccacacttaattctctatcatctccactatcctcaaaaattttagtaaatgtttattaagcttctactctgctcttggactaagtcctggatattcatacatttcaagacaaaaacagcagcagtgacaaaaagcttaactctgctcttacctcaaggagttaatcaaataagaaccagacctttaagttaatataacacaaaaagatcattgttttcagggacatgaggctaggagaaagactaactcwgtctggaagaatcagggaaattattagctaacacttgattaacaagaaggtatttgtggcaggattggggatcggggagacagagaaagaaagagggagaggccaggctcggtggcttatgcctgtaatcctagcactttgggaggccaagacgggcagattgcctgagctcaggagttcgagaccagcctgggcaacatggtgaaacctcgtctctactaaaatacagaaaattagccaggaatggcagcatgcgcctgtagtcccagctactccggaggctgaggcaggagaattgcttgaacccaggaggtggaggttgcagtgagctgagatcctgccactgcactccagcctaggcaacagagcgagactcagtctcaaaaaaaaaaaaaaaaaaaaaaaaaaaaaaaaaaaaaacacaaaaaggagagagggagagagagagatagagatcgaggctggggtatctgcctcaagcagatggatccacacatgcaaaggctgagaggccagagcgaattggagtggtaaggaaactgcaggtattagccagtgagaatgataggaaaaaagccaggagaggcgggcatgggccagatcattcacgtgctataaagtgtttagatggattccaatgtctttaaagaatttctctaggatatttatttttatctgtaaattttataacttcttgatggccctgattttctttaaggatcatcttcttatctctgagaactcttaaatcttaatggaatctaacacatgggaaaaatagggctctgtgggaagaaattacaagaacccttacaaagttattccctcaaattatacttttttctgggttttttttttggcttatgaaaatctctttaattgcaaaataagctgaataaatgaactgctttagccatcttgtatattgaaattgaagagaagcacaaaattaaaatatttttgtgtttataaaacaaaatggaatagaagtatcaaacatggttcattttaataaataacagaaacatggctttgagatcagtttccaggttttgttttccccgtgggtaaaaacttgagacaggccgggcgcagtggctcacgcctgtaatcccagcactttgaggggccaaggcgggcggatcacgagggcaggatttcgagaccatcctggccaacatggtgaaaccccrtctctactaaaaatacaaaaattagctgggcatggtggtgcatgcctgtaatcccagctactcaggaggctgaggcaggagagaatcgcttgaaccagggagtcagaggttgcagtgagccgagattgtgccactgccctccagcctggtgacagaggagactccgtctcaaaaaaaaaaaaaaaacttgagacactaatgagccatggattcacccacaccagtgtgtactcattgcctcaaccatgagacctgcaacctttgtaaaaagtgagtgtgaggacattcacagtaggaggctgaatgcaaatactggctttcagtagttttagtaattgcagtactatttccacctgttttggccctggctgttcaggcattaagttgagaataaaatagatgaggaatatttagttttattctccaactttcccaatctaaaatgtttataataaatacttaaataaggataaaaatctatgaattaatcacacgtcaaacagggcttcatgtagagtactgagttgagtagcagtgctggtgcaaattctgtctgtgccacttagtagctataaccttgggccgattatttacactttctaggcctgagtttccatatctattaaatacaaatctgtttttcaggaacagattatagggattggtgataatattggagacagggagtcgatgtagggtaataggtcagagtatgggctgtgtagtcaggatacctgagtttgaatcctatctctgccacttactagctttgtgaccttgaccacgtttcctgacttctctcttctcagtttccttatctgtaaagggagagtgataaaagttcatatctcatagtgattattacttgagttgatatttgtagggtacttagaacagtgcccggcacacagtgctagttaactgtttgttaaataaattgttagataaagctcctggcaccatgtaaacactcaatacaaggtagctattatttgtattcaatgtataattgattccctgtgaaaacaaagccttaaaattttaatagccatataaccctctcggcatgtttttttaattaactaaggctttaaagccttattaatacaaaccttttaggaccaaggaaagtttttcacatattctcaattgtctctggttgatgcaacttaattttttgctgagagagaccttaaatgtaattagtattgtataattagcctgattaatctgacctgtacatcacgagtcacttgtctttagcccaagaggaatgcttcctttctgatttgaggcagtggcccatcattgcttctagcaaccttcctacttactagatgaccttgagtcaaggtttctgtatatatgatttcagatttgtcccctagaactgaaaaagggtaggagaggcaaagataggaaaaatattttttaaaaatttttaagtattttatttttattgggaaaatatttattgtaagtcttccatttgttatccttctgccactagcattacgtaaaaagtaaaaagagctttacatcaaaaagcacaatgaaactttgtatccttaagtcctacttagcattccacagtaagctgggaatatggaagatggctcaaagggtttggtttgatttgatttttttttccctcttcatttctcttccccttcatttaagctaaggaagattatttatttgcttcttagctcattgaactctctgactggacaaatagatgtcttacattggtcagcaggatcacatttcatctcaactgtgatgattgttcccttccctcctgtcagatgggagagtgactgatgtttggaaatgaactgtgcaactgaccttttcgtgctggtgggcaacaaagtatgcattgacgtcagtgttggccgatccacattcagtttgtgcaatgggtcagcttcatctctatcactctccacctctcatttgtcagctttcatttcctcataattgtcttcttcactcctattataattacaaaggatgtgtaactcttcatcgaggctgggtagctgaattctgctggtaattttagaaacaaggataaatttaaccctaaagccatctgctgctctgtaggaggattttttaaattataaattagacattataacacactgctggagattaaaaattgcctcagtggtgttgattcctagaaatcatttacttttccttagcttgaagattggttttcaatgttttgtgtgcttttttcctgttttaaaaaaaaggacttagtttaacctaacgattttcttatttaatctcctatttaaataaaaaacctaaaagtatttagcaagtgtaatcttttgcaacagtaaacattgacaaactgtttaaatcttatgtatatttttcaccgcctctgttttattctgttttctggctagtcaaaaagtggtctggagaccagcagcatgagcatcacatcagagcttgttacaaatgcagaatctgaggcccatccctaaatgtactgagtcagaatctgcactttagcagtttccccaggtgatttatatacatgttagtatttgatttatttcattatttcattccaacaaacagaattctccattttgtatttggttcccattagacaacaatcatcagagttagcttatttactctatgcaagaccctcttattcctaaaacattgtgcctttgctaatgatgtttgggcactgataatttatataatttagtgatgacagtgataatggtttttgttaggaccatataggtcagtcagtcaactttcaaaatacagagcagaaaacaatagcagctctagggctgtgttcagatatatccttggtctgctgcggctggttaattaagtaagagacagaggactcagcttttgaggcctagttgattttcatgagagtcgataactgatctgtaattaaagactctacccctaatcctcttctataaatatttcaggccatatagaacccaggtgagagaatatgaatacaaattggagaagactaaggaatcatgaggctaaatgcaatgtggaatccctgaactgaaaaggaacatgtgacaaaactcatgaaatgttaagtctgtagtttaattaatagtagtgaatcagtgttttgataattgaagcttagttttgataattatactgtaggtatgtaaaatgttaacattagaggaagctgggtgaagggtatggggaattctgaatttactgttgcaactcttctataaatctaaaagtatttcaaaattaaaagtttaaaaaagtcaaaatgaagccacgtggcatggcataaatgttttgtttataatagcaagcagaatgtctgaggaacatagccatagttttaggtattaacctgcatatcacaattagagaagacattaaactagaaagatgtttgctttctagcagggctaggctggatctgagtctggtagagagagagacgaatgcccaagtgattgttttcataatgttttccaaaagtcagatgatgatgtggagtcttattattttgtgttgttgcaagacttctgtgtttgtacagtggttgacatgtgtatggaatgctgatgtttaatgaaggaatgaatgaatgtggttagtatgatgaagcatgagtatagtccatttcatttgaataaatggcagtaagaaataaatcctgcattttcacatttcattccccccctactcacctcccacttcactatatgcatttaggcagaaagctgcagactgggtgaagcaagttatccagattcctgtgaagaaattaaaaggctcttatttttaagtgtcttttgctgccactttttaaccctgacaattattaacttcttcaaaaataactatttttgacatgccagtgagagacataaaggtggtggttaacaatgaaggctcgaagtagttaaacttggtttctattccactgctgcaacttagtagctagctgtataacctctggcaaaatacttaactttataccctcactttctcctaaaataaggatacttcatagaactaagaagaaattatcttcagagagtttaaatcagctcctgtcacatagtaaagcacttttaagaggtgggaacaacatattcatctagcagatctttatcgagcagctgttgtctgcagatgatatgctgagagctrggagtacagaatgttgtcccccattccctgctcccgaggaacttagtctgatgggatagacagataagtaaaataataaataataatagcaatgatagcttctgtttattgactacctactatgtttcaatcgcaatataatatctatttctattaattcaactacttcatgaaatgtaagtgttgtccctatttttcaaatgaggaaaccaaggctctaagaagttaagtaatttgtccaagattgcatagctaatagaaaacccaggatttgatccccaatctgcctaacaccaaagtcttccttaacccattcttcagatgattacaaatacagtgtttggcagagggcagtggctcacacctgtaatcccagcactttgggkgctgaggcaggagggtcacttgagccgaggagtttaagaccagcctacacaacatagtgagaccttgtctctacccaaaaaaaggaaaagaaaaaaggaaaaaaaaattagccaggcatggtggcgtgagtctatggtcccagctgcttggaaggctgaggcaaaaagatcacttgagcctgggagatgaaggctacaatgagytgtgattcacaccactgccctccagcctgggcaacagagcaagaccagtctcaaaagaatatataaatataacatttgaagtgctttgacaaggttatagaagacctcagcacatgtaatattgtaacagcttagtgagcctgtctttcagtgtttcttttaatatccctatagacccaagtttctatattcatattacctacagaaaatagaaataactgcttagtaccactcctcctgtaagcaaacaggaagctttctttgtgctagatttgtaaagcagaggttgaaactgggctaccacgggtccagagaagtgttcccagctcttgttctcttgcctgtgaagtgtactatgagagcctaaggcaataaagaggccaggccaccttcttgacaggcctctgtcccattcactcctttgagtttatttcaccagctgtggggaagttcagaatgaagtggctctataagggctcctggagacattaaaacttaccaatgggccaggtggtggctcacacctgtaatcccagcactttgggaggccacagcgggtggattgcgtcagcccaggagttggagaccagcctgggaaacatggcaaatccctgtctctactaaaaatacaaaaattagcctggtgtggtggagcacacctgtgctactcaggaggttgaggtgcgaggactgcagtgagctgagatcgtgccattgcactctagcctgggcaacagagcaagaccctatctcaaaaaagaaaagaaagaaagaaaaacaaccttaccagtgctatttggagagtatcctcaatttacaggcactaaaactcatcctgtgattatggtttaaagtgcagcaattattgtatgtatttcaggatctctgaacacacatccgagagcttcttgtgctgctttatcctgtgagtgaaattaacatttgaacatagtccttgactcatttaacatctagtccttgactcatgagaacatctagttttcgactcatgggaacatctagtccttgactcatttgagagtatagtttttctagaaaattagaaatatatatatctgtatgtgtccatatgagatatgatgttctaggagtggttagtcatagaggtggtactgtgaagataaggcctttctgacagtcattttggaaagtggactgtggagctgagctgaggttacattgtaaagagagaacttctccctggcaccacctttgcctcacactcctgrataccaaaggcagaccacagtgttgttcaccaggtttagactgtatctgaagctctttccccagatgtaccctcttttctctcctaaaccttgaagctccctctaaactttttctacccctcctatctacttttttgggacctttttctctgaaaggcaacagttggtggtaatggtttcacaggaggaggagagctgacctttcacgtctagtatgctctggcattttacattcttattctcatttaatcctcacagcatcctatctgggtaggtggattatcactacatttatagatatggaaaaaataactttcctagaggacttgaagcttgaaagtgataaaactggtaattagctgtagttctcataacttcataggttgtactcttccatgaagctgtaataatggggattgttactgttattactgttactactgcttgcctctagtttttatgttagcaagctaagagaatgctttgcctaaggtgcacatgtatgtatggtctcaaggtatgaatggagtgagcttattttaacacattgggcctttacagcaacctgctgactaagtgtatttatcattttcactttacagatggggaaactaaggctcacaaagactgatccaaagtcacaaatccagtcaatctgtctggcagtagagacttgatccagtctttcttgagccatctcttaaagctcactgtgcatgcaatgctgtgctccagctgggtggagagccagttcctgtcactgagacaggctcttcagtcaggagtatgtagcaacataagacagcatgagtataacttaacaagataataggtatttgtttcttcggtaagaatatgagactataaaggcttagcaaaagggtatgaacttgcatttgtaacaatacttactaaattttttaatgcatgttgaaggcatctaagtagtgtttccagagtgcattctctgtatcaaaactgtagagtcagtatggctaagatcataaggagaaggccattaactgttttgaactataatgccactgcgatccataaattagtaaataagtgatggtgataggtggcttgtggctgggctatgtggccatcatatgttaatgagctattcagatggttatctgcctaaaacaggatatgtggaccaacacttagagggttgttacttaggaaacactgcactcagttgccttcaagggttatatatctggggtaatggcagccagtcactcagttgtgtttaggtraatgtcttagagctttactcatttgtttctttccttatagaccatttaagataaagagctctttagcagtcatcaggtaattgaaattctaagattatcaaatactagttgggttgtccactttaaggctgattttctttcacatgatataaagtatttttccagtctctcacttactcgctttgggaagaaaacttgattcatttacacattcattcagcaacattccttgagtactatttgctagtcattgtgctaatgccagggaaacatcacaagataagatgccatcccagtcctcacagtaaatagtagtgatattgttaatatagcatattagaaaatttattacagagaaatgcagtatagtttgagagcatagatgaaaataacatttatttccatcctaatagatttcggttttggaaatttctttaaaagtggtgaactgctggcaacatggtgtggcagccccccttatgcagccccagaagtctttgaagggcagcagtatgaaggaccacagctggacatctgggtactgctttgctttgctgtgttgttaaatgcatctatactgataatacttggtgttctggcccatcttagaagctcctggtacttaacacataagcagtatttcatattttccccatccactggactataattactcagagcatcttgaaatggatccctaggaaagaatttctaaggataggtgttgtcatcctaatatcagcagtaatttaaagttaagtagtaatcaaaattatcagattcaaattctttggtatttattataagatacttattgtagtagtcagggttttggatttttttcaaattctgagaaaataataaatccagacaggaatttttcagtccatatgatttcaagagccctggggatgttcaggaaaacaaagagtgtttgacgttcttggtagaaaagtctctgcattgttttcttccctagagtatgggagttgttctttatgtccttgtctgtggagctctgccctttgatggaccgactcttccaattttgaggcagagggttctggaaggaagattccggattccgtatttcatgtcagaaggtaatcaacttttcatcttattaatggtgttttacagtgttagtgctccaagtgaaatgcctaggtaaaagcttctttttttctaagagtttgggtgccaaataaagtgactgagctgtaggttaaaagctatagaaagaagcaacctcctttatgtaggcgagacaggttccagccttctacttgtaactaaacacacagcatttcccagattaagagcagcatgtcttctcattcattctgggtctataaatgtcccaggtttattttagatttaacgaagccctttgtagatacagattcacaaccattttactccaatatgaaatgaactttataaaattaaaatttttttaattaaataaaaagccaaactggcaaaactctgctaaattcagatgatatgccataatccctgcctgtcgtgtattgagctgttacctagatagcagttaagtttaccccttagtttcattttggttatcattcttaactctgttctttctactaagagtagaaataataactcttcatagttaagagcatggactgtgaaggcagactaccagactgcctggttttaatcctgagtccactggttactggccatatgactttcacaagttttgtctcctctctatctgcttcaatttccccatctataaaatggaaataacaatagcacctaccgcacgggtgttgtaaggtttaattaaattaatctgtcagtcaggtgcagtggtttatacctgtaagtccagtggtctgggaggctgaggcgggaggatctcttaaggccaggagttggagaccagcctgcacaatattgcaagaccctgtctctacaaaaaagttttttttcaattagccgggtgtggtggcatgcacctgtagtcctagctactcaggaagctgaggcagaaggattgcttacagtgagctgtgattgcattactgcactccatcctgggcaagagactgagaccctgtctccaataataatataataaataggcataatctgtgtaaagcacttagcacagcgcctgccatatagtgacaggaggttaccttatgtgtgagtgaagagcatcatgtcagctcagagaatatgctagtgctcaaagttgcagcagtgcggttttcttggtgtagtcagaagtaagtaatattttatgtacacttttctcagctacagtgatgtggaggagagcagcagcccgttggagagctctttgcctcgcttacgtagccttagtatatcagcattagatatgactgaggatcgatttattatttgcttgttctaggaatgaggcttatttctttcctttagtggaaaccaaagtctgtttgtttctagatattttcagttgtgaaattcagtagaaagtttcctttagcccagaatctgatagacctacaccctcctgtttttcttaggtatttgttcaccatgtgaacttgagaaatataagtagcctgcatgtgttcatttattcatttgaccttctgctttccagtagaggatacaaagattaacacccttgtacaaagtcacatgagtcaagcaaataaccctgaagtgcaaggtgattcttgtgacttttgtaacattgtgttttctatagattgcgagcaccttatccgaaggatgttggtcctagacccatccaaacggctaaccatagcccaaatcaaggagcataaatggatgctcatagaagttcctgtccagagacctgttctctatccacaagagcaagaaaatgagccatccatcggggagtttaatgagcaggttctgcgactgatgcacagccttggaatagatcagcagaaaaccattgaggtaaagtgatcagagatttcggggttctactgcacttagctacttgaaatttcatgctcacacctgtcatcctggtcttttagcacatgtatctccagcgcctaggcgtactgttcagtgttccctatagatgacatcagactctatttatatttgcttttattcagcatcttaaattcctttctttgcccccatctgccaaaacattcaagaggaggcatttataaaagactcagaaaaggcaaagatggaagcttaacaaatacaaggtagaaagtttcttccaagatgaagcatgaagttttacataggtatttaactagtttgtatggaatgtaaatgtgcagataggcaaagggccaagcaggaaacaagaagggtaggtatcaggtttaagaaagccaggggatttagattgtgaactggagaaactaagaaggcaaaaacaggtgggctcctgatttggaagtattaggggtcatagaactgtgaagggtcatgaacctggaaaattcctcttggcttttatttctgtcctcgaatagttagcatacttataggatatacgtatttctaatacctttacgatagtaaaaaagcaaacagtgctcttcaggaagaaacataacaagaaagaatatcaaatgccgccttgtttgctgtgaaagaccaaggctccgggctgtgctgcctttcccccgccacgtagccataagtgaaaccaaactgattctcctgctttgctcactttgcgcccagtgatgtttttctgtacttgtccatgaagtgcatcctgagcagtagctgggcgtgtgattccactgacctgtgatttttgctgagagtgctctgcatcctggtgccctgcacagcacccatgccgactgtcaggtggaattagaacccaaaggagcagttgtttctctgttccctyaatatctgggaaagctggcaggctagagatgtgaacatttgggaagcaactttattttcaaggttttaagagggtgggactgcaaaaacaagaggaaaaaattacctaagaacrgagacatagtgtctctcaatttagcatccagatgccattctccagcccaaaataatcaacagaaagttctccacatactttaaccattcacttcagagttttcagtggttcagatttgtgttgaagccatggaattagagcctcgggctcaggttgctaactgaccttacaccaccgttacagctatgagatggggccatatggcagcattggggaatgtctacatgagacaatgatggcattttctctgactggagaaaaataaatggatcttgttaatgttaaagggctggtaaacccatttaaagggatcatcctttatataattaatactagagacttgaagttttctgccttccagtcacatttttggagcagctttcatcttgagacactttgtttttcaccctatttttaagagcacacaatttctttcctcttttttttttaggcatgtgtagatcattgcattggtctttacagttctttgcctttaccacttgttttttatttcagtctttgcagaacaagagctataaccactttgctgccatttatttcttgttggtggagcgcctgaaatcacatcggagcagtttcccagtggagcagagacttgatggccgccagcgtcggcctagcaccattgctgagcaaacagttgccaaggtaatgcccccttagctgagagtcttatctgtgcatgtgcctgttcacatgtttgatacatttttcatcttatacacagggttaggatttcatcctctacactccgtttttctgtaaaatttctgcctgccattcactagattctcaaatgttttagcacttcctcatttttaagggttaactttatttcaaacagttttttaaaattgttttcatcattcacaatgttgagaattactatcactagcctttacattcaattccatttaacaaatttttattacagatttaccaygtgcgagcttctattcttaggcactgttgggggtaagatatataaactacagtcactgccctcagagacatcgcgctataaaaatgaaataagacaagatcataaacaaccatcattcaaaatagggaaagatgagagctgtagcagagcagggacaggggagagaggggcacatctgaacagggggaatggcatgtaagacacatcttcacagatggggaggacttggtcagtggtgagttgaagcattattgtgaagagttttgaatgccaaggtaaagagtttacttacaattcaagaagcaacaaggacctactgaaggctgctaagctgaaaaatgataaaattctatcgatgctttaagctaattaatctggtagcattatgaaggatgggtcagatagagaaaagaagaaatttggagagagcagttaggagagtgttacagtagagatgagaaataccgaaggcttaaactcatatggcactgttggaagtagaaaagaaggggcaagtataagaaccatcttagaggtagactctgtatgaagttagcaatggttcggagaggcagctcagtgtggtggttagaagcagggactctggagcaaatcccaattctgccacttcctgctatgtgacattttaagtttcttaaggtctttttgtgccttggtttcccaagtgtgtaatggggataataatagaatgctatgacaattaaattagttaatatctgtgaaatagttaatatttgtgaaatactatatgcctggcacatagtaagtgctatgtaagtacttgttatataaagtaataaataattgctggggaggaagggacaatatgacttagagatgactctgttcttgagccagagcctgagaagataggggkggcattaactcagttgctcaggaggaagatgtggatcttgatccaaggagagaggctgaggctagaaatttgggaatcatccagaggttgagatgaatggttggttagtatgctccattgactttcctgtctacttctgtaactgactttgttcaaaacaaaaataagggcaggagagttttgactttgtatttctttggcagttttacaaaatttacaggattataataaaattttgcattggcatctacagagtatgttttaaaaaagggaattaaatcttcttgattttagtagataaatggtatattttgttatacgtactttatatataaaataagagtattggctgggcgtggtggctcacacctgtaatcccagcactttgggaggctgaggtgggtggatcacaaggtcagtagatcaagatcatcctggccaacatggtgaaaccccgtctctactaaaaatacaaaaattagccgagtgtggcagtgagcacttgtagtcccagctacttgggaggctgaggcaggagaatcgcttgaacctgggaggcagaggttgaagtgagccgagatcccgccactgcactccagcctgggtgacagagcaggactccgtctcaaaaaaaaaaaaaaaaaaaaagtattgatacagatgtaagtaaaataatgtgtccatatagttccagacacttgagttagggtatctttgagcacttggaaatcttcgaagttgaatggtattgctttcaagaccgagaaagaaggagataaaatgaaaaacatgtaagacgtagtggaactctttccttcttgcaaatgccactagacaaaaggataggaagctggaaagcccccagggccagcaggctttccctgccaagtctctttattcttcttaaacattacgcaagtgagggagtggtgaggggttatataaacagttgttcctgagcacgtgcatgtgttattgtacacgatatcctttcatgtctagactatgagcaaattccccggcatatctcaaattatatttaatttggcttagggttcagatacataaacgtgacttcttatgttcgataattttttaaattaccaagcactctgtgtcctttttactttatgcattgacccaagtctcaatggaacctgcttagtgtaactgaaaatgcttctacttcaaatggagtcttcaatgctcattcacatgcttgcctgagagccttctggatgctgagcaacaggccccctcctctcagagatttcacattttgagttttagtgttgaatttgttaaaaaatagacttctgtttttatggatataaatgtgcctaaagttttagtaaaggcttctcactttaattccttgatgttctaatttttttaaaagaagtggcaaatcacttgtttcttgatatagtagcaaaaaaattgaggaaacaacatgatccagtcaatacaaagataacgtgagctgtggaatcatgcagaccttgggttccacacaccaagctgagtgacttcgggcaagtcagcgtctctgagttcctgtgcccttaaatacagagtgggaacagcaatacgtacttcattagattgctaccaagatacagttagttaacctgtaccgggagtttagttaaacaaatagagcactgacatgccaggcacagtcctagccactgtggcttcagaagtaccctggaaacagttgctccccttaagaagttcatagcctagttacaaaatacccattatgacagggcacagttgctcatgcctgtaatcccggcgctttgggaggccaaggcaggtggtttgcttgaacccaggagtttgagaccagcctgggcaacatggtgaaatgccatctctactaaaaacaaaaaaattagccggttatggtagtgcgtgcttataatcccagctatgcgggaggctgaggcaggaaaatcgcttgaacccaggagacagaggttgcagtgagccgagatgacaccactgcattccagtctgggcgacacagtgaggttctgtcccaaatagtaaaacataaaaaaaaataaataaagtactcattattattatttagacaacagtgggattcccctcttagatttggagtgcttatgtttgctgtataacatgcaggaagtattagatctaattgagttgagactatttagaaaaaatacgtcatatttttttctcatacattctaaccactaattttggtggggttttgggggaggttttgtttttgagatggggtctcgctgtgtcaccaaggccagaggacagtggcaatcacagctcactttagcctcaacctcctgggctcaggcgattctcccatctcagcttcccaagtagctgggaccacaagtgcatgccaccacgcccagctaattatttttttatttttttgtggagatagggtcttgcaatgttgcctaggctggtctcaaactcctgggctcaagtaatcctcctaccgtgacctcccaaagtgtcgggattgcaggacctgatgaaggtcacacaattagtgagccaccacacctggcctaaccacttgtttttaacagtccttccactgcaagtttccatcagctggaaacaaacaagaatgaaacaatcacctccaattctttaattactgtttagaggttgcccttcacaacaggttgtgcctgtttgctagggctgccgtaacgaaataccacagacctagtggcttaaacaacggaaattattttctcacagttcgggaggccggaaatcaggatgagggtgccatgagggttgctacctggtgaggcctatcttcttggcttgtagctggctgtcttttcactggcttttttctctgcscaagtgtggagagaaagatctctggtgtctctccctcctcttataaggatacccgctgtgtgggatcagggccccaacctcaggacctcatttaaccttaattaccttcttcaaggccctgtctccagatatagccacattagtggtgaggggctcaacttgtgaattttggcaggacacaattcaggtcataacaagtatttgcctattggaatagcaacgattttcccataggaaagaacgttattttcattttaatggttctggagagcacaaagtccaaagaagagattcaaagcactaaacatgtggtctaaagagtgatcacaatttgttggacataatcattgcgtattgacactcttaaagaatatcttgataatatctgcttccttgggatattgaccatctatttatttaatatttgctaatcaactgtgtaatgctgagcatgctgtctgtatatttataccctctcttgttccaaaaagactcctttggtcccctcagtgatcacaagactcctaaaacccaccatatttcctaggaagtgattgtcacaacaaaaagcgttattccttgatcctgtctgttattcctctaaccgagttcacagtcagttgtagtagtccaggtcggatgtgaacactgtcaaggactatgtgctacgcttggtctggcacagcaccgtctggccatttaaagcgtccgagctagtgagagtcagggacggagcagtgtgtcgtagttagggcatgggcatctcatttccatatagcacccccagtcatgcgttgccctaataattcagactaccttcatagagaaggagcagtctaataaagttgggaagtagaaatcaattcttcagttttatcctttgattgaaaagctattgatgggggtaagaagaatgtagcaaatatactttagtgggaagtgtaaattttacatattgactagataaaaattttacatagtagctagataatttaaaagcctgatatttgaaaagaaaaagttgtttaacatcagaagtggcacagaatataagcttgaggaatgacaacacaaggaaagctatttctttatcacactctgaatggtatgcagttgtttacttgtttgtttatttgttttggggcatccataccattctgacactttgctaatgctactttatcttatacagtatagccagtgatattaatattggaatataccaaatataaagtatgttgaaaatatattcagagtatattcaaatataaaatatatttctaacatatccccccatccttgaaaatcatcaatccaagattctaactaggaaccgttagtatttgagaacgagactgcattcattttgcaaactaattcttacattcttgtgatcatttgaaggctttaggaagaaggggaaaggaggaattaatgttactgagttaaggacattgcatgttaccttttacagtcctgacttcactgtgaagttggcattgtgctctcacagttgaagaagataagtttcagagaggttaggaaacctgattaaggtcacacaatttgtacgtgatggagmcaggaatcaaactcaggtcttggtagaggagaagctagaatctcataccattttgtccctttgatttgtttgagtttaaaattcaccatcctgtatcccttgaaataactatagccggaaaaatacaggctgtccttctgcctttcatagtctagtatgatgattgttttctcagatgtggtgcagtgcctgttgtattcaaaacacatctaataaattattctggtagttttgaagggatggtgatgaaaggatcattcagcagcttcatctttaaaatcaatttttgccaattgtcataaggaaaaattctcttttaaatgatttttttttttttttgagacggagtcttgctctgttgcccaggctggagtgcagtggcgggatcttggctcactgcaagctccgcctcccgggttcacaccattctcctgcctcagcctcccaagtagctgggactacaggcacccgccaccacacccagctaatttttttttgtatttttagtagagacggggtttcaccatgttagccaggatggtctcgatctcctgatctcatgatccgcctgcctcggcctcccaaagtgctgggattacaggcatgagccaccgcgcctggccttaaatgattttttaaaagaagcatttgtaatgcttgtttccctagagtagttaacaaacgagacgtgagaacagacttcaaaccatcaggagctttctatagtgggttgacttcaaaaacatagcttgcagtaagcgtagcttgcagtaagcttctctccttccactgggccagcaggctgagtccaggctgtgcatctccttgaaggaaggaagatgttcctgtcaccccatgtgactgctgcttctctttcttcctcttcgcatacacccttaccaataaatatttaccatctcacctacaccaaaaaggcgggtagggcaggcagagacacagcactgactccagcgtcccttgtgttgtagttacttgtgggtgtgtatatatctgtccctggtttaattttgagctcctaagatttttctattctttatctgtctgggtattatatttaaagaaagagacaaatatgtttgttgaattgaacgaggaacattcttgattcctcacaaaagctagctttctcgtcacctgcgtgaaagtcaagcatcccctcatgaggcagaaatgaaattctgtacgacctctttcagagtaaccgattgctgagtctgcttcagatcactgtctgcaccatgtatatatttcactaaatctttctggagtttccaataaataaatattcattctttaattgccacaggaagaattattttattcttagaactttgtgtatttatagagaaggtattcatgttcccaaactgtctgttcttgccatatttacaggcacagactgtggggctcccagtgaccatgcattcaccgaacatgaggctgctgcgatctgccctcctcccccaggcatccaacgtggaggccttttcatttccagcatctggctgtcaggcggaagctgcattcatggaagaagagtgtgtggacactccaaaggtacggctatgtttgagagtctcagaactggcagtttggcgagagatttcagtttggtccacaagtgttgtactttggctttattgaactttatcatttcgttaagtcactcaggagtgatgcttttgtggagaaaaaccttagaacagtgtccaggctcaactcttgtcagtgtttatcattatgaccagtatgaccattacgtaatttgtcagacctcgtggacttctgaaaagtcctccctgtctttctcgctcactaattccttctctcttcaagtttccagatctctcacaagtgtttggtttgtttgtttgtttgttttttccctaacaaattaatgctgaaaacaaaaaaattaactttcatgccaaattgggctttatttgattactattgctgctcttctgcataggtacctcaggtacaaaatgatgggccgtcttttgtgatcagttatacatgtgtttttgtccaatttggaaatgtttaaaagttaatgtgctgggccaggcacagtggctcaagcctgtaatcccagcactttgggaggccgaggcgggcagattgcctgagctcaggagttccagaccaccttgggcaacatggtgaaactccatctctactaaaatacaaaaaattagccaggcgtggtggtacacacctgtaatctgagctactcaggaggctgaggcacgagaatgtcttgagcccagggggccgaggtggcagtgagccgagatcacagcaccacactccagcctgggtgacagagtgagactccatctcaaaaaattaataaattaataaaaataaaagttagtatgtggaatgaagttggcatttaggatacagaagatgacagcttctctcattcatagatgtctctttaacttccaatgtgtattatatatacttagcataagcgatgtatagaagatcataataatgggtagtagagtgtcatagaaaacacaggtcttggagcgtgttcaaaatagacctcctcttagtgtgaacttgggccacgtaacaaaactctttgaacctcagttttctcttatataaaaggagaacaccaactttatgagactattatgaggattaattgagataatgtgtgtgaggtttgggacagattatagataataaataatggtttcctgtctttttagcctctttagataataaaaagatgagtgagacatgaactctgcctctccagagtccactatagcctagcagaagaaacattatacatactgaaagacagcgccaggtgctgaataaattgataaaagataaaatatgggccgggcatggtggcttacgcctgtaatcgcagcactttgggaggccaaggcggacagatcatgacgtcaggagttcaagaccagcgtggccaacatggcgaaactccgtctctactaaaaatacaaaaattagcttggggaggttgcgggcgcctgtaatcccagctactcgggaggctgaggcaagagaattgcttgaacccaggaagtggaggttgcagtgagccgagatcgtgccattgcatgccagcccaggcgacagtgcaagactgcatctcaaaaaaaaaataaataaaatatgatcagtcctttaaggaagtataaatcagaacgaggcaggggaagttgcttttagctgtttgatcaggaaagtccggtttaactgtcagaactgaggattgaaagacgggtagacccaggacaggtggctggaaaccgggggtgaggagtgatgtctacagtggagacaagactgaaaaagcaagtactagggaagcctaagtccatctccatagagaagggttcagatggtctgaggaaaagggcacatgcagggaagctgtgtgaaataaagatggaggaggttagcattaaatggcaagccaagaaatttagatgttttccctaagcgagtgctttcaatatggggatagggtttggtatcagttgaaacaactgaaggaacagttgttaggggagtaggaaactgctgaagatatttgagcaaggaagctctgggatccatgttgcacatcagaaagttagcctgcatatcactgtgtgtgccccggtgcaggggagaaactggtgaccaggaagacaggttagagcacgtgtccaggagggaggtgatgaggcctgaactagaatagtggcagatagagatggtgcagataaaattgatagactattaaggtctagggagaagtccaaaccagtaacaagattttgagcctagatggagggtgagagccattttcagaaatggagaactaaaggcagggcagattcaagaaggccgaccatgagttcagccaagcgtagcccacaacaggcagctcagtgcgaggctgccacaagccagtgttgaccgaaaggatttagtgtctgggcccctaaggatgagtccactgcctagggacagtctttcttctctgtctgtggttgctactacagtcccactcagaaagttagacataaattaaggcagcatcattcatttattttaaagatgtaattccctcaaaagaattaaaatgcagttgactaaaggcttgtctgtgagggcatcaggcctaaaacacagattgggcactgactgctgtattatatagggcaagctatttttaaagcttgtgattgttactgtaaccagaaaacaggcaggaaatgaatgattttgcaaaagatatagacaggagctagatggtatatttgcatttgtaggaagagcagtgccacgctggagctggtcacccacactggcaatgccatgctggcactcagtcaggccatagacatcctccgggcttctttgtggaccgttttatttatgtcagcaaaaacgcttgtccctcttccctccctaagacctctttcttggggcccataaataagtgcacacacacacacagaaaaacttatcagagacacagttccctttttattgagactgcctsatgtgcatttactgtaacacccatttgttgttttctgattgatgcttcatagctgcatgtattgatacttgcatttctcctctcaactggggacaggtattgtgcatctcaaagagacttcagctctccttccctcccagaaatcttcagtgcttaaaattgtcagtaaaatcccttggggagtctgaatggaaactttggtttgcagtttcaaaaaaatattgcctttctgagatagttgcccaactctagataagaatggttggatcaggtgttccaaacaggaactgagatccacagatgacatgggggccatatgggagggcagatgcataaaccttgtagaataaatctacttcaagtatctctttttaataaggaattttatatacatacatatacacgcacacttgagtcatttttagctttttttttttttttttttttttttgagatggagtatcactcttgtcacccaggctggagtgcagtgacacgatctcagctcattgcaacctccgccccccgggttcaagcgattctcctgcctcagactcctgagtagctgggagtacaggcgcctgccaccacacccagctaagttctgtacttttagtagagatggggttttgccatgttggccaggctggtctcgaactcctgtcctcaggtgatctgcccgccttggcctcccaaagtactgggattacaggcatgagccaccatgcccagcccatttttagcatttttatttgaaatgtaataaaaggattttccgaattacccccttcatagctggatagcagaagggaactgtgagggtagaccctgaaaatgcagacacagtggaggtgtttcgtgtctacttacatttttaataactttttttatgacaaaggtagtacacacaaggtctgaaaaggatatacatctggccaggtgcggtggcttacacctgtaatccagcactttgggaggctgggtggatcacctgaggtcaggagttcaagaacagcctggccaacatggcaaaaccccaactctactaaaaaatacaaaaattagccaggcatggtggtgcgtgcctgtaatcccagctactgaggaggctgaggcaggagaattgcttgaacctgggagatggaggttgcagtgagcccagattgcaccactgcgctccagcctgggcgacagagtgagactctgtctcaccaaaaaaagaaaaaagaagaagaaaaatcagatcaatgaaaaatcaagtcattgttttctagctgtcccaggataaaatcgaactcagcaaatattttgtaataaaagacataattcctcttgtagtctagatgagaaaataaatgtataaactgacaatttaagtaaaaccgtaaattcaggggtactgccrggtattttgtgtgactcagtaaaaatattaaggataaaaaaagaacctgcatgaaaagaaacactgaacagacaacccacagaatgagagaacatttttgcaatctatccatctgacaaaggtctaatatccagcccataaggaacttaaacaaatttacaagaaaaatccccattaaaaagtgggcaaaggacaagaacagacacttctgaaaagaagacctcatacagccaacaaacatatgaaaaaaagctcaacagcggccgggtgtggtggctcacgcccgtaatcccagcactttgggaggctgaggcaggcggatcacgaggtcaggagatcgagaccatcctggctaacatggtgaaaccccatctctactaaaaatgcaagaaaaattagccgggcktggtgatgggcgcctgtagtcccagctactcgggaggctgaggcaggagaatggcgtgaacctgggaggcagagcttgcagtgagctgagatctcaccactgcactccagagcctgggcgacagagcgagactccgtctcaaaaaaaaaaaaaaaaaaaaaaaaaaagctcaacatgactgatcattagagaaatgcaaatcaaaaccacaatgagatactatctcatgccagtcagaatggcaattattaaaaagtcaacaacaacagatactggcctggttgcagagagaaaggaacacttttacactgttagtgggagtgtaaattagttcaaccattgtggaagacagtgtggcaattcctcaaggatctagaggcagaaataccatttgacccagcaatcccattactgggtatatacccaaaggaatgtaaatcattctattataaagatacatgcatgagtctgctcgttgcagctctattcacaacagcaaagacatggaatcaacccaaatgcccatcagtgatagactggataaagaaaatgtggtacatatacaccatggaataccatgcatacatagaaaggaatgagatcatgtcctttgcagggacatgaatggagctggaagccattatcctcagctgaacagaaaaccaaacaccacatgttctcacgtataagtaggagttgaatggacacatggaggggaacaacacacactggggcctgttaggggggcaatgggagggagagcatcaggaagaatagctgatgcatgcagggcttaatacctaggtgataggttgacaggtgcagcaaaccaccatgacacacgtttacctatgtaacaaacctgcacatcctgcacacgtaccctggaacttaaaaattgaagaaaaaaaaagaacttgcttatatggcttatcctataagaaatgtctggtaaaattttgacggaggccgtaagtgtaaggatgctcaatagataattaattaatgatcttcttttctctgttggcttattcatttctaaaccattcttggctagttttagaaaattgtattagtagagagttaaggagcttagaggtatgaatgtaagttctcaaacagccattctttcttgcaaggaaactattaagtttagtcaaaaaggaaagtttatctggggaaggaccaaggagagagcaagagttgctggccaggtttcagagttttgctttctgctgccatggggaagattggccagtgtggaaaggaagcatttaccactcttcctcttaaatgaccgctcatcgctttaaaaccctgtaatgcattagccaccttacccgagtgagggctatagcccagaatggattttatggaataaccttcccctccctgcagcaaacaaagatctgagtcaccctagtctccttctccaaataaagggcctcgcagcgccttcagattggctgccataagaggaaagtttcctgtgtgtctggtaaagggaaaccccacaccacctctcacatacatgagcttctcctgcttccaaaggaaacagtagctctacccagtgttttccaggtgaaagtactgcttagaactcagcgtcttatgactggctgttcctgagcagctattcataggagaaaatggattgatttccacgggggaatagttaaggtaatgaggtaaataattacctcctcacaggggcctttaccagccagaacttgcaaccacaacccccatgccagtatgctgttctgcctgccattaggcagtgtgcgtggcaactgcatgggaagggccaatgcttgcggggagctgtgctgcgctcacccctgtgggataggaaccatcgataacgtatatgttgctggaggagacaaaattcagtgcactggggcttattagcctctgctggaattttgggccagtgagccctttgttattctacaatgggaggctttggctgtctgccatttgaatttttttcaatcctttttgtggtatcagtctgtctatatagaattcttactttccattccccaggcatatagaaccaattaaagactaaatcaaatgggcaggtacttaaattttgaacataaaagtctttctaaaaccttccattatgtttatggttgaaaaaatagaagaatcttggtgactaccccttttttttttttttttagcaatgagccawgtagttwaaaaaaaaaaaacaactcatcttccccctcttcatttcccttatttaaaaaawaataataactggtagtcctcaaactaatatacccctgttcttctggaaaccactaaaaaagttgtttattgtaataatgatgactcagagaaacctgggcagcagtgccagtttgggtcatcatgggcttctgtctcagagttctgagtcctgcagttgacttgccttcacttctaatctatgtgttgtcatgcataataaatatgtgcatgtttaaatattttacttaatttctagttcgccacaagtcttgacatgttttcctttgtggatttttctgtctcagcagtgcagaaactgagtttcctctctcccctggcgtttaggtcaatggctgtctgcttgaccctgtgcctcctgtcctggtgcggaagggatgccagtcactgcccagcaacatgatggagacctccattgacgaagggctggagacagaaggagaggccgaggaagaccccgctcatgcctttgaggcatttcagtccacacgcagcgggcagagacggcacactctgtcagaagtgaccaatcaactggtcgtgatgcctggggcaggtacggtagaggagcgacactagcttgagtcttcatggcatcatgtcatactccaattgccaacaagtggtcacgatgccagccaacacctaaaattgagtcgatagcttattcctttatggattagattcagcaggtatagcagacacagcctggcagcagctatcaaaggtgaattgaaatgtctctgagttggctcccatagtccccaggattcatctgggtgccacgtgattgatcagggactctggctcttttggactggctgagatcttacagatgccacttctggagtgttttccccactaaacttgaagatgactaaattggccagtaaaagggctctgaaaagatgttttgattggaaattaaggacatggtagctgtcaaaactcaagctggttatgctttgtaccctatgttccaaggagatgctattgctgttggttttatctgttctgttttctcttaaagggaaaattttctccatgaatgacagcccctcccttgacagtgtggactctgagtatgatatggggtctgttcagagggacctgaactttctggaagacaacccttcccttaaggacatcatgttagccaatcagccttcaccccgcatgacatctcccttcataagcctgagacctaccaacccagccatgcaggctctgagctcccagaaacgagaggtccacaacaggtctccagtgagcttcagagagggccgcagagcatcagatacctccctcacccagggtgagcacttcctcctctgctttttgaaactcgcgtcgtaggagagcagtttcttgccatgttggtgtggtcacctgtggtcactgaaaggccttgtattttagttaaactgtttggtcttggtgctttctttcaggaattgtagcatttagacaacatcttcagaatctggctagaaccaaaggaattctagagttgaacaaagtgcagttgttgtatgaacaaataggaccggaggcagaccctaacctggcgccggcggctcctcagctccaggaccttgctagcagctgccctcaggtgggtaccttgggcccttccctcaatggctctgtgaggatgaggtgtgagtttgtcctgaagatggtcattttcacttagaggatttcctccagtcctggagcaaacaggctgtttgggaaaacccacagcttctttgccttgttgctgccacctgccactgacgggttcaacccatccacgctgcttccaagtgatcaataccagatggaggcctggacactctcaagctgtttttggctcacagggcagagtacagatgagtgacctcttacagtcgcccttgaactccccttctcctgccacacacacacccaaatgaaaaatacacaaatgaactacacccaaatgagaagcttctcaccactacttttgatgtggtatcactttagtaaatactacaagtggattattcatactaaaaatacaataaatactgctacttacctgattttattttgagcctattttcagtgcatccaagaggattatagttcgaggcccacatgaaggccatagcctcctggtgacaccaagagtctttgctctagtactgactaggtaattgttaactagagataatacatgcataaatgttctgcagagtaatgagccctcagcctactggctctgtaaaagctttgagtattaataagtctcagtggagttggtattcctattggacattgcaaaggtgcttcagctaagaactgagacgtttttccccatggggaattgaaaattgtttccacccccttgctcctcaggaagaagtttctcagcagcaggaaagcgtctccactctccctgccagcgtgcatccccagctgtccccacggcagagcctggagacccagtacctgcagcacagactccaggtgggtccttctccttgcgagtccacctcactctgctcatccagaatctgttcttctgcaaagcagaaacgtgttttgcctggcatttatttagggtagctgcttgattccttataggcaagtagctttgactctgtacttggagtttctagaaacgtgttcagatctagctttgtgctgtgtgttggtggtgggaaaggctttgtcctcaagccccacgaaaggatatgccactgaggggtgggaacgggagacctggcttctttctttctaattgtattcctcttaatgagtaacaaataaaatgaaaaccttaagtctgcagaatttctacatgggctttctatgttggtgcataaaaatcttaaaaagcgataaagcatagatcccgtaaaggatgaatcattcattcagcgggtgctggggcctttgctctcaagatctaactccacctttctcattgctttttaatgtccatgagcctcacagtcctagtggacttttggaaatggagtggaaaaaggaagtaggtgaggtcagagatggcccaggcctgcgggcccgatgctctttcagggtctcagggagtaaatgtcagtcccttcaccccgtgtggattctgtagaatgcagttagattcatcctgcaggcagaagcacatctgatgactgcatcctaggtgacagcacattgtcacgctcatgttgtttttctgctcttccagaagcccagccttctgtcaaaggcccagaacacctgtcagctttattgcaaagaaccaccrcggagccttgagcagcagctgcaggaacataggtgagaaggggactttggccaaagaagttgcttccttttctggaagccttgagaacactgaatgtgtkgtccttttcctctcacattcgccactactaggaaaataggttttctgcgtgtgtcacaggccctctgagcacgattactaagaggatatctcagtatccatggaggatggtcctgtcaggcactggcagccccacagtgtactttgttttccttttcttctagcgtttcctctttggggtatgactagctccaagctttcacagtcagtggcccaaagtatggaggtggggtaggcggcacaggagccttccgtcctcccttactatcatgtgtgcccacagcctcgctagtagaagcagcttggccaaggtrgacctaccctaatcaatccatcaactgcagacacctgcagaggccaaggtgtgattatctccccttctagcctctccagaagggaaatcatcctctcattgtataaaggaaaaaactcggagtcagagaaaatgcattcctgctcacgttagtactgaaggatcatcagaactggggggcaaaacatgagattaggtttaagagacccaacacaaytggttcccattcccacttgtttttgctgacatgagagagacttaagtagaagactgaagctagtgactggtattgcatttacattaaaattgccatcacttgagaagatttaaaattctttcctttgatattaccaatttaggctccagcagaagcgactctttcttcagaagcagtctcaactgcaggcctattttaatcagatgcagatagcagagagctcctacccacagccaagtcagcagctgccccttccccgccaggagactccaccgccttctcagcaggccccaccgttcagcctgacccagcccctgagccccgtcctggagccttcctccgagcagatgcaatacagccctttcctcagccagtaccaagagatgcagcttcagcccctgccctccacttccggtccccgggctgctcctcctctgcccacrcagctacagcagcagcagccgccaccgccaccaccccctccaccaccacgacagccaggagctgccccagcccccttacagttctcctatcagacttgtgagctgccaagcgctgcttcccctgcgccagactatcccactccctgtcagtatcctgtggatggagcccagcagagcgacctaacggggccagactgtcccagaagcccaggactgcaagaggccccctccagctacgacccactagccctctctgagctacctggactctttgattgtgaaatgctagacgctgtggatccacaacacaacgggtatgtcctggtgaattagtctcagcacaggaattgaggtgggtcaggtgaaggaagagtgtatgttcctatttttattccagccttttaaatttaaagcttattttcttgccctctccctaacggggagaaatcgagccacccaactggaatcagagggtctggctggggtggatgttgcttcctcctggttctgccccaccacaaagttttctgtggcaagtgctggaacatagttgtaggctgaggctcctgcccttcggtcgagtggagcaagctctcgagggcagcactgacaaatgtgttcctaagaagacattcagacccaggtsttatgcaggattacatccgtttrttatcaagggcaaccttggtgaaagcagaaagggtgtgtgctattgcatatatatgggggaaaaggcaatatatttttcactgaagctgagcaaccacatattgctacaaggcaaatcaagaagacatcaggaaatcagatgcacaggaaataaaggaaagctgtgctttgtcattgaatcctaagttcttagctgctgatgcaagttgtcccccaaggccatcacaaagcagtggggcatgagctgtgtttcaggggccactaaataacagctggtactgaccccagaaaccrccttcatctccattcggaagcaggtgacacaccccttcagaaggtgccctgggttgccgagtgtcagaatatactcaggactccagaggtgtcacacgtggaactgacaggagacccgccaccgtggaggcagggggcaagaaactcaagaacgcatcaagagcaccagccctgggccagggaagacaggctcttcctgcagtttctcgtggacactgctggcttgcgggcagtcggtctccagggtacctgttgtctcttttccgatgtaataactactttgaccttacactatatgttgctagtagtttattgagctttgtatatttggacagtttcatatagggcttagagattttaaggacatgataaatgaacttttctgtcccatgtgaagtggtagtgcggtgcctttcccccagatcatgctttaattctttcttttctgtagaaaccaacagtttccatttatgtcaatgctaaatccaaagtcacttcagagtttgttttccaccatgtgggaatcagcattcttaatttcgttaaagttttgacttgtaatgaaatgttcaagtattacagcaatattcaaagaaagaaccacagatgtgttaaccatttaagcagatcatctgccaaacattatattactaataaaacttaaccaacacttacaattcagtcatcaaagtaagtaaaaattagatgctacagctagctaactgtatccctagaaatgatgaataatttgccatttggacagttaacatccaggtgttacaaagtcagtgttaattctaaagatgatcatttctgccctttagaatggcttgtcccatcagcagatgaatgtgttaagcacaaagcatcttccttaaagcacaaagagagggactaactgatgctgcatctagaaaacacctttaagttgcctttcctctttgtagttagcgttcaggcaggtgacgtgtggaaagtctagggggttccattctggccatgcgagcccagctcctaccaacgtcggtaacttgagcagtccctgttgctggccagagactgcctggtcgccagcgctcaccatgggtgccaggatgcttcgcagaggcactgtgctcacggttggacttggtgtcagtgggaaagggcagtgtggggactgtcatttttgtgatttaataacacmcagtgaaaatccaggaagaatgaattaagcttcttctgggagttgtttattcctgctcgtgcttaagattgatgatttcgtgaaataaagaacatcatttcatttaagagatcatttcattaagatctctaatctgttttgagtctttacaaaatagccagttataaaatggggcttgatttgtttagactgaaggaagacgttttcccaaaatatactacagaagtgctacaatatttgcgatattaaaatgcctgcagattgaaaatgggggccactcatttcagaactgcaggaatggtgtagttacagatcgacataaactcctgccccccaacaatgccatgagctgcttagcccaggagacctgggagctatggcaggacggttaggccagccgatgagggactgcagagaggctactggaaggttaaggacccagagagaaatcgagaggtgccctacagcagccaggcctatcaggatccgtcacacacggcagcggcgtggacaccggcctgatgcagagcgtgacccctcctgctgggacctgtgttgtaagctcctatttgcttatcttgtttatttcaagcagaaatcaataaattccataaccctctgtattgactgcaatgtaagctgctgaggagactggttctgttggtcagtcaggtgtttgctcagccctgtctgatcacctgtgctgctctgtccctaactagtgacccatggaagcttccaagcagttttctcttcatcactactaacaaacnaaacactaagaaggcttagtatcgctctttttctgcggggctactctgaagtactgacttgctttccagtctgattcacgttagcagtgtgtacactactgtatcatcatcagcttcatcaccctgtaaaccaggctcctctgaagagactttggtgagatgaacgtgaggtaaaaatttcgttcggcaaaaagtgcaatatgtgtggtactttattttttatgttctttttttaaatctggggtattagtctgtgctttgggagaaatgcactagctctgcaattcccagctgggcaagtgtgtctctagtatctccacgcaactgatacactggtccctgtaaggcaaacagcatgttagcccgacaggaagagggggcccactttcacattcccrgtgacactgaccgtccccagctgccccctcgccacctctgcctgcactgccttctgtcaccgtgggaaaaggaggctgatggttctctacaccatccaccttgagaatccctgcgtgggagagcatcagggcccaccaggggagtggggatggggctcaggggctgttcatgcccatctgagcaaaccccttctctcttccatccacttttgcctcctaggaaagaaaaagtcagtggccctttcttcctcagatatcaagaactcccaagtgtttaaaccgtatgctggagtcagtggttgggacagacaggagcccaagactgaagccagcccttgcctcttgtgtcccttcccaactctggtgctggagtaatggggtgctctgcattttgatggggagcaaggggggaccccccctgtaggagtatcggcctctcccctgccccctaccctctctcgtggaccaaagtctccagcagaagrgactcatcataagactgacgactcccccacctccacccacacaccgagtgtcatcagtcctaaaggcagggaaacgctcacagaattctgcccacgggttagatgtggggagaaggatattctcagctccagagtgattaggtgatcagccagaaactaaggcaaggtgacaagcagcagcctggagtcacagttggtcccaggcgtgtgggcactaagcagcctctggagacatgcgggcagttgaggatgcaaggacacagtgagtgagtggcgctcctttttggggtcctccagcctctagtcaagccccaggttcgtaaatatgtttgtattacattttaaaacctgtatcaacagtcacatttaagctccctattggtttaaagaaaattcatactccaggtaactttttcccattcgacctcctatagagacaatatgcagtgtgtcatttcacagtctcagtccctgtgaacagtggctgacaccggtgccagggctgacctgctacactcaaactcctaaactgggctgcctctaactgcctcctgggaagccacccgagccactcggtctctttgtgcctaaacatgaaaggtgaaaattggagaacagggaagctcgtaagttggagtcattgtacaggcagggatctttgatcattttgttgcttctggaatttatttaatttttttttttttgagacagagtctcgctctgtcacccaggctggaatgcagtggcgtgatttcagctcactgcaacctccacctcctgggttcaagccattctcctgcctcagcctcccaagtagctgggactacaggtgtgtgctaccgcatccagctagtttgtatatttttagtagagatggggtttcaccatgttgtccaggctgatcttgaactcctgacctcaggtgacccacccaccttggcctcccaaagtactgggattacaggygtgagccaccacacccgacctggaatttttttatagaacttatcttcagagcaatgtatgaaagacaagagcagtatcagccgggcgcggtggctcacgcctgtaatcccaacactttgggaggccaaggcaggcggatcacgaggtcaggagattgagaccatcctaacacagtgaaacgccgtctctactaaaaatacaaaaaattagccgggcgtggtggtgggcgcctgtagttccagctactcgggaggctgaggcaggagaatggcgtgaacccgggaggcggagcttgcagtgagccaagatcgtgccactgcactccagcctgggcgacagagcaagactccacctcaaaaaaaaaaaaaaagacaagagcagtatcatctgcctctgtttctaaactggacaaagagattttcttaaagtttctatcatctcccttctgacaggttctacagtgtggtctgaagcacctgtaatgtcagagcccttgtctggcccttggtggcaggtgaacgaaagcagtggagcctctcaccttccagtagcctctcacattcttattttaccatttttgtcctaattaaggtagcctagctgattctagaagacagccatcctacgtgcacccccaccttgtgtccacatcttctccaggcaggtttcaacctatcagcagactcaggcacacactggggcacagatagagaaccaggcggcagcagtgctcgcagacccacccagggagagctgtgatgggttctgcccagatactctgctcgcccacccacaagggagcaatagcttatatttgtacattagttttaccaagcactttctcttctaaccctcacaacaattctatgaaattagctggggagatactgtccttatttttcacagctgaagaaaccaaagctttgggaagtttgtgacttctctgagatcacagctggtgatagaaggagctgggacacgcgcttgggttgactggcttctggttttggttctctggcttctagtgctggaagaagccctctctttcccttctctttcctcagtagcatctgactcttttcataagcaaacagctgtataaacaaagcccccattttggtcaagcacagggtgaatgtgatattgttcccacaaccttattctccactcaacagccgcctggctttggggaagaggccgccttcaggtgacagtgcagctgtccaggtggccgtgcactgaaccaggctgagggagacaaaaaccccgcagaccygcctgcctttcagcgtccagttaactgcagaagtttaggctcacctcaaagatgtctagtttttccaagttacaatacagcagtttcctacagaacacccccytcctcaattgccaaggggccgcatcgcacggcatcaggccaccactgcaggccagcagattccaccccaggaacggtcatgaactcagcctttgtctcaacgaggggcgtaacatttccttacagtcaagccccatcaactagaagtgcttattacttttaggattaaaaaagtaataacagactttgacttaatactctgtcttttcagaggcaaagtgggtgggtagaggggagctttaaaaatagaagtacaaaacaacatcctggaaacatatgaccccagatggaataatgtcacattccccagtgcagataatgggctgctgctggctctgtggtgtctgtctgcagaagatttgctcagtcaaggaaattcaagtggtgagacctttccaccatgggtggtaagagaaacctgccttcaccaaaatctctgaaggggaaagaagtggagagaaaggtttgcttcacttcggggactgcagtttgagaaataaaagggatacagagatatctgcactttgtagaaagggcaagattatttgcttatatctgaagggaggtgggtggttttgctggatgtttggtctgaaagagttacttttgataaagttaatctaaytgtagttatattttctgtgtgcttttttttaattactaagaaaaaaattggtgagttcagtagctttggtattatgagtgcaaatcataatagctccmatgtgaaaaaaaaaatcaaaagtataacttgtcacttaatgttagaaaattgcctaaaatgcagtgtaataaataatctctgtaccaaatagtaatttaaatggggtaattttctgcaaggaaaatgtactgtttttatgtttccaaccctcttgaattaaaataaaaacaacttcttttctaagagcccgggtgatgtgaatgtcaggttaatgcgatagggtttttgcctcatcgggccttgggtggaatttttagagtatggaaggtggctgtgttctctgagttctggtgctcatttcaggctgcagaaaaggacagtggataatatgttctcattgacgtcagcagggtaaataataccttgctctgaatcgcccgagtacacgttagccgctgcagatcgctgacggaagcactgctaaccgcagcctgcacaaggacagggccctgctgggcactgcttaattactgctccttgattctcagagtcccagggcaaagcgcatcagcccaggtagcctgggcaagggcctcatgccgcggtaggaggaggggaggcagatgcaggggtccccgaggacaggcagctacagggcaggggctggaaatgggaggggaggtgctgcgagctgccaggcaaaagacactgctacttagtcacgatgtcacatcttctctggggtctgccaaaggcctcgacactgcacgtgcgctcacacagtgcattccctcacatgggcggggcacccttttgaggcccagctccacgccctcagggtgctggaggcaccatgtgccaagctgctctcctgcatcctggacctgtttcagtgccaggccctgagtgaaaggccactgttatatccagcttgctggcagcaggatctcgactgaaatttggtttcactcaaaccattccaattgagcccatgctatagaacattgacagttccctccctgcggggtgagccgctggtctctgggtagcggtgggaaggtgcagtcggcagggcccacactggcagaggctggaaggagcggagccctctccaccaacgtccactgctgcctgactctgctgacaatagctcagttctgccttaaactggtggttaccccttggctacccaaaatttcagtattgctgagtttcatttcttttttaaggaaagcactaaatttcagtaacaatgttttccctttcccaccagatttctccatcattcttattctgtgttgccaaaaacaactccaatgccccaggacgcaggcaaaataacagaccagtggccagctaggccccaaccccgcactccccaggacactcttcagttctgcagcctttgtgagtcgaaggctccagcagggtggggaaggagagcagcagggaggcctgcaccccaaacccagggcctctgcccagtggatggaaccagacagcagtgcctgcacttcccaagttctccatcaagacgcaggacaggtgggaacagggcccaaggttctgttcctggcgagcagctgctttctgccccactagatcttaaatcgaggactcagagatccccttgacatgcaagctatggactattcccaaagagcatgtacacagacccagaacttcggacacagaatttcaggacaggagttggttcctgggcccccgaggcccccctccccaccagggaccaaagttaggaacccctgactcagcctctgctctctcaaaagttcttggccaggtgctgtggctgacacctgtaatcccaacaccttgggaggcagaggcaggtggatcatctgaggtcaggagttcaagaccagcctggccaacatggtgaaaccccatctccactaaaaatacaaaaattagccaggtgtggtggcgggcgcctgtaatcctagctactctggagactgaggcaggagaatcacttgaacctggtaggcagaggttgcagtgagctgagatcgcaccactgcactccagcctgagcgacacagcaagacttcatctcaaaaaacaaataaacaaacaaacaaagctcagagggaccctccctgctgatgggttctcatccctccctgggtggatccaggtgacagggagcctcctgcttgccagcagcccgtgggcaccatgggaggaagttctgggctttgtgcactaaatcctgggtgctatgtggctacaaaggaaatgtcacctgcacagaacatggctgctctgcccttctcatttcagccccaccagtgacttcaaaagctgagcagcccttgagcgatggattatcgcacaggaatcatcctggacaacgtcccttaggaggcagatgtgggtcctgactgaggcgaaggggctgggccctccctcagacacaggggccactggcacacctgcctccccccaggtatgaagctgtgcccacaaatcactcaggccaaacccaaggtcaggcagggcagagagcttgccaggcgcctcggccactgttctttccagcaagccttcctgctgctgcctccctttgtccgtgtttctggggggatttcctagggcagactgactcagagctgctctgaaattggcaaagagagattccaagcccagggaaagcatgagctgggctgagcccccgagccagcacagtgtctgggagggtggagacaggagggagccacagcatgggaagcggacttcccctggagccgagcccccaaaagctggataagcagaaaagctcagaaaatgtgggcccagaggaaaatgaggcattagggattgagcttctcaaagggagaactgagtcactctctcctcaggtcggctgggacagttctggctccagctcctcactccccaaaagtgaaatgccccgagtggggctgactgacaaatcagaccctgaggagactgttcattgtcaccccagggccacccacatagttgggggtgggacacaatggaatggaggaaaagcccaccaagccctttcctccaagcacgccacacatagctcccggagcgcacagccttgcctgtctcttctgtctgggatccgccagaactgccttccagtcgctacagagcccaaatgcttagcagtgcccctgtgccagcaaagtgagggctgaagggcaggcaggcagtggaagggaaccagggatgagagggccaggcaaggagggctaggcacagagcaagcctgggagagcaaggcccggctcccacccagcccgggagccaccacctggccaccctccaggcagggacattctgggaggcagcaaagaacctctgacagaggcctcggcccctggcgccctctcagccctgccactaacccaggcaaatcattgtaaaggctggtgtctccagtggtaacttggagcacaggctggctggtttcaccccagggtttactgcgaggggcaaatgcagcctggcctggcactcctggaagacccccactcccctggagggctgtcacagagtcccactctgcctatcttactttaactcttgcctgccccaacactaggtacagaaaatggctgcttcttgcctgtgagctctgtcttcactgacttaagggtggttgtgctgttctgagcatctgcttcaggctaagaactgggaactctgccccaggatttctgaattttcggaaatgagttctaggcatcagacatgggtaccacaaacataagaacatccctgagaatctatgtcacaggtaggaggacttttttatctccaactgttaggtcaagctccagtgtggaaaagacttggaaggcctgggggagtctttttgtgcggacagctcggcccctaggccccacagtggagagggcactgacaggaggtcagcctaaggacctgctcccgtgtgccctgtcaccagcctacgtctgacttccccatggacttcaaggtccaattgccttagctggaagccactggggatgggactgaacatccctgggctttggtctttgtcatcagtcctcagtttgactggactcacatctcctgtagtctttctgggttcaagagaacaaaatccgctggccaagaggttggcccttaaggagctcctccccttcacacactcccagcagagctcctcagagctgcccttgagaccccccagggcagcgcgaaggccctgccagcctaactctgtgggaggaacaggacatgcagctagatgctagaggctggctctaggacaagtgaggttcctgagctgcagaatggctccagcctcaggcccagaacagcctggttcaccagcaggtgctgattaaatccagagaagagacccgcatcgaaaggcacaagtcagagaccctcagggcccaagggactctctgagtttggggaaaataaggcaggcaggaaaaaaccagaaacaagagtagaaggggcatggaaggcagaagatggtcttagctgggacgtggcgcaggggctggtctcgggtcagtgtgtgtacaggacagactgtgtgcagagaaaaggaagaggaggagggtgggcgcagtcaggcagtgtctgtagccattatttatggatgcttcacttgattttagtctccaaacctgggctcggcatggagactgaatgtccctcacagctgctccttcctgcaataacaagactgacatcactgttgtcagggaaatggtgttttgattaaaatcatgtgacagctacttggtgattcaataaacaaatcccctgttaacccctgcctgacaaggcccgtcagcagcttcagcgggggcaccctgtgtcccgtccaggagtgagccgctgccggacccgcggcagcaaggtgtgggaggtgaccctcgctgctccctggcagatcctgcctgggtggacacatgtgacatccaacacagaggcacctccacagacttcaagggtgccaaggaggcgctcttcaccaagggagactggctctcgccctttcccttttctcttcaagtggcgggcccagccccagggatgtccaatggctccctgagggccctgaggctggctgagaactgacagttcccagggctctcaacagcagcgcgctcacgctcaccccattcggacagattggcaagtccactacgcaccctagacagtgaggggttaagaacaatttctggttgcaattggatgacttcctggatcactcacttggctgctggcccctgacacacagggctctgcctggcaacagccaattccctttccatctcaccctcgggtcattttccttaagtgaaacaaatgcatggaaggctccctgagtcatggggcgggggatttttctgagttaaatgaactgaagcctcagaggcctagcaccactgggcctcctttcctggaaaaaagattcccaaatagacatgccaggggttggaggagattcatgagggaccaaaaaacaatgatagcacctaccacctagggtgggtgaggatgacatgagatttgaagtgcctgacaaggtgctgcagtgaccaaggctcgagtaacggcaacttattctcagtaactcctcggctagcagaggcagcccgggccctgtcagagctgagcaggtcagccatgggagggccgcctcaatgatccacactcagatcgggtcataccacgcattcatggcatgagcagctggctctgaatttgtaggaagacgtaacccctttcttcccaaagaagtctgtggtttaggcctaaaaaatgtgtaactgtcactcccactccttcagccaagctctcctccctgaggcccagttctgtgaagacgacatggactccaagggctggccacccctggaatccaactggacagtggtcacccagcccttcctctcactgtgcggccactgcaggaacggctggagctgcccacggacaagtgtgcagcccctcaggaaggcaagaatgttctaagatgagtgactgcgattctggacctcaacaaaaggcaaaaaacgttttcatggtttcggttcacataaaatgaaaagccatgtgacttaaaaggcagcctttttgatgttacttcattgaattttcactaagcgaacctactagaatgggtgtgagaatgtcagatttttccccatgaactaaacgcagtctggcatccgcacgaggcagccaagccctg

SEQ ID NO: 94774 - DNA, 21850 bp, Homo sapiens
ttccctgtctctctccccctttgtcaccaggactctgtctacatcttccgggaaggggccttgccaccctatcggcagatgttctaccagttatgcgacttgaatgtggaagagtacgtatgggaggggccctgagacactgaggggggcccgtgggacccagggaccaaagcggtctctgaactcttccacttcacgtcggccttcatctccggcaagagcactcgcctgtctgggagtttggtgctgccgagagccctggcatgctggtggccctcgtagaggcggtgccctatagaaagccgtggctccaagctgcgcagagacagttcttactgttatgtccttgctcctcttccactgtccacataaaggccccatgaggtggttctcaatcccaggacccatcagatcccagaaaccttttatcgacttgttctcagtgatgtttaaagaattgcagggaaagggcactcactgggatgagaggagatgggaacacatcaaatacatcttgaactctgctgaaagccatggttcaccagaagcatgtgcagtggtaacacggccagcttcatgtgtgtgaggcggtccagggagcacacaggtttagggccccagctgggaacacacagcttgtgtttccagttcctctctgtagacttcgctcacggggctgcctttgatctcagtacagctctgcctctggcaaaaaccaacactggcatctcttagcagagacccgccctgggactttatgtcccaaccctctccccacccccaggttgcagaagatcattcaccgcaatgacggggcagagaattcctgcacagaacgggatgggtggtgcctccccaagaccagcracgagctcagggacaccatgtccctcatgatccggcagaccatccgctccaagaggcctggtaagagccgcttggggtaaagggggtccaggatgcctggtgatctcctttgagacagaggtgtccctaaggggacccattcctgggaaatggcacccaggtggcatcatcttgcccctggccctggtgggaggaggacattgtgagccagagcccagcccaggtgctggcatcaccccagctgcccagaggctgcctcagccgaggccctcagccctgcggtccggggcaggagacaagcccagaggggctgggtgcagcagcctggcactgccatcggggcctccacctgacgccctcacaccagcccatgtctttcagctgtgcatgcgcaggctctgcctctgtcttcttcctgttctgtgtggcccagccccttcctggaaccaggcagccctggcaggagtgagggccagctgcagggaaagtgaagggggcaacacctgccaggctgtgggtctcacgaggctcgggggagttataagaggccccctctctcagggaactcctcccaggcttggggaggaggcatcctggacccagccacgccccacagatctgaccgaagcaggggttcttggtcttgcttggaacccagattcagccccctttgggaatctaatcaagggtgtggaccctttcccagagaaaatggtgtgttcactcctgagggtccatgggcccttgaagctgctcatggctcccctgctgcaggattcccctgggtgcccgtcaaactacagcttccctggggggcctccaccccatacttacccaccagcttcttaagagctcgagctcggacccttatagtagtaaacaggctccccagagcctggtggcctttctggggccacccggcagcctgcatgggacacccatggccttgtctcctccggccccagctctcttttccagctcagccaaggctgatggcggaaaagagcagctgacgtacgagtctggggaagacgaggaggatgaggaggaggaggaagaggaggaggaggacttcaagccatccgacggcagtgaaaacgaaatggagacagagattctggactacgtgtgacagggcccaaggctgggcctccctgacccggccagactggtgtctggcctaatgagggagccggggctccccattgccacccacagtgcccggaatggccctaggaggccctctgaggagagctagagtcccagcaaagggtgcagctgaccctagcactggctgtgacatgctgcttggtgctgcctctggtcctgaggggttagggacatccccaaagggtataccctggctctgccacccatgaaccagcccagcatccagccagtgagtgggcacccaatgcctctcaggatgagaccagtaaatgccggaggtggagctgggcagctgtggagccccaggccacaggccagtctcgcttggctctcatgactgtggtggtggagatagtgtggggagcctcgcccatggtctcacgtggcaagaagtgcctttagctctggatcccaaccgtttggcacagctttggccacagccaggcccctctggaattgtccttattaaaccagtttcccgagaagtcttggtttcttggtgtgaatgttggcgctgcaggggagtcttcttattgccttggggcttgggccccctttgtcccttcatatattccttcattcattccttcattcattcagtgacatgctggcagtgctggcctgtgcccccctcacatgtggtcgggttgggtgagggcagctaggaggactccaggcctggggtcagttcttctctaaatgaataccttcttgacaaagtcatgggaaacgggccctgctgtcctgtggctgcccagtgtgaaactagtgggtcctgagcccaccgagcctgcctgcctggccccgctccccatgttgcccttggctgaggcacctcttgtgtctccccaagtcggcagcagcactccctcccaacctgtgtgcgtgccgagtatttgttgaagaaacagtcagttgtcagagaatggccctgttctggattggctggttgcttctgtgtggtgctgaacctgctcctctctcccctgtatttcctggggacaggtggaggctcagccagattcrggttcaaggtctcttcctaggctgcgtcagtctgcatgcacgggaggtctgcttactaggattgaccagcaggtttaggtgttgtcagcctgatgtgttggtcttttatctaacggtttttgggtttctgtggttttttgtttcatttgtgggtcttttttttttttttgagatggtcttgctttgtcacccaggttggagtgcagtgatgcaatcagggctcactgcagcctcaacctcctgggctcgggtgatccttccacctcagcctcctgagtagctggaactacaggttgtgtaccgccatgcccagataatttttgaatttttgtagagatgaggtctcactaatgttgtccaggctgggctcaagggatcctcccgcctcagccttccaaagtactgggattacaggtgtgagccactgcgtccagcctatttaatggcttttgaatagccgttgataattgcctggacctactacttccttaagggtgcaaaatggtgatttttttgaattatatcgttccctctgcatttagtagctggaatcctataaaggaatcttcctcatcgtctgtttgattaccctgaaatactattttcacagaaaagaagggaaaatgcctgttatcacctctaacagttttcagaacaatgagttagtgccctggcaagggccagtgacagggcaggagggggtggagagcgtgtttcctgggctgcctggtgaactctcacgtctgtcaattggaggcttgctttttcatgcccaacttgtctatctttgcccagaggcggcctcaggttgacctctgtagtcctttgacacaagccttgggtcttgggcaccttccttacttacagctaccacgatgctgcaggctccagcccctccctggcatttcctgttgcggacccggcccaaccatctccccagggtgcactcagtcggtgtgaatatggtgtttagagaccccagtctggtcaccaggggtggggcttgctcctgggattttgttactgctagggctttggaagagacagagccaggaaataakttttttttttttttttttgccaattttaaaaaaataaagtatgaggctgggcacggtggctcatgcctgtaatcccagcactttgggaggctgaggcgggcagatcacttgagctcaggagtttgagaccagcctggccaacatggtgaaacccagtctctactaaaaatacaaaaatcggctgggtgtgatggcgcacgcctgtaatcccagctacttcagaggctaaagcaggaggatccctcgaacccaggagttcaagactgcagtgagctatgattgtgccactgcactctagcctgggtgacagagaccctgtctcaaaaaaacaaacaaacaaaaaacctctgtggactccgggtgataatgacatgtcaatgtggattcatcaggtgttaacagctgtaccccctggtgggggatgttgataacgggggagactggagtggggcgaggacatacgggaaatctctgtaatcttcctctaattttgctgtgaacctaaagctgctctaaaaatgtacatagatataaactggggccttcctttccctctgccctgccccagccctcccccacctccttcctctccctgctgcctcccctctgccctcccctttcctccttagccactgtaaatgacactgcagcaaaggtctgaggcaaatgcctttgccctggggcgccccagccacctgcaggccccttatttcctgtggccgagctcctcctcccaccctccagtcctttccccagcctccctcgcccactaggcctcctgaattgctggcaccggctgtggtcgacagacagagggacagacgtggctctgcaggtccactcggtccctggcaccggccgcaggggtggcagaacgggagtgtggttggtgtgggaagcacaggccccagtgtctcctgggggactgttgggtgggaaggctctggctgccctcaccctgttcccatcactgcagagggctgtgcggtggctggagctgccactgagtgtctcggtgagggtgacctcacactggctgagcttaaaggccccatctgaagactttgttcgtggtgttctttcacttctcagagcctttcctggctccaggattaatacctgttcacagaaaatacgagtcgcctcctcctccacaacctcacacgaccttctcccttccctcccactggcctctttccctccccttctgtcactctgcctgggcatgccccagggcctcggctgggccctttgtttccacagggaaacctacatggttgggctagatgcctccgcacccccccacccacaccccctgagcctctagtcctccctcccaggacacatcaggctggatggtgacacttccacacccttgagtgggactgccttgtgctgctctgggattcgcacccagcttggactacccgctccacgggccccaggaaaagctcgtacagataaggtcagccacatgagtggagggcctgcagcatgctgccctttctgtcccagaagtcacgtgctyggtcccctctgaagcccctttggggacctaggggacaagcagggcatggagacatggagacaaagtatgcccttttctctgacagtgacaccaagccctgtgaacaaaccagaaggcagggcactgtgcaccctgcccggccccaccatcccccttaccacccgccaccttgccacctgcctctgctcccaggtaagtggtaacctgcacaggtgcactgtgggtttggggaaaactggatctccctgcacctgagggggtagaggggagggagtgcctgagagctcatgaacaagcatgtgaccttggatccagctccataaatacccgaggcccagggggagggccacccagaggctgatgctcaccatggggcgcctgcaactggttgtgttgggcctcacctgctgctgggcagtggcgagtgccgcgaaggtaagagcccagcagaggggcaggtcctgctgctctctcgctcaatcagatctggaaacttcgggccaggctgagaaagagcccagcacagccccgcagcagatccccgggcactcacgctcatttctatggggacaggtgccaggtagaacacaggatgcccaattccatttgaatttcagataaactgccaagaactgctgtgtaagtatgtcccatgcaatatttgaaacaaatttctatgggccgggcgcagtggctcacacctgcaatcccaccagtttgggaggccgaggtgggtggatcacttgaggtcaggagttggagaccagcctggccaacatggtgaaaccccgtctctactaaaaatacaaatattaatcgggcgtggtggtgggtgcctgtaatcccagctactcgggaggctgaggcaggagaaccgcttgaagctgggaggtggagattgcggtgagctgagatcacgctactgcactccagcctgggtgacagggcgagactctgtctcaaaaaatagaaaaagaaaaaaatgaaacatactaaaaaacaattcactgtttacctgaaattcaaatgtaactgggcctcttgaatttacatttgctaatcctggtgattccacctctctgttgttcccattttacagaaggggaaacgggcccaggggcagggagtgtggagagcaggcagacgggtggagagaagcaggcaggcagtttgcccagcatggcacagctgctgcctcctattcctgtgcaggaagctgaaagccgrgctactccacacccgggtccgggtccctccagaaagagagccggcaggcaggagctctctcgaggcatccataaattctaccctctctgcctgtgaaggagaagccacagaaaccccaagccccacaggaagccggtgtcggtgcccggcccagtccctgcccccagcaggagtcacacaggggaccccagatcccaacsacgctgttctgccgcctgcggtgtctcaggccctggggactcctgtctccacctctgctgcctgctctccacactccctggccctgggaccgggaggtttgggcagtggtcytgggctcctgactcaaaggagaggtcaccttcttcttgggcgagctcttcttggggtgctgagaggccttcggcaggtcatcacgacccctccccatttccccaccctgaggccctctggccagtctcaattgcacagggatcacgccactggcacaaggagacacagatgcctcgcaggggatgcccacgatgcctgcatgtgttgcttctggttsctttcctccagttccaaccgccgcactctcccacaccagtgtgacagggggcccatcaccctagacttcagagggctgctgggaccctggctgggcctgggggtgtagggccaccctgcccttccccacctggaacctggcacaggtgacagccagcaagcaatgacctggtccyaccatgcaccacgggaagagggagctgctgcccaagatggacaggaggtggcactggggcagacagctgcttctcaacagggtgacttcaagcccaaaagctgcccagcctcagttccgtcagggacagagggtggatgagcaccaacctccaggcccctcgtgggggtggacagcttggtgcacagaggccattttcatggcacagggaagcgtgkcgggggtggkaggtgtggtccctagggggttctttaccagcagggggctcaggaactgtggggacttggssatggggccatcgactttgtgcccagccagctaggccctgtgcagggagatgggaggagggaaaagcaggccccacccctcagaaaggaggaaggttggtgtgaaacatcccgggtacactgagcattgggtacactcctcccgggagctggacaggcctcccatgtgatggcaaacaggccgacaggagacacggctgttgctcgtcttccacatggggaaactgaggatcggagtcaaagctgggcggccatagccagaacccaaacctccatcccacctcttggccggcttccctagtgggaacactggttgaaccagtttcctctaagattctgggagcaggacacccccagggataaggagaggaacaggaatcctaaagccctgagcattgcagggcagggggtgctgcctgggtctcctgtgcagagctgtcctgctttgaagctgtctttgcctctgggcacgcggagtcggcttgccttgccccctccggattcaggccgatggggcttgagcccccctgaccctgcccgtgtctccctcgcagctgggcgccgtgtacacagaaggtgggttcgtggaaggcgtcaataagaagctcggcctcctgggtgactctgtggacatcttcaagggcatccccttcgcagctcccaccaaggccctggaaaatcctcagccacatcctggctggcaaggtgggagtgggtggtgccggactggccctgcggcggggcgggtgagggcggctgccttcctcatgccaactcctgccacctgcagggaccctgaaggccaagaacttcaagaagagatgcctgcaggccaccatcacccaggacagcacctacggggatgaagactgcctgtacctcaacatttgggtgccccagggcaggaagcaaggtctgcctcccctctactccccaagggaccctcccatgcagccactgccccgggtctactcctggcttgagtctgggggctgcaaagctgaacttccatgaaatcccacagaggcggggaggggagcgcccactgccgttgcccagcctggggcagggcagcsscttggagcacctccctgtcttggccccaggcacctgctgcacagggacaggggaccggctggagacagggccaggcggggcgtctggggtcaccagccgctcccccatctcagtctcccgggacctgcccgttatgatctggatctatggaggcgccttcctcatggggtccggccatggggccaacttcctcaacaactacctgtatgacggcgaggagatcgccacacgcggaaacgtcatcgtggtcaccttcaactaccgtgtcggcccccttgggttcctcagcactggggacgccaatctgccaggtgcgtgggtgccttcggccctgaggtgggssgaccagcatgctgagcccagcagggagattttcctcagcacccctcaccccaaacaaccagtggcggttcacagaaagacccggaagctggagtagaatcatgagatgcaggaggcccttggtagctgtagtaaaataaaagatgctgcagaggccgggagagatggctcacgcctgtaatcccagcactttaggaggcccacacaggtgggtcacttgagcgcagaagttcaagaccagcctgaaaatcactgggagacccccatctctacacaaaaattaaaaattagctggggactgggcgcggcggctcaccyctgtaatcccagcacgttgggagcccaaggtgggtagatcacctgaggtcaggagtttgagaccagcctgactaaaatggagaaacctcttctctactaaaaatacaaaattagccaggcgtggtggcgcttgcctgtaatcccayctactcgggaggctgaggcaggagaatcgcttgaactcaggaggcggaggttgcggtgagccgagatcatgccactgcactccagcctggagaacaagagtaaaactctgtctcaaaaaaaaaaaaaaaaaaaaaaatagccaggcgtggtatctcatgcctctgtcctcagctacctgggaggcagaggtggaaggatcgcttgagcccaggggttcaaagctgcagtgagccgtggtcgtgccactgcactccagcctgggcgacagagtgaggccccatctcaaaaataagaggctgtgggacagacagacaggcagacaggctgaggctcagagagaaaccaggagagcagagctgagtgagagacagagaacaataccttgaggcagagacagctgtggacacagaagtggcaggacacagacaggagggactggggcaggggcaggagaggtgcatgggcctgaccatcctgcccccgacaaacaccaccccctccagcaccacaycaacccaacctcctggggacccaccccatacagcmmcgcacccgactcagcctcctggggacccacccactccagcaaccaacgtgacctagtctcctggggacccaccccctccagcaccctacccgacccagcttcttagggacccaccatttgccaactggggctctgccatggccccaactctgttgagggcatttccaccccacctatgctgatctcccctcctggaggccaggcctgggccactggtctctagcaccccctcccctgccctgcccccaggtaactatggccttcgggatcagcacatggccattgcttgggtgaagaggaatatcgcggccttcgggggggaccccaacaacatcacgctcttcggggagtctgctggaggtgccagcgtctctctgcaggtctcgggatccctgtggggagggcctgccccacaggttgagaggaagctcaaacgggaaggggagggtgggaggaggagcgtggagctggggctgtggtgctggggtgtccttgtcccagcgtggggtgggcagagtggggagcggccttggtgacgggatttctgggtcccgtagaccctctccccctacaacaagggcctcatccggcgagccatcagccagagcggcgtggccctgagtccctgggtcatccagaaaaacccactcttctgggccaaaaaggtaaacggaggagggcagggctgggcggggtgggggctgtccacatttccgttctttatcctggaccccatccttgccttcaaatggttctgagccctgagctccggcctcacctacctgctggccttggttctgcccccaggtggctgagaaggtgggttgccctgtgggtgatgccgccaggatggcccagtgtctgaaggttactgatccccgagccctgacgctggcctataaggtgccgctggcaggcctggagtgtgagtagctgctcgggttggcccatggggtctcgaggtgggggttgaggggggtactgccagggagtactccggaggagagaggaaggtgccagagctgcggtcttgtcctgtcaccaactagctggtgtctcccctcgaaggccccagctgtaagggagagggggtgccgtttcttctttttttttgagatggagtctcactgttgcccaggctggagtgcagtgtcacgatctcagctcactgcaacctccacctcctgggttcaagtgattctctgactcaacctcccatgtagctgggactacaggcacatgccaccatgcccagataatttttctgtgtgtttagtagggatggagtttcatcgtgttagctaggatgatctcggtcttgggacctcatgatctgcccacctcggcctcccaaagtgctggaattacaggcgtgagccactgtgcccggccccttctttattcttatctcccatgagttacagactcccctttgagaagctgatgaacatttggggccccctcccccacctcatgcattcatatgcagtcatttgcatataattttagggagactcatagacctcagaccaagagcctttgtgctagatgaccgttcattcattcgttcattcattcagcaaacatttactgaaccgtagcactggggcccagcctccagctccactattctgtaccccgggaaggcctggggacccattccacaaacacctctgcatgtcagccttrccagcttsstacgctaaggctgtccctcactcattcttctatggcaacatgccatgaagccaagtcatctgcacgtttacctgacatgagctcaactgcacgggctggacaagcccaaacaaagcaacccccacggccccgctagaagcaaarcctgctgtgctgggcccagtgacagccaggccccgcctgcctcagcagccactgggtcctctaggggcccgtccaggggtctggagtacaatgcagacctcscmccatttttggctgatggactggaacccagccctgagagagggagctccttctccatcagttccctcagtggcttctaagtttcctccttcctgcttcaggcccagcaaagagagagaggagagggaggggctgccgctgaagaggacagatctggccctagacagtgactctcagcctggggacgtgtggcagggcctggagacatctgtgattgtcacagctggggagggggtgctcctggcacctcgtgggtcgaggccggggatgctctaaacatcctacagggcacaggatgcccctgatggtgcagaatcaaccctgccccaagtgtccatagatcagagaagggaggacatagccaattccagccctgagaggcaaggggcggctcaggggaaactgggaggtacaagaacctgctaacctgctggctctcccacccagaccccatgctgcactatgtgggcttcgtccctgtcattgatggagacttcatccccgctgacccgatcaacctgtacgccaacgccgccgacatcgactatatagcaggcaccaacaacatggacggccacatcttcgccagcatcgacatgcctgccatcaacaagggcaacaagaaagtcacggagtaagcagggggcacaggactcaggggcgacccgtgcgggagggccgccgggaaagcactggcgagggggccagcctggaggaggaaggcattgagtggaggactgggagtgaggaagttagcaccggtcggggtgagtatgcacacaccttcctgttggcacaggctgagtgtcagtgcctacttgattcccccagggaggacttctacaagctggtcagtgagttcacaatcaccaaggggctcagaggcgccaagacgacctttgatgtctacaccgagtcctgggcccaggacccatcccaggagaataagaagaagactgtggtggactttgagaccgatgtcctcttcctggtgcccaccgagattgccctagcccagcacagagccaatgccaagtgaggatctgggcagcgggtggctcctgggggccttcctggggtgctgcaccttccagccgaggcctcgctgtgggtggctctcaggtgtctgggttgtctgggaaagtggtgcttgagtccccacctgtgcctgcctgatccactttgctgaggcctggcaagacttgagggcctctttttacctcccagcctacagggctttacaaaccctatgatcctctgccctgctcagccctgcaccccatggtccttcccactggagagttcttgagctaccttccatcccccatgctgtgtgcactgagagaacactggacaatagtttctatccactgactcttatgggcctcaactttgcccataatttcagcccaccaccacattaaaraycttcatgtaataatagccaattataataaaaaataaggccagacacagtagctcatgcctgtaatcccagcacattgggaggtcaaggtgggaggatcacttgaggtcaggagtctgagactagtctggccaacatggcaaaaccccatctctactaaaaatacaaaarttatccaggcatggtggtgcatgcctataatccyagctactcaggaggctgaggtagcagaattgattgacccagggaggtggaggttgcagtgagcmgagattacgccactgcactccagcaggggcaacagagtgagactgtgtctcgaataaataagtaaataaataataaaaataaaaaataagttaggaatacgaaaaagataggaagataaaagtatacctagaagtctaggatgaaagctttgcagcaactaagcagtacatttagctgtgagcctcctttcagtcaaggcaaaaagggaaacagttgagggcctataccttgtccaatctaattgaagaatgcacattcacttggagagcaaaatatttcttgatactgaattctagaaggaaggtgcctcacaatgttttgtggaggtgaagtataaattcagctgaaattgtggaacccatgaatccatgaatttggttctcagctttcccttccctgggtgtaagaagccccatctcttcatgtgaattccccagacacttccctgcccactgcccgggacctccctccaagtccggtctctgggctgatcggtccccagtgagcaccctgcctacttgggtggtctctcccctccaggagtgccaagacctacgcctacctgttttcccatccctctcggatgcccgtctaccccaaatgggtgggggccgaccatrsagatgasatycagtacgttttcgggragcccttcgccacccccacgggctaccggccccaagacaggacagtctctaaggccatgatcgcctactggaccaactttgccaaaacagggtaagacgtgggttgagtgcagggcggagggccacagccgagaagggcctcccaccacgaggccttgttccctcayttgccagtggagggactttgggcaagtcacttaacctccccctgcatcggaatccatgtgtgtttgaggatgagagttactggcagagccccaagcccatgcacgtgcacagccagtgcccagtatgcagtgaggggcatggtgcccagggccagctcagagggcggggatggctcaggcgtgcaggtggagagcagggcttcagccccctgggagtccccagcccctgcacagcctcttctcactctgcagggaccccaacatgggcgactcggctgtgcccacacactgggaaccctacactacggaaaacagcggctacctggagatcaccaagaagatgggcagcagctccatgaagcggagcctgagaaccaacttcctgcgctactggaccctcacctatctggcgctgcccacagtgaccgaccaggaggccacccctgtgccccccacaggggactccgaggccactccygtgccccccacgggtgactccgagaccgcccccgtgccgcccacgggtgactccggggccccccccgtgccgcccacgggtgactccggggccccccccgtgccgcccacgggtgactccggggccccccccgtgccgcccacgggtgactccggggccccccccgtgccgcccacgggtgactccggggccccccccgtgccgcccacgggtgactccggsgccccccccgtgccgcccacgggtgaykccggcsccccccccgtgccgcccacgggtgacgccgggsccccccccgtgccgcccacgggtgackccggcgccccccccgtgccgcccacgggtgactccggggccccccccgtgacccccacgggtgactccgagaccgcccccgtgccgcccacgggtgactccggggccccccctgtgccccccacgggtgactctgaggctgcccctgtgccccccacagatgactccaaggaagctcagatgcctgcagtcattaggttttagcgtcccatgagccttggtatcaagaggccacaagagtgggaccccaggggctcccctcccatcttgagctcttcctgaataaagcctcatacccctgtcggtgtctttctttgctcccaaggctaagctgcaggatctgcctggcaattgcaggcttgctttttcatgcccagctcatcttatctttggccagaggcggcctcaggttgacctctgtagtcctttgactcaacccttgggtcttgggcaccttccttacttgcagccaccatgatggtgcaggctccagcccctccctggcatttcctgccatggacccggcccaaccatctccgcagggtgcactccttcgtcggtgtgaatatggtgtttagagaccccaatctggtcaccaggggtggtgcttgctcctgggatttcgttactgctagggctttggaagagacagagccaggaaataagtatttttttttaaccagtaaaaaaaaaaaaaagtatgaggccgggcacagtggctcacacctgtagtcccagcactttgggaggctgaggcaggaggatcacttgaggtcaggagttggagactagcctggccaacatggtgaaaccccatctgtactaaaaatacaaaaaattagccaggtgtggtagtgcgcacctgaggtcccagctgaggcaggagaatcacttgagctcgggaggtagaggctgcagtgagccgagatcgcaccactgcacttgagcctgggcaacagagcaaggcaccatctcaaataataataaaagtatgaattcatacaggtatttcccagttgtaagactgtcaggttttacttctctcattttacacttgtttctttctccgcctatgctgaaagtctgggttcgacagcaccaacataattgtttatgttctttttcctataacatacatatgctagttttgaaatataagatataggccgggtgcagtggctcacgcctgtaatcccagcgctttgggaggccaaggcaggcggatcacgaggtcaggagatcgagaccatcctggctaacacgatgaaaccccgtctctactaaaaaaatacaaaaaaagttagccaggcacggtggcgggcacctgtagtcccagctactcgggaggctgaggcaggagaatggtgggaacctgggaggcagagcttgcagtgagctgagatcacgccactgcactccaggctgggcgacagagcgagactccgtctcaaaaaaaaaaaaagaaatataagatattgcaataaatcatatgagttacatttaaagtacatgaatttaaataaattataaattatataaagtaatatatgataaaatattaagactactaaggatcatttaagatcgttttgctcattctccttaaattatcccacagaataaacaattgtgcctctaggtcccttaagtaactctgtggttacttaattggtagattaagccatctaccgatacacagttagaagtttggggtttttttaatcatgcagatgtagacactgaccaaagacttcttgttttttcctttgagactgagtttcgctcttatcacccaggctagggtgcaatggcatgatcttagctcactgcaacctctgcctcctgggttcaagctattctcctgcctcaggttcctgagtagctgggcctacaggcgtgcgccactacgttcggctgattttttttgacttttagtagagacagagtttcaccattttggccaggctgatcttgaactcttgacctcaggtgatctgcccgcctcagcctcccaatgtgctgggattacaggcatgagccactgtgctcagcccctacctaggacttttaagcggatgtttctctgcctgaaaacaaagtttaagtgttccttttagagcaacctgtaaacagtaactgtagaccctgatatttattgtgccatgaacttctcatccatagttttgctgagtgaaggtattgatgggaaatgtgaaattcagagaggcaggcacgggcccaggccacacagctggggagcggcagcattggttgggacctgtgttggatttgcaattctgccttgtgtgatgtaacctggacttcattaaaattaaaaatttctgctctgcaaagacactgttaggaaaacaaagacaagccacagactgggaaaacattagcaaaagacatccgataaagcactgttatccaaaaatatacaaagagcttttaacactcaataaataaaaaaaaaacctgattccacaatgggtcaaaggcagacacctcaccagagaagctatacaggtggcaaataagcatctgaaaagttaacctaggttgggtgcagtggctcacacctggaatcccatcacatgcggcggccaaggcaggaggatctcttgaggctagttaattcaagaccagcctggacagcatagtaagaccccatctgtatttttttcaaaaagatatccacatcatatgttgtcaggaaaacgcaaatttaaacagtgagctaccactgcatacctgtaagaatggccaaaatccagaaaattggccaaacaccaaatgctgatgaggacgtggagcaaccagaactctcattcagtgctgttgggaataacaaacggtacagccactttggaagacagtttggcagtttcccaaaacataatgcctatttcttccatgtgatccagcactctgattccttaagatttactcaacctgcaaacagatgtttatagctgtaaaccaaagataaaactccaagcccggcagctgactgaatggaacgccctcttggccagggaaacccaaagggacctgaaggttcaggccatgatgggcagtaggggtcggacatgcctcatcatactctcttccctttggaattcaggcacagctgaccagctttaaaacagagatcttaagactgacagaacagactctgtagaaataagatataaaattccaacctgactgaagtatagcatcacatgacagatagcaggtcatgaaacaaattgaaatattttaccccaaaatgtatttctttgacgtattttggaatggccctgcacagctgtctcttgtggaggaaatttgcattctgtagagaatctccttcccttaccaggtcatttctgaagagtccagcaccctttagaggtctgagaggaaacatttgccatctattgtctctaagggaagccatctatgagatttcatctacataacaaaaatcttggaccaggcacggtggctcatgcctgcaatcccagcactttgggaggccgaggtgggcagatcacctgaggtcgggagtttgagaccagcctgacgaacatggagaaacccaaactctactaaaaatacaaaaatttagctgggcgtggtggcgcatgcctgtaatcccagctattcagagggtggaggtaggagaattgcttgaacctgggaggtggagattgcagtgagcagagatcatgccattgcactccagcctgagcaacaagagtgaaactctgtctcaaaaaaaaaaaaaaaaaaaagaaagagaaagagagaaagaaaagaaaagaaagaaagaaagagaaccttggtcttcacaactttttaacttaaccaagatcctcctttgtattgattccagggtttttgataataactctttcaaccaattgctaattagaaaatctttgaattcacctgtgatttttaagccatcccaaaccctctcacattactgatttatgtcttatgtccccctgaaatgtataaaaccaagctgtaactcaactgcctggggcacatgttctcaggaactcttgacaccatgcctctggttacagtcaatcatatttggctcaggataaatctcgtcaaatattttacagtttgggttttttggtcaacatagcagatgtttatagtagctttatccatcattgccacaacctggaggtaaccaagaagtccttcagcaggtgaatggatacaatacatccagacaatggaatctttttcaggtctaatgttgcgggacgcagaggactagagagaccagtacaggtgaatacaggaggatatttattttaaggtatgcaccagctcagtggattcacatccaaaaaggtgagccttgaacaaagacagagtggggtttttataagcaggcttacaaaagaaaaacaaaggcagtcaatcatagagtgtataacttgtggtcttgcctagctggtggccttgtagctgtgtcaaaagaaaaacaagaactggctaaatacaaatatttgcaagacatagtcatgcttaagaggccagggaaaggagtaacagtaaaggaatttgtctttctctctttttttcctcagccttgctctggaggtggggggctgtctggagctcattcctttggccttggctttttggacagcgttatcttataactgtcctcgaagtgagctgctaagcagaggaaaacttgtttctttttctttttaaccctcactacatttttccccacttcaagtccttttataaaagaagtttaatagaaggcctcactattacttaattctgcgtcaagagacaagttttcttctttgggcaaaggttgatatttatgcagagccgtcagctgagtggtagtttgcctagctactattgcctctatagctgattgaatgcttctagcaaggagaggtaagagacaaaggagtattaggcaacttcctagtacagccagaactactgctattaaagtcttgaaccctctgaaaaatgaaaaccagtctccaaagagagaatctggagaccaccctttccaagtttgaactggaacatgggcgaattttctcattcttgcagttattcctataattgcctttccattgtcatcaatttccaggcagcaattagttcgattgaactttccacatcctcctccttcctgggcgaggaggcagtctaaagctaatctattttgatagatagcattcctcatttttgtagattgctgggctaatagatctaaagcccttgctgtttaattagtgatgatctcaagcactatctataacctcatgatgcagttaagcatgtaaataggagaccagtaaccccatgagccatcgtcccccaccaggtagctggcccatagtagtgaattattctctcagggggccattcatcatctttccagtcccctatggctgtgtctttctttacgctccttctatatctttctctcttctcatcatagacaggatactctaaggcttctccttgtcttagagggattaagaagaaagacggcctaattgttccaagtacacaggcccctgtccatttggctggtagctgtcggtaggcccgtggcccacagatccgatagagaccagagggtgcttgccaggtatttggagcttcaagctgataccaggtgtggtttagagcagagaaacgggagaatggatttggatgaggtggtttgggactatctttgccgcgccataaagtttttcctaattttttaacatgtttctgttccaaacatgttaattcccctactgggtctgtagaagtttttccctagcaagcaatacagtatttcccgataatagaagtttttaagagccagacgcttgaacttgtgggagtcagtttgcaggaagggtcagtcagagtaaagttattttgaggcattaactcttttgcttcccaaggccattggtctcccatgtttgtccctccacaaacataacatgaggagatgcctaggctgccagcaatgttttcagccatctgagcaaataggtttttggctaaagggggaggctcggcaacttttgatttatgtgctcatagaatgacttaaagactcggaattgctgctgggatgacttcttggtttgagtcctctttatgatatataaatttactttagctttttgactgctgctttgtaatgccatggagtaacctgtagtccatataggtagatccggctctaagatagtaagatttacaggattgcaagtgcttgtcttacagtccggttttgctggcgct

SEQ ID NO: 94775 - DNA, 16849 bp, Homo sapiens
gaactactgctattaaagtcttgaaccctctgaaaaatgaaaaccagtctccaaagagagaatctggagaccaccctttccaagtttgaactggaacatgggcgaattttctcattcttgcagttattcctataattgcctttccattgtcatcaatttccaggcagcaattagttcgattgaactttccacatcctcctccttcctgggcgaggaggcagtctaaagctaatctattttgatagatagcattcctcatttttgtagattgctgggctaatagatctaaagcccttgctgtttaattagtgatgatctcaagcactatctataacctcatgatgcagttaagcatgtaaataggagaccagtaaccccatgagccatcgtcccccaccaggtagctggcccatagtagtgaattattctctcagggggccattcatcatctttccagtcccctatggctgtgtctttctttacgctccttctatatctttctctcttctcatcatagacaggatactctaaggcttctccttgtcttagagggattaagaagaaagacggcctaattgttccaagtacacaggcccctgtccatttggctggtagctgtcggtaggcccgtggcccacagatccgatagagaccagagggtgcttgccaggtatttggagcttcaagctgataccaggtgtggtttagagcagagaaacgggagaatggatttggatgaggtggtttgggactatctttgccgcgccataaagtttttcctaattttttaacatgtttctgttccaaacatgttaattcccctactgggtctgtagaagtttttccctagcaagcaatacagtatttcccgataatagaagtttttaagagccagacgcttgaacttgtgggagtcagtttgcaggaagggtcagtcagagtaaagttattttgaggcattaactcttttgcttcccaaggccattggtctcccatgtttgtccctccacaaacataacatgaggagatgcctaggctgccagcaatgttttcagccatctgagcaaataggtttttggctaaagggggaggctcggcaacttttgatttatgtgctcatagaatgacttaaagactcggaattgctgctgggatgacttcttggtttgagtcctctttatgatatataaatttactttagctttttgactgctgctttgtaatgccatggagtaacctgtagtccatataggtagatccggctctaagatagtaagatttacaggattgcaagtgcttgtcttacagtccggttttgctggcgctttgatgagcaagattggctttagcctcagtgatgatcggtcagtgaactgtgttgtgcggttccagcaagctattgctagggccttggaggggcaaacagggtatgcacatacaattttgtactggcagtttgtacagtaccctgtaggaccagagattgtgagataggttgggttcacggatgttaactgacaaatatcaaagtatatggctatagccccccctggggggtagaggcttggctttgatttataagacttcctttctttgactcagtatgaacctcaaaccaagtcctaggtaaagacttagaaggtcatagcatatataaggctggccatttcctgggtcacaaattgaataggtgatccgattgtaagtacaagttcctaggtgagtccctgtacactcctaataagtatagaataatagagtcctagttatactgtttcctgaccctgtagtgtgtgtacaatggggacactttctaagggtacttattttaacatggtcaaggggggtgataacagcaaaacaatgtacagcgtattcatatccagcaaggacagaagagggccttgcctgggggaggagattgagcacagcaacggaacaatagtaaaacagttagtattataaggaagactactagtcctaagatttctaaccacatttacttgcttgacgagtcctcaagcttcggccgtgcgtagactagtcagcttcgggtgtgtgactagagcggggcttgtctccttaagcttcagccgtgcgttgactggtcagcctcacgagtgaccagagcagggtgatcgtcctcagcagcagcttgttgtcttctcaggatcagctgggttggatgatctgtgtcctgctggctggtccactcgtcctgagctgccggtttcagccgactgtggtggatccaagacataacacctgcaactttaacagcaacgggagtggacaagatgacagtacagggcccaccccatatgggtcctagagaagttggattccactttttaacccaaacagagtctccagatttaaaggggcacactggtctatcaggcttacaggcatcctttcttgtacccagccatggacctcttgcatggctattcctaaagcctgcatttgctttcttaaggttaattcctctagttcctggagatcacctttaatttgacctatgatttggggttggccaactgaacaaaacctcatagggtaaatactcagtttgtttggtgggggtgcacctgtctcggaggaggaccataggcaaaacctgaacttatctcagatgagcttcctggcaatatttcttcagtagctgcttgagtgtccacttcatgcgttccacttttcctcaactatgcagccaataggctgtgtgtaacttccattttatttttaacagtcttgttaaatctcgtactatttcagctacaaatgccggcccattgtctgactgtaaagatagaggcagtccaaacctggggataatatcttttaacagtactttagtcatttgtcgtgctttttctgtcctggtggggaaagcttcaacctatcctgaaaaagatgcaaataaacactagaatataccgatagcttctggcacggggcatttcgtttaagtctataaggaagttttcacaaggcatggctccttctcctgttctgtttcccagaggaggggttccttttctcctctttttgtaacttcatataatagctcagccatcagcgagaaatctggaatccagatacggcagaatcctgctgccttcaacttctaatgtgaccacagactcctggaggcccagtgagaaggagcccggtctgtcctagtcctcacatccttcagctcctgccagcccaatcagattagtatctggttcctctaaggtatggcagcccttggccaatggcctctttgtctcacggccttggccatttccctcattgccttctggacattcatccttccagtgcccccttttttttttttttttttttttttttgcatctctcacattgatccctctctagccttggtcagctcttaaatccttgtctaacttgacctcttccacgtccacatctgcgtccacatcctctcacatggctaatttctctttctataagggctgctgccaacagatccgcctttttcttaagcctttcatctgcttccttttcccttccttagttctcctgctcctgcagtcggctggcagggctgggcaaggacaaacctgaatataaaattcagtgtgtctgctgcccaccagtcctttatgcttggagaagagagagatgtttctctttttcytctcttctatctattaaacctccgctcctaaagtcctcgtgtttgtccctgtcctaaattttcctggtgcatgacaacaaaccccgggtatgtagaccagacaatgtagccgcttcaagggatttgagtgaggaaggaatgaatcaatggagcccaggggggttttagagcattcaaactattcaggatgatactatggggaccaagggagagctttccccttctccctctgaaggaccactgaaaaatcactgacagattgtctcataggagaaaagcatacatatttgtttaatgcgtatacacgggagcctttgaaatggagacccaacttctcaacagagtacagagcttagataccatcttgaggttccacaaagaatgtgggctcagagcatggccaaaactaggttaggggctgggcgcagtggctcacaactgtcatcccagcactttgggaggctgaggcgggcagatcacttgagctcaggagttcgagaccagcctggccaacatggcgaaactccctctctactaaaaatacaaaaattagccgggtgtgatggcgggcgcctgtaatcccagctacttgagaggctaaagcaggaggatcccttgagcccaggagttcaagactgcagtgagctgttattgtgccactgccctctagcctgggtgatagtgagaccctgtctcaaaacaaacaaaaaaacccctaaatctgtggactctgggtgattatgacatgtcaatgtaggttcataaagtataacagctgtaccccctggtgggggatgttgataatgggggagactgggttggggcgaggacatacgggaaatctctgtaaccttcttctaattttgctgtgaacctaaatctgctctaaaaatgtatatatataaaaagtggggccttcctttccctctcccctgccccagccctctcccccacctccttcctctccctgctgcctcccctctgccctcccctttcctccttagccactgtaaatgacactgcagtgaatatcctggagcacaaagggcatgtctcccagttcagaattacctcctttatttagggcaggttctcagaactagagtagccgggcaaaggtctgaggcaaatgcctttgccctggggcgccccagccacctgcaggccccttatttcctgtggccgagctcctcctcccaccctccagtcctttccccagcctccctcgcccactaggcctcctgaattgctggcaccggctgtggtcgacagacagagggacagacgtggctctgcaggtccactcggtccctggcaccggccgcaggggtggcagaacgggagtgtggttggtgtgggaagcacaggccccagtgtctcctgggggactgttgggtgggaaggctctggctgccctcaccctgttcccatcactgcagagggctgtgcggtggctggagctgccaccgagcgtctcggtgagggtgacctcacactggctgagcttacaggccccatcttaagactttgttcgtggtgttctttcacttctcagagcctttcctggctccaggattaatacctgttcacagaaaatacgagtggcctcctcttcctccacaacctcacacgaccttctcccttccctcccgctggcctccttttctctcctgtcactctgcctgggcatgccccagggccttggctgtgtcctttctttcctcagggaagaccacaagtttgggctagatgcctccgcacccccccacccacaccccctgagcctctagtcctccctcccaggatgcatcaggctggatggtgacatctccccacccttgaatgagacggctttatgctgctctgggacccgcacccagcttggactgcttgctccatggccccaggaaaagctcgtacagataaggtcmgccacttgggtggggggcccacagcatgtcaccctctctgtcccagaagtcacgtgcttggtcccctgtgaagcccctytggggacctaggggacaggcagggcatggagacaaagtatgcccttttctctgacagtgacaccaagccctgtgaacaaaccagaaggcagggcactgtgcaccctgcccggccccaccatcccccttaccacccgccaccttgccacctgcctctgctcccaggtaagtggtaacctgcacaggtgcactgtgggtttkgggaaaactggatctccctgcacctgagggtgtagaggggagggagtgcctgagagctcatgaacaagcatgtgaccttggatccagctccataaatacccgaggcccagggggagggccacccagaggctgatgctcaccatggggcgcctgcaactggttgtgttgggcctcacctgctgctgggcagtggcgagtgcygcgaaggtaagagcccagcagaggggcaggtcctgctgctctctcgctcaatcagatctggaaacttcgggccaggctgagaaagagcccagcacagccccgcagcagatcccgggcactcacgctcatttctatggggacaggtgccaggtagaacacaggatgcccaattccatttgaatttcagataaactgccaagaactgctgtgtaagtatgtcccatgcaatatttgaaacaaatttctatgggccgggcgcagtggctcacacctgcaatcccaccagtttgggaggccgaggtgggtggatcacttgaggtcaggagttggagaccagcctggccaacatggtgaaaccccgtctctactaaaaatacaaatattaatcgggcgtggtggtgggtgcctgtaatcccagctactcgggaggctgaggcaggagaaccgcttgaagctgggaggtggagattgcggtgagctgagatcacgctactgcactccagcctgggtgacagggcgagactctgtctcaaaaaatagaaaaagaaaaaaatgaaacatactaaaaaacaattcactgtttacctgaaattcaaatgtaactgggcctcttgaatttacatttgctaatcctggtgattccacctaccaacctctctgttgttcccattttacagaaggggaaacgggcccaggggcagggagtgtggagagcaggcagacggstggagagaagcaggcaggcagtttgcccagcatggcacagctgctgcctcctattcctgtgcaggaagctgaaagccgagctactccacacccgggtccgggtccctccagaaagagagccggcaggcaggagctctctcgaggcatccataaattctaccctctctgcctgtgaaggagaagccacagaaaccccaagccccacaggaagccggtgtcggtgcccggcccagtccctgcccccagcaggagtcacacaggggaccccagatcccaaccacgctgttctgccgcctgcggtgtctcaggccctggggactcctgtctccacctctgctgcctgctctccacactccctggccctgggaccgggaggtttgggcagtggtcctgggctcctgactcaaaggasaggtcaccttcttcttgggcgagctcttcttggggtgctgagaggccttcggcaggtcatcacgacccctccccatttccccaccctgaggccctcaggatggacaagcccaaacaaagcaacccccacggccccgctagaagcaaarcctgctgtgctgggcccagtgacagccaggccccgcctgcctcagcagccactgggtcctctaggggcccgtccagggstctggagtacaatgcagacctcscaccatttttggctgatggactggaacccagccctgagagagggagctccttctccatcagttccctcagtggcttctaagtttcctccttcctgcttcaggcccagcaaagagagagaggagagggaggggctgccgctgaagaggacagatctggccctagacagtggctctcagcctggggacgtgtggcagggcctggagacatctgtgattgtcacagctggggagggggtgctcctggcacctcgtgggtcgaggccggggatgctctaaacatcctacagggcacaggatgcccctgatggtgcagaatcaaccctgccccaagtgtccatagatcagagaagggaggacatagccaattccagccctgagaggcaaggggcggctcaggggaaactgggaggtacaagaacctgctaacctgctggctctcccacccagaccccatgctgcactatgtgggcttcgtccctgtcattgatggagacttcatccccgctgacccgatcaacctgtacgccaacgccgccgacatcgactatatagcaggcaccaacaacatggacggccacatcttcgccagcatcgacatgcctgccatcaacaagggcaacaagaaagtcacggagtaagcagggggcacaggactcaggggcgacccgtgcgggagggccgccgggaaagcactggcgagggggccagcctggaggaggaaggcattgagtggaggactgggagtgaggaagttagcaccggtcggggtgagtatgcacacaccttcctgttggcacaggctgagtgtcagtgcctacttgattcccccagggaggacttctacaagctggtcagtgagttcacaatcaccaaggggctcagaggcgccaagacgacctttgatgtctacaccgagtcctgggcccaggacccatcccaggagaataagaagaagactgtggtggactttgagaccgatgtcctcttcctggtgcccaccgagattgccctagcccagcacagagccaatgccaagtgaggatctgggcagcgggtggctcctgggggccttcctggggtgctgcaccttccagccgaggcctcgctgtgggtggctctcaggtgtctgggttgtctgggaaagtggtgcttgagtccccacctgtgcctgcctgatccactttgctgaggcctggcaagacttgagggcctctttttacctcccagcctacagggctttacaaaccctatgatcctctgccctgctcagccctgcaccccatggtccttcccactggagagttcttgagctaccttccatcccccatgctgtgtgcactgagagaacactggacaatrgtttctatccactgactctyatgggcctcaactttgccaccttacaaaataatttcagcccaaggcctcattaaagaccttcatgtaataatagccaattagaaggaaaaataaggccgagtgcagtggctcgcccttgtaatcccagcacattgggaggtcaaggtgggaggatcacttgaggtcaggagtctgagactagtctggccaacatggcaaaaccccatctctactaaaaatacaaaaattatccaggcatggtggtgcacacctgtgatcccagctactcaggaggctgaggcagcagaatcagttgaacccaggaggtggaggttgcagtgagcmgagattacgccactgcactccagcaggggcaacagagtgagactgtgtctcgaataaataagtaaataaataaataataaaaattaaaaataaattagcaatctgaaaaagataggaagataaaagtatacctagaagtctaggatgaaagctttgcagcaactaagcagtacatttagctgtgagcctcctttcagtcaaggcaaaaagggaaacagttgagggcctataccttgtccaatctaattgaagaatgcacattcacttggagagcaaaatatttcttgatactgaattctagaaggaaggtgcctcacaatgttttgtggaggtgaagtataaattcagctgaaattgtggaacccatgaatccatgaatttggttctcagctttcccttccctgggtgtaagaagccccatctcttcatgtgaattccccagacacttccctgcccactgcccgggacctccctccaagtccggtctctgggctgatcggtccccagtgagcaccctgcctacttgggtggtctctcccctccaggagtgccaagacctacgcctacctgttttcccatccctctcggatgcccgtctaccccaaatgggtgggggccgaccatrsagatgasatccagtacatctttgggragccctttgccaccccactccgggctaccggccccragacaggayagtctctaaggcyatgaccgcctactggaccaactttgccaaaacagggtaagacgtgggttgagtgcagggcggagggccacagccragaagggcctcccaccaygaggccttgttccctcacttgccagtggagggactttgggcaagtcacttaacctccccctgcatcggaatccatgtgtgtttgaggatgagagttactggcagagccccaatcccgtgcacgtgcacagccagtgcccagtatgcagtgaggggcatggtgcccagggccagctcagagggyggggatggctcaggcgtgcaggtgcagagcagggcttcagccccctgggagtccccagcccctgcacagcctcttctcactctgcagggaccccaacatgggcsactcggctgtgcccacacactgggaaccctacactacggaaaacagcggctacctggagatcaccaagaagatgggcagcagctccatgaagcggagcctgagaaccaacttcctgcgctactggaccctcacctatctggcgctgcccacagtgaccgaccaggaggccagttccatgccctccacaggggactctgaggccactcccrtctcccccgacaggcaactccgagtctgcccccgtccctgcaacgggtgactctcaggatgcccctgtgcccctcacaagtgactctgaggctgcccccgtgyccccctyaggtgactctgaggctcccccgtaycccctacgggtgactctgaggcccgtgcccaccttgggtgacactgaggctgccccatccccgctaygggtgactctgaggccgcccctgtgtcccccacagatgactccgaggaagctcagatgctgcagtcattagtttctagtgtcccatcagccttggtctcaagaggccgagagggtgcaaccccaggggctcccctcccatcttgagctcttcctgaataaaacctcattcccctgtctggcgtctttgctctcaaggctaagctgcaggaaggagtggacctcagttacccttacagcaccaggtgggggcccaacctgtgaccccatcacctggcacaatccccaggctctggggcgttgatggtgccatcctcactttcgagtggaggaggtgggcccagggaagttgattggcaggcccaggagtgggagtcaggcacaggtcactccagagcctgcccttccctgaatggaaccaggctgctggctcccaggggctagattctgtcccagatggtgggaggggctggtggcagctgcagtcagagagggagctggggtctggcaggctgtggctgcctctggactaggggatcccagccacacccacatcctctgggtgcagggagtgaagtctgtgttctaactggggtctggggaacccgcctgggaaaagaaagggattctgctcctccagccggatgyaagtggaagaaagaataacacatcacaccagaaggttggaagcagaggatggggagggtgctgggcagtaggcgctgggtggtgggcctctggggggtgcccaatggctctggcagagttgacggggcagsggcagagggcagaaggcagagtcaggagtactcctgcctctgctgggtctaagcccaggcacatcactgagcacttgaccagcctgacctcaccatggccttgtgaggtgggtatggtgtacaccctccttttagacgtttatagatatttagaggaaaatgaggccctgacagggcatcacgtgcccaaggtcactcagagcaaggatttgaacccaggtccctgactccaaagccagtgcttggaacaacgttgggggtcttcttccccactcctcacctaccttctaaacaggcactgtggggcagggtggggcttagatgagagaaaattctggaatcctgagcaactttgcctggggggctccgcggtggagggcagaagcacccaaggaccagctagccactctctctgcccctccagcctacaggtgggaggataaggctcagggccgacaagtcctgtggcctcatgcagcagagctgagccgggacgaaccctgtcccctggagaagcaggggacaccctggctggctgtgaccactttggccaccctgggcttcctgggttggtcaaggggtctctggtgtaaaaaggggactccctgtcaaagactgagtgagatggagctgcccggcaatgtgggcctctcccagtgactgtccctgttctcttgggcaacggaagcccgaggatacaatgatgtgtcccttccttggccacactggtacccacagggattattgtgtttctacctgtggagtcagctctcaggcgcctccagcactgtgggagaaacccctgggaccccagtgcctcttcccaacccttgggactggcacccgtctcttgttgagagaaagcacagtcatgtctgtcattcagaaaatcacatccctggatggccaagccacgtcagaagggatgggctgtggggatccaagcgtgttctacctctgggctgcacccgccatccctctgcttcggtttgaatgcttgtccccgccaaaactcatgctgaaatttaatccccaatgtggcagtattgagaggtgctgcctttaagaggtgactggatcatgaggccctgtccccgtagatggattcatccattcatggattcatgggttagtgggttatcatgggagggtaactggtggctttgtaagaggaagagagacttgagctagcatgtgagcaggctcagcatcctcaccacgtgatgcccagtaccgtctcgggacaccagagtccccaccagcaagaaggccttcacctgctgcagcctctctgaggcaggaggagagggaattagggaagccaagggttggggcataagcaaaggaacagcaggtacagcccgttcacataagccagagaacagcaggtgcagcccgttctcataagccagagaacagcaggtgcagccagttctaggcaggattggggagcacacaggccacatcctcactgctgtgataacaagtcaggagcttccacttcaacctctgattgaccctgggccaatcctccacttcagcctctgattggtcccaggctaatccttcatagggtgtaaccaattggaggcctctaaagggcatctggggtgttctttataaaaaccctgagaagcattgcaattgggaggtccttgagccgtttgcttgggcccgctcccacccggtgggttgcacgttcgcttcaatcaatctgtgcctttggtaagctgttttcttgttgctttgtctttttttttttttttttttttagtggagtttcactctcattgcccaggctagagtgcaatggcacagtctgggctcactccaaactctgcctcctgggttcaagcgattctcctgcctctgcctcccaagtagctgggattacaggtaccggccaccacgcccagctaatttttttgtatttttagtagagacggggtttcaccatgttggcaaggctggtctcaggtacctcggcctcccaaagtgctgggattacgggcgtgagccactgcgactggcctgttttgtctgtcattgtttcattcttttgttactttgtgagttttgttcacttctttgttcaatacaccaagaacctggacaactcagtcaggaccttccatcctataacacctcaacctcggacttctcagccttcataactgtgagaaattccttttctttataaattacccggttttaggtattctgttataagcaacagaaaatctactttaaaagcctccatggcacaggtgagccctgcagtgtgtctgggtgatgcctgcagctgtcgagaaggaggagacagctcagagtcacctgcaatctggctcttgccattacagactccagatgatgaagttgaaaatactgacaggctggaggccatctggggtcctgctggctcccagttccaggaagcctggaagagcactggggtgagctcgggccagcgcatgtttactgtcacaggggacatgtttcagcactttcattgtaaggctgtggccttctgtgcttgtggatcctcagtctcagtggccttcctcttcccccsaccccaactcctgtgttgcgtgtttaacacacctacscccaaccgggacataactaaatcctagactgtggacaaagaatacagtcacctcagggggctgcgagctctaaaggctcagggcccagctacccctttaggatgggtcagtaacaacacgactgactctgtaaattggtgatcacctgagactggacctcagcaccacacggacctgtgcttcaccttggccatcgggggagagtatggaggtcttttgctggcaggaatcagcacccttatcctggcaatcagcactcactggccattcatgaggctccagcaggacgagtggccacagtgtgcagggcacaggggatggggctttccaaggtgtttctggatgacatcaatcacacaaggagttgtaggaatgctggcgtcctggttcacgggtagacgccagaggatgccaagggtgctgggtagaaagcagaggatgccaagggtgctgggtggtgggccccttgggggtgcccaatggctctggcagagttgttggggcagagtcgggaccacccccacctcttccgggtccaagcccaggcactgcactgagcacttgatgagcctgacctcaccatggccttgtgacgtgggcactgtgggcaggaatgcttatggaatgaggcccactgtaaccctaacacagcatcacaagtctttccccagagagaaaacgcacaggcaatggaaatctatggttaggaacaaagattcccgtctaagaaaaagggtggaccacgggcctctagaagggactgagggggcaaagtcctgcccgtgcactggctaacactcttcctttagcttttcccccccactttccatattgtacattttatctgtttataatttttcttagtgctgactaaattccagagttagaccttgaaatccacaagttcctaattggtggtcaacagaaacctcagcaagacaagcagaaaatgctcctcttcccctaaagctgtagaaaggcagccaccaacctgggctaggaaatggtccttacagatactatttttttttaactgtggtaaaacctatataacaaaactgatgctaatttaactgtttttaagagtagaattgagtgacattagttcgattcactgttgggcaaccatcaccactctctatttccataattttttcatcaccccaaatagaagctctatatccattagctaactcctcatttcccctccctctaacccctggtagcctctatcctttctgtctccatgaatttgccttttggagatatttctcataagtggaattgtaatgttttcaaagttcatccatgttgtagcatgtgtgggcataccataccttttttttttttttttttttaagaagcggagtttccctcttgttgcccaggctggagtgtagtggcacaatcccggctcaatgcaacctctgcctcccgggtttaagcaatactcctgcctcggcctcccaagtagctgggattacaggtgctcatcaccatacccggctaattttgtatttttagtagagatggggttttaccatgttggtcagactggtcttgaacttctgacctcaagtgatccacccaccttggcctcccaaagtgctgggattacaggcatgagccattgcacctggcctttttatgactgaataatattccactgtatgttgctggcatgcaatggtgcattctcttataaagcattatcttctcatcctttttatttgtgtaaagttggtaggaatgttcccactttcattccaaattttagtaatttgagtcttgtctcttctttgttcatctaaagtattgtcaattttgttctttagaaataaccagtttttggttttgctgattttctctatttttctattctctattttgtttatctctgctgtaatctttattatttccttcattctgctagctttgggtttagttcgctctttttctaattcctaaatgtgtgcggataaattattgatttgagatctttctgcttttttaatgtagtcgtttacagctataaatttcccccaagcactgctttcgatttcaccgcatgctgtaagttttggtatgttgtgtttttgttttgtctcaaggtgtcttctaatttccctygtgacttccttttagacccattggttgtttaagagtgtgttaagcctgggcacggtggctcacgcctgtaatcccagcactttgggaggctgaggcaggtggatcatgaggtcaggagttcaagaccaggctggccaaaatggtgaaaccccatctctattaaaaaatatataaaaattaaccagctgtggtggtgcacacctgtaatcctagctactcaggaggctgagacaggagaattgcttgaaccttggaggtggaggttgcagtgagctgagatygtgccacggcaccccagcctgggcgatggagcaagactccgtctggagtcggggaggggaagagtgttaagatccttttgtagttgatgaacaatgatgattgggtgttcatgcacatgcgtgagatgtgtcaccctcaaaccctgttacgtcggcacgttacccatctgacgtgaaaaagaagagagtgcattaacttccacatattcatgagtgttccagtttttcttctgctatggatttataattttatcctattgtaattggaatgatactttgtataatttcgttttaaaaatttattgctgggtgcagtggctcatgcctgtaatcccagcactttgggaagccgaggcagggagatcacctgaggtcag

SEQ ID NO: 94776 - DNA, 15596 bp, Homo sapiens
atcagccaggcggcctccagcaggcgtccccacctctaacacggggaatcctcacggcagccaggatgcaggtgaagagctcagctagcccttcccatgcccgcagctgtgacaatccacgctcgcctctttctaacctgcaggcaggggccctggctttcccgcggcctgcctcgcccctggcttcctcccttgctcctgccctcagtgttcagtctcagaaccgtcctgggcacagagtggcatcccgaggaaagcaaaggagaggcagagccagaaagagcaactaacaagcagagagggggcaggcgagcacagaggcgcagctcatgcggaacagggcagggcagggcagggagcggagcgccctttgggggaccagcaagaaggggcagaggaaactcggccaggacctggtcgcttaaaggcaatgtacagaggagggcaactgcttctgccacaggggctgtgtgaggccccccagggggcgctggtgtggacaggaggcctgcgggaggggacacaggctggcctggaagccccgctgggtgaagctgagggactgttgggggagggcatgggaagcctggcacagatgtcctgggtttgcgccctgctctgctgcagggccgtgagcaggttccctctctccctgccccaaggcaaggcaggcaggctgaattacaggcccacagctgctctgtgcaggggccctcagggacggtggctgcctcaaagagaccgacaaactgaacagctgtggaaggagatgcccagaagggtctgaaacaccccaggacccctctcagccaccctagtgtggaggaaatgctgcctcatgtctgctgagttaatgagtactggggaccaaagattccctcagaaccccctggaaaactctaggactgctgcagctcagcagtgccactgagcccagggcagggaaaccaagccccaggtcatgctggctctggatatctgtggctcccagcatggccaatgggcagaaaggagtattttaaatccaccaccaggaaggaaaggtttgtccaggagaaggcacaagatggacatggactctgcatctgctggactgaatcttgattttctaagctaatggggcagagtggaaggcctccctgtctccagcctaagtttccccctaagtaaatgatacgtagactctgatttctcagggcccctccagctcaaacggtcgaaggtttcagcttcttacggagccccacaagggtcaggatgatgggttttgacccttctgcatccctgggacccagcacggggcctggcacgtaggttggctccagctccgtggataaggctgagtgggtcacgaattggagctccaatggctttcaaggccattccctgcctgggcttcatcccccacattcccatgactgtccctgcctccacactggggtttggtgacatccacatggaattgcatccctggtgccctggacataggtgtggacctgactgcccaaaaaaggctggcccagccttggctgaaatctctacatatggattcagaaggtaacaggagcagcacagccccagaacgcactgcccgaggaggaaggctctcggaagagggcctgcgggggatacagccaggcgcctcccttctccagactcggcctatccgactggcgtgagtcctgtggttttcatcacattgcactgtgggaaaggcccagggccctggcatatggatgtgaattgtctgtcggtcaaacgctctggccaggagctctgctctgaaacccaggcatggctccactgctaagaccagcaagaatttgaaaaagcagaaggcagccctgcctgctggccaggcccaggtaggcaggctcccgctctgcatggggagtccagcgctatttatacctggacgagtaatactcctcctccagctcgtagaggtcaatggagatctcgtctcgcagcgtgatgagcttccggtcgcactcctcctgcagtgtgcgcagctgctggttgcgctggtcaatggcctcgttcacggaggggaagtcattgaggatcaggaactgcttgaggtcggacaccagcttcatcagggactcgccggctcggacctgtggccatcagaaccagggcgggcacagggtgaggggggacagcggccttgcctacaagtagctgatgctgggcaagggatggcctctctaggagcctcagcttcctcatctgcaaagtgggactctacccctgacctccacaggttcatgtgtgagaattaagtgagaaaactgggatgtcagttctgcagggcaggccctcccctctcgtcagcctctggcttccactcctgcaggactggcctccagtccaattatgcaggtgtacattctgctcatgaaaaactcaaaccccacagataaaactgcgatcccattttgcctcctgccccggggtaggattaacatggctgccagctgggcagagctcctgtgggacctttttccatgcattttgagccctggacgtgcacctgcggaattatctgcttgctgtgtttctcctgtgatccgaaggaatccaatggcgcctacagttccattcggctgtttgtcttttcactcacaactgaccttaggaactcctgagttagcaggaagggctaccctctttctggccactgcacggctacaggacgggcatgggtggctctctgcccagccctcctccaagtgccccacgtgaggacagtctcctgagaaatgatttgcccccacctcattctttaaagctgccgagtggtgaaaccaaagcatctctacatttgcctccttctgctccttctcgggggaagaagaccagaccagccccagagccccctccactccacccaggaaacctgaggggactgatgctcttggagcccaggccgtgccctccaccctggccactcacgatgttggcggctcgcacatgcatctcgtaattgtcctgttcaccctgagtggcccgtgacacctgcgtctcgtcctcaatctgggggaaaacaagaaaacctagaaatcaacccagccaaggcatccccacccctggcccggcccagcccagcttacggtaactgtcatctacccaggatgtccacactggccacaacctgtctgtggtgccatctacagacctaagcgctgtcagccagacctctgacaaggttcaattccaccctctcttgttctggccatgggagacaacatgcacctttgctcaagacaaatagaggcaacccacgctgcttgctgtgctaggtgcagggatgggggcttatcttggcccggtctttttgggctgtgggagccctgtttggtaggaaccgttgtcacttgcttggcatttggtaaactgttggatgagtgaagggatgatttaagttttttttcgcgaccatttcctgatcacttcccaggtgccaggctgtgtcatgcacttgaccaccattaacccatgccagtttcacagaagcctggcctgccacccctggtgtataggtggccaagcgaggctggatggggcttcccggcaggccttgcaaaggctcagttcggggtgggtgtcaggtaccctcagtggttaagacccagacttcgtgggttcaaatcctggctcagccagttgtgagctgagtgaccttgggcaagtcactaagtctcctgggcctgggtttcctcctgaaatgaagaggacaacagtgcccacctcacagagtcctcatgaagattcagcagaacaggcacagataacctcacaacgtggcttgatacatggcaagcactaagtacatgctagcttccatcctcatcatcatcgcttatggagcctgccaggtctgcagcagccaggagggatccagcccaatctgatgcagctgtagctgcagtggtcagcaggcttgcaggccccagtgctgaccgctccacctgcctggaggccaccccccacttctcccctcagtctgcttttctcctgctcattggctgtgtgccaggccccgaggtaactgttttacacagataaactcaccagtcatcacaaggaccccaccatgcaggagaaactgaggcactaaaaagtgaaatctccatccaaatccatactgttagtaagggctggacgtgccattatttggtttgcttatctactgaccagctccctgtgcactgggtgcttcctgcctagaacactattcactcgcgctgctcagcccctggcctctcctgtctccaccccttctcagactctgctccccttggtgggccaccccacccccaccttggcggtcttgatgatctcggtgaagttgtccatgatggacttaatgtcgtccttcagccgcttgttgtaggactgcagcagcgtctccttgctctggggcagggctctctgctgggccatggctgagcctcaagcagcgcagcggggagacctgggacctagagtgcagcacagacctctgagtgcaggcagagtctaccccagccaccctctatgccccaaccttagcagaacacgcagatttctggggattccctttctgccaaataaagtcaatcactgaaacacagatgaactcattccatcagcagacaccgcagggggtgccaggactggccccgcctttgccagagcaagctcatcctggaactcctggccagccctccaagccctgtccagggctccagtccagacttcacgtccaggcccacagcgtgtcccagggagccctgcaaactcaacaccagctccccgtccccagcccttggcttaacttcttagcccgccgccaccttcgccacgccctcccatccgaagagtccttccaattcgacccctctgcaccgcctacatccacgctttccttccactcccactcaggctgccccgctccagacctcatccctgcactgcgggccccgctccctccagtctctgcgcggcagggaagaggtcctaaaaagtggtcattccaaccgggcgcggtggctcacgcctgtaatcccagcactttgggaggccgaggcagggatcacctgaggtcaggagtttgagactagcctgaccaacatggtgaaaccccaactctactaaaaatacaaaaattagccgggcgtgatggcaggcgcctgtaatcccagctactcgggaggctgaggcaggagaatcgcttgaacccgggaagcacaggtcgcagtgagccgagatcgcgccactgcactccagcctgggcgacagggggagactacgtctccaaaagaaaaaaaaaaggggggtaattccactccctcgcttaacatccctcatggttccccggtgcgccgggacaaggggctcaagttccgcgccgcgcctctcggcctctgccctccagccgcactggacggcctcggcgctggagttgcctggccctggggccgggcctttgcgcgcggtgctcagggagggcccggggccccctaggttcggagtctggcgcacgaccgagcggactcctggacgcactcgcattgtttgtgcccatttttggcggggtgtgggaaataagtcacacgcaggaaaggggatctccgaccccagcgcctacgcacccacccacccccactcccgcccacacacccaccccccctccatccccaccccccaccacaccctcatacccgccccagcgcccgcacaccagacgccgcgtccgccgggtcggcctagggcggggtggtcaagtgcctctgcgacccgcactttcccgcgtctctcccacggcctggccctcccgccgcagtctctcttccccgccgcgccgcggtccgaaaacctagtcagccgccgcagcctctcggccccgcctcgatttttagctttataggaatgctgttgctttaaatccgaaatcccgtgccggtatcaactctcgcgatctccgaggccgcatacatattacccacaattccctttcctttctctctcctccygccgcccaaratggtgagtgagctgtagttccgtggcactatagccrggttccggctgtatccgctgccatcctcctccaggcgcggcctcggagggcctcctgctcctcctggcgctaggagagccccactcggtgtggcacggagacaccgaggtggattagagccccacttggtgtggcacggagacattgagatggactagagccccgggcggccgagagcggaatgcgttgttcccggtgtcgcagggctgggtgtcgcaggsctggagcaccgcagtgcggggctcggagccctagcgtctctygggcttgctgggggccgctccagaggccttgtgagcgacgagttctgagcccgcccctgttgcttctagagcctgyggggccgcgactcagaggagtcatgagtccggggtgtctcctgggtgggcgacgcgaagagagcgtggtctcggkcttagccttgctctggccactcggggttcccggggctgcatgcttgtgcggctgaatgtgagatgctcctgtcgaggggtggtgctggggggytgcagaaagctgctcgccagcttagttcaggcaggtgctgtcagcgtcccttgttttggaggagccagcctgagccctacccccgacgaagcgagtggaggcggcggyttaactgacgttttctttctgcccagccgaaaggaaagaaggccaagggaaagaaggtggctccggccccagctgtcgtgaagaagcaggaggctaagaaagtggtgaatcccctgtttgagaaaaggcctaagaattttggcattggtaagtaacaaacggcagaatgaaaacggtctatgtttttctcaagggaaggtggtaattgggttgtgttgtatcttgtaggttttagtgggtgtaaagtggtcgcagtccttaatttgtgtctcttagagacgggggcaatgatacatgcttcttgctttcattgggagttgctgagcragcattcagctcaatatggtagtggccttgaattcagcttagccatctggaaacaagtacagtagcagtgtcgcagcraggtactaggactgcaattctgctgtacttcgtggcaccttggcttcttgttagatgaggaaaagcatcgtgctctttgttctcaggtgtttgtgtgcagatgatgtaaaagaatatttgctatctgagagatggtgatgacattttaaaccaccaagatcgctgatgcaccaacacccttcctagtggccccagacatgaacttgacatggaatttgagcctcactcggtgtcaccctttacttctcaggacaggacatccagcccaaaagagacctcacccgctttgtgaaatggccccgctatatcaggttgcagcggcagagagccatcctctataagcggctgaaagtgcctcctgcgattaaccagttcacccaggccctggaccgccaaacaggtgaggttctgtggcgtggaaaggagtttctcaggcaaggattccttatttcatccagaacatgagggggatggtcttaggcttcttgaactgcagttgtcattaaattatagtcatatagcaggaccgcagtccagcatttgttattaagtgttaagtgacaaggattagaaccttgactccaagcctaaactgaagagtgtttttccagctactcagctgcttaagctggcccacaagtacagaccagagacaaagcaagagaagaagcagagactgttggcccgggccgagaagaaggctgctggcaaaggggacgtcccaacraagagaccacctgtccttcgagcaggtgagtaggccccaccttagggtgaacactgggggcgggctgttgcagtgatgtaaaatttcttggcctgaaattactgtgaagagtaaaaccgagctttttaacactgagtcagcagctgagcccagcagcttcttgtgactagagcaggccctgtgagtgctcacaaagtggttgtgtgttctaggagttaacaccgtcaccaccttggtggagaacaagaaagctcagctggtggtgattgcacacgacgtggatcccatcgaggtgcgtttgcctgttgactgctaacccaagggcttctggcagtaccaggaagagagagtagacctaatgccaagtcagtgatgggaccgaagtgggtgagggcagtactgacacagatccaacacatgcgtggctcttgcaatgatgtgaatctctcactgaattcaaccttgaagtgcgaatccatgagctttttaaccctgagcaattgttacaagctaactgaaatttgctgcttttggtcaaaatacagtcttcagctaatgctttcttccagctggttgtcttcttgcctgccctgtgtcgtaaaatgggggtcccttactgcattatcaagggaaaggcaagactgggacgtctagtccacaggaagacctgcaccactgtcgccttcacacaggtgaactcgtaagtacacagcctggccccaaacttccccccagttcatttaatccatgcctcacagttgtttccttttgccttaaaggccaatcttttagtttaagaaatatatttatctgaacttttgccaatgatggttaagaatttcttcacctgaataaaccatgtggtcagcattgcatctgaggcaaaagactgtcttgagctaaaaggtatttttgcattctaaaagggaaactaaggcaaaaaacccacttttgtttcccctcctgccttttagggaagacaaaggcgctttggctaagctggtggaagctatcaggaccaattacaatgacagatacgatgaggtaagaggcagctttacaccaaaatactgtcrttcacaaatctttctcccaaataactggctggcttaacctatgagaagttctatctgacgatcagcttggaacagccaaacagaattaacgcaactaataaccttgaaaatctcagaaaacartaagccaagctaactgcctctttttgtcttttcagatccgccgtcactggggtggcaatgtcctgggtcctaagtctgtggctcgtatcgccaagctcgaaaaggcaaaggctaaagaacttgccactaaactgggttaaatgtacactgttgagttttctgtacataaaaataattgaaataatacaaattttccttcagccagtgtctgttgagtatctcgggttgaatcttacttggggttagcaagtatctttttgagacacagcctcactctgtcgcccaggctggagtgcagtggtgtgatgtcaaagcaaccttmgcctcccaggtttaggatattctggtgcctcagcatcccaactggctggcccatatttgtgtttttggtagagatggggtttcaccatgttagccaggctggtctgagctcctgaccgcacccggcccttcccacccttaaatacattcttaaaccaggcattttgttccctagagatgtaacttgmrtatcaagttttgggaaagttctttggactgaaaccaagccaggattttatgatgaaccrgtcatgagctcatttaaggtagaaggccagaactttataccagtagcacatgatccagcataaaggcagtcttgaaatactgcattatccagggacagggcttcagcagctgatctgtcacacaccaggtgtcccacgtaggaatttcttaaaccacaggtaggatgtagctgcagagagtccatacctaggggttgaaagcaagccagcattagcaggctgctaggctgaaggggaggaagccagagggccgctggggactcaccaggtcacgatgtactgcagatgctcgttcctcagagtaactctggtttgccctccaatgggtcctccagggactgtgctctctgtggagacagcagactcaagtccaccccctactggcctgccagcctctgcaccacttcctagtggctgtcatttttgcgtggccagttggaagtcctgtatggcctttacgttgggtgaccatccccgcccttgtccgctcagtacttgcctaggttctttgctgagttgctgcctcctcccacccgccatatacacatgtgagaacataagccacagtagtgactgggcaatgagggttaggaggaaggacagtattcacaaaagctacttgttccgagatgggctggtccacaacgtacggaagttggcatcaatgaagatgggctctgcgcctgtgattctggccatagcttccaggtctcgataatgccagtggttcctttctggattgttctcagggacaaaaggctgcctggtttctgtcagcctcaccatcccaatgaggtccacttctccctcaatctataaaggaaggtgtgtgagattgcatggagcctggtggactcccagagccttctctaaagtaggaagagtccatgtcccttacctggcctttctgccgggtttcaggattcactttcttcctgggaacgaaccctctatttaccaggatggtgactctagggtaatgaaagtgctacttcaggtggggagggtttttgactaaagacagtcactcatggtcactcaggcacccataggaacaactagagcaccaaggaaggcttttaaaacagggctggctcagtggagccctggcagtgccacacaggcaaagtcttcctctcttgaggcaccttcgtggttggtaaaaggctccctgccaccatcactacctttttaccagtgtggctttccccttctatctctgcttcttgtggtctacctactacaacgtgcaactggtgagcaacgctgccacgccagagtttagaccccacacctctcccctgaactatggcaagagctgtctccaatccctcctcctaaccaaggcagccgtgaggagcagccctggcaccccagcctgctggagatgagtacttgggccccatcccagccctaaaacaggaacccatgggttaacaagagccccaggtattttcatttttacgtgaatcctccagttccctagttaatcacacaggtgctcctgtacctgtcatttgctttgcctggaatgttcttcccatctcttaactcccaaatagccctctagggagccacccctgcctccactccctcaaggtagggctggggtcctttctcttgaagtcctcttgctggcccctcatagcttgccatcatctaatgtgtgggcaactagacagttctccagaggcagggcccctgtttcacgaatccctcctttcccttcagaggtcaacatacagaaattatccagtcataaatgagctggctgagaagattaagtcaatgtcacaattagggacttaaactatgcaaggaattgaatctcctgggtatcttgggttccccagggtcctaccaaggttggggattgtgaaggaaatagtgatgtaaattagtataccctgactgcctctgccaggacagccagctcccacatgtcctactcaccccaggtcggtgcagtggaagggagtgaccacataggccccactctgagttgaggaggagatgaggccgccctcccgggcctcccggacagggtccaccatggtccggggcatcatatacagctccttggaatggtcaaagcaccccctgaccttcactggcctatactccagatttttcagttccattgggctgcatggagataagaacagtggccgagcaaggtttggctggaaaacgaatcccctgagggtggcagactacacagcccaccagggccagacaagtgaaggagaaaggcaaagggcgtgctcttcaaaggggaactttgatgccatgtgggaatgtggatctgcactgccagagtccaactttacaagagaggctaaaaatctggactcctcaatgaatattttatgtgaaattttaaaaaatatgtgggccaaaaccccatctgcaagccaaatctggcatactgtttgctaccctgaatggaaaatgtggctgaatatacctatctctgtagggcatattctagggagagagcagacaaatcattcagggcactttttcaaacgaccaccctcacggtgagacctacattatctgccctcagccacagggccttgggccctgtggaggataagtttactatacctgaaaaaagggtgacacccaggactcaaaataagactttcctccatatgtcaggaggcggtctcaggtagcttcacaagggcagtcaggtgtcaacagcaagcccaacagatgactgataatgagagctcccacctgaggtcaaggcagtgactaaaagtcccaccaaaaggggcaagctggccagcagaagccagggctctgctgttgaactcaagtaaaacaggccctaggggggcagccatgcactcactcggctggcagagggacaggctcagccagaactctggactccaactctgcaatcaggttcagcttccacttccgacgctggacctacagtgacagagcataaggccaagcagatggcagcaaggtcaagggcccagagttacgcacaccagatgccggtctttacctgccatgtccccaagccaaaggcagtcacagggatgaggagcaggacccactgaagaaaggagtcatcttccgcttttgtggcagatgcttctgctgcagaactgccacatctgcttggcctccaggccacccctggagagtttcacaacactgacatggagccagaagccctcgaacacagacctggagcagcccgttccaagacagactccagtactgccaatcaaaacctgctgcctagagccaactagcagcacctgtatccagcccagctcctaacccggtgcccagaacaaggcacacacagtacgtctgccaagtgagtaagtgggatctagggctcagtgccggtttgaccaccaaccacgaccctgagtaactcatgcctttttactcaagaatctagatgtattccactgcactaagatgcaccattcatccattcaaaatgcatttaataagcagctacagttggccgggcacggtggctcacgcctgtaatcccagcactttgggaggccaaggcgggcggatcacgagatcaggagttcgagaccagcctgaccaacatgcagaaaccccatctctacaaaaaaatgcaaaaattagctgagcacgatggtgcttctgtaatcccagctactcgggaggctgaggcaggagaatcgcttgaacctgggaggaggtggttgctgtaagccgagattgcgccactgcactccagcctgggcaacaagagcgaaactgtctcaaaaaataaaaaataagcagctacagttactaagtagcttagtcaggcactagtggttgttgtgttatgtagaaaaatatatcaattcagtaatggctcacagagctctcttaacagctttccatttttacaactcatcgtaaatgtaaagagggaagaatgtacacagaaagtgcctttaagctctcagaggatgagttccatccgctgaaaagcaccaggggccttgcggatactatttttttttttttttttataaaaaggcaggcctggggcaggcttgcacagcactctacacacggcaaaacagccctgtgctgcacactgagaggaacacgtaagccgcggtggttagatacgctttactttcagagccctgggctttcagcctgggctggccacccattagctggatgggacgttcggaagtaactctcgagccttctctgtaacaggggaacgaccaaggagctacctctcgcgttgtgaggacaaagcgctcgctacatgcccggcacacgaccacaattccactgaaagcattttaatacggaacttgtcactcccagggagcctccgctcagccggcagttggttcatttcaatccccacgacaacccttcaaagtgcagggcagacagcaggtggctctgcccaggcgcctggatcacagcccggcctgcagccctcacctgggcgcggggagaccctgaggacgctcctccaggcggcgctggccggggcctgcggacacggacgggcgggctgagctccgggacccctccccgcgccccgcaccccgcaccccgcaccccgcaccccgcacccggcgctcacccgtcccagccccgccgcccgcagccccagctgcaacgcagccaccgccgccatcgcacccggccccgcgggcgcttccgggacgcaggaggcatctgcatccggggcgccgctgagtcccgcccagagccccgcccccggctccaggttctgcgagcggcttccgccgggctgctccgcgggcgcgtcggccatgagcgagttgccgggcgacgtgcgggcgtttctgcgggagcacccgagcctgcggctccagacggacgcccgcaaggttcgcagcgcgggaggggaacggagtggcggagaagggcgcagttgggatgaggggctgaggggagggcaggggagaggagagggcaggggagaggggagaggggagagcaggagagaggggagggcaggggagagggcgcggcgggatcaggggaggagagggaagggggcgcggcaggagggggcaccagggagcggagccctggccctcctgacgtcctgcccgcccacgcgtccgcaggtgaggtgcatcctgacaggtcacgagctgccctgccgcctgccggagctccaggtctacacccgcggcaaaaagtaccagcggctggtccgcgcctccccggccttcgactatgcagagttcgagccgcacatcgtgcccagcaccaagaacccgtaggtggtccgcggcggcgcggggaggcccagggcaattaggacagcccctccgctggactccgccagtgctgcagcccctactctttcagagttgggagccctgggacccaggtgggcgcccgggtgctggaatcacctgcggtcccagcggcgaggcctcttggtgagctcgtttgctcacctgaggtttgtcctgtggggtgtggctgcttcccagatgagtagaggcttgtgatttgtcacctgaggttgtgaacagcgttgggttcttcccttaaccccagaaggggtctttgatttagctgggagctaggctttgtaataatcgtcaaaacagagataggatgtttccattcattgagcccttgctccaggtggagccatcctcttgcatgaactcatcctggagcagtcagtgaggctgccatgcgtgcttttccggtaaacattaagaggctgcagtcggcctgggtcagacggttccccacccagcttcagagtggaattgctccgggagcctttaaaagcccgatgtccaagccgcatggtagactgtccagggatgagtccaagacacagccaccagtctgaatccttgctgtgaactgtccctacaaatttggtctctctgctctgtaggcaccagttgttctgcaaactcaccctgcggcacatcaacaagtgcccagaacacgtgctgaggcacacccagggccggcggtac

SEQ ID NO: 94777 - DNA, 42660 bp, Homo sapiens
atacaaatgaccatcagtgaaaactataaacacctctacctaaataatctagaaaatctagaagaaatgaataaattcctggacagatacaccttcccaagtctaacccaggaagaagtctaatccctgaatatagcaatagcaaattatgaaattgaggcagtaattaatagcctaccaacaaaaaaaagtccaggaccagacagattcacagccaaaatctaccagaggtacaaggaggagcttgtaccattccgtttgaaactattccaaacaatagaaaaagaggaattcctccctaattcattatatgatgccagcatcatcctggtaccacaacctggcagagacacaacaaaaacagaaaatttcaggccaatacccctgatgaacatcaaggtgaaaatcctcaataaaatactagcaaaccaaatccagcagcacatcaaaaagcttgtctgtcacgatcaagttggcttcatccctgggatgcaaggctggttcaacatatgcaaatcaataaatgtaactcatcagataaacagaaccaatgacaaaaaccacatgattatctcaacagatgcagggaaggcctttgataaaattcaacagcccttcatgctaaaaactctcaataaactaggtattgatggaatgtatgtcaatataataagagctatttatgacaaacccacaaccaatatcatactgaatgggcaaatgctggaagcattccctttgaaaaccagcacaagacaaggatggcctctctcaccactcctattcaacatagtattggaagttctggccagggcaatcaggcaagagaaagaaataaagggtattcaaataggaacagaggaagtcaaattgtctccgtttgcagatgacatgtttgtacatttagaaaaccccattatctcagcccaaaatctccttaagctgataagcaacttcagcaaagtctcaggatacaaaatcactgtgcaacaatcactagcattcctatacaccaataacagacagagaaccaaataatgagtgaactcctattcacaattgctacaaagagaataaaatacctaggaataaaacttacaaggggtgtgaaggacctcttcaaggcgaactagaaaccactgctcaaggaaataagagagaacacgaacaaatggaaaaacattccatgcttatggataggaagaaccaatatcgtgaaaatggccatactgcccaaatgaatttatagattcaatgctattcccatcaagctaccactgactttcttcacagaactggaaaatctactttacatttcatatggaaccaaaaaagagcccacattgccaagaaaatcctaagcaaaaagaacaatactggagacatcatgctacctgacttcaaactctactaccaggctacagtagccaaaacagcatggtactggtaccaaaacagatatacagtccaatggaacagaacagaggcctcagaaataacaccatacatctacaaccatctgatttttgacaaatctgacaaaaacaagcaatgggaaaatgatttcctatttaataaatggtgttgggaaaacaggctagccatatgcagaaaactgaaactggacccctttctaacactttatacaaaaagtaactcaagatggattaaagacttaaacacaagacctaaaatcataaaaaccctaaaagaaaacctaggcaataccattcaggacataggcatggtcaaagacttcatgactaaaacagcaaaagcaatggcagcaaaagccaaaatggacaaatgagatctaattatacaacagagcttctgcacagcaaaagaaactatcataagggtgaaaaggcaacctacagaatgggagaaaatttttgcaatctacccatctgacaaagggctaatatccagaatctataaaaacgtaaataaatttacaagaaaaaaacaaacagccccatcaaaaagtgggtgaaggatatgaacagacacttctccaaagaaaacatttatgcagccaacgaacatatgaaaaaaagctcatcatcactggtcattagagaaattcaaattgaaaccacaataacataccatcgcacgccaattagaatggtgatcattaaaaagtcaggaaacaacggatgctggagaggatgtggagaaatagcaacgcttttacactgttggtcggagtgtaaattagttcaaccattgtggaagatagtgtggggattccttaaggatctagaaccagaaataccatttgacccagcaattccattactgggtatatacccaaaggattataaatcattctactataaagacacaggcacacatgtgtttattgtatcactattcacaatagcaaagacttggaaccaacccaagtgcccatcaattttagactggataaagaaaatgtggcacatagataccatggattaccatgcagctataaaaacaggatgagttcatgtcttttgcagggacatggatgaagctgggaaccatcattctcagcaaactaacacaagaacagaaaaccaaacacctcatattctcactcataagtgtgagttgaacaatgagaacacatagatacacggaggggaacatcacatgctgtggtctttcagggttgggatgctaggggagggatagcattaggaaaactacgtaatgtaggcgatgggttgatgggtgcagaaaacctccatggcacatgtatacctatgtaacaaatctggacgttttgcacaaataccccagaacttaaagtataataaggaaaaaataaacactttatgtgaaaaaaaaatccttaggaatatatctaaacaagaaggtgaaagacctctacaaggaaaattcaaaacacttctgaaagtaatcatagacgacacaaacaaatggaaacataacccatgtcatggacgagtagaatcaatattgtgaacaggatcataatgccaaaagcaatctacacattcaatgcaattctcatcaaaatactaatatcattcttcacagaattagaaaaaacaattctaaaattcatattgaagcaaaatagcccatatagccaaaaagaataaatctggaggcatcatattacctggtttcaaactatgctataaggcaatagttacgaatacagcatggtactggtattaaaatatacccacagaccaatggaacaaaacacaaaatcagaaataaatccaaatacagccaactgatcttcgacaaagcaaacaaaaatataaagtggggagaggacacccttttcaactaatggtgctggaataattggctaaccacatgtaggagaatgaaactggatcctcatctctcacctcatacaaaaatcaactcaagatggattaaggactgaaatctaagacctgaaactataaaaattctagaagataactttggaaaaacccttatagacattggcttagccaaagatttcatgaccaggaacacaaaagcaaatgcaataaaaacaaagataaatagctgggacttaattaaactaaagagcttttgcacagcaaaaggaacagtcagcagagtaaacagacaacccatacagtgggagaaaatcttcacaatctatacatctgacaaaggactaatatccaggatgtacgaggaactcaaatcagaaagacaaaaacaaacaatcccatcaaaaagtgggctaaggacatgaatagacaattctcaaaagaagatatacaaatggccaagaaatgtattaaaaaatgctcaacatcactaattatcagagagatgcaaattaaaaccacaatttaataccaccttactcttgcaagaatggccataatcaaagaaattaaaaaatagtagatgttggcatggatgtggcaaacagggaacactgctacactgctggtaggaatgtcaactaatggaaacagtgtggagattccttaaagaactaaaagtagaactaccatttcatccagcaatcccattactgggtatctacccagaggaaaagaagtcattatacagaaaagatagttgcacacgcatgtttatagcagcataattcgcaattgcaaaaacgtggaaccaacccaaatgtccatcaatcaatgagtggataaagaagctgtgagatatatatatatatacacatatatatgtgtatatatatgtgtatatatacatatatatgtatatatatatatacacatatatatatgtgtatatatatatatgtatatatatatggaatactactcagccataaaaaggaatgaattaatggcttttgcagcgacctggatgagattggagactaatattctaagtgaagtaactcaggaatggaaaaccaaacattgtatgttctcactcataagtgggagcttagctatgatggatacaaaggcatatgaatgatacaatgaactttggggtcttggaggaaaagggtgggaagggcttgagagataaaagactacaaatagggtacagtgtatactgctcgagtgatggatgcaccaaaatctctcaaatcaccactaaagaacttactcatctaaccaaacagcacctgttccccaataacctatggaaataaaaaaaaaattataaaaaaatctgtataggcatgttaaaaaaaggaaggacagaaataccattcaactcagcaatcccattactgggtatatacccaaaggaacataaattattgttttattaaagacacatgcacacatatgttaactccagcactatttacaataacaaagacatggaatcaacctaactacccattaatgatagaatggataaagaaaatgtggtacatatacaccatggaatactatgcaaccataaaaaataatgagatcatgtcctttgcagggacatggatggagctggagcctattatccttagcaaactaacacaagaacagaaaaccaaatgctgcatgttctcacttataagtgggagctaaatgatgagaacacatggacacatagtggggaacaacacacactggagcctactgcagagtgcatggtgtgagaagggagaggatcaggaaagacaactagtgggtactaggcttaatacctgggcgatgaaataatctttacaacaagcccccatgacagaagttaacctatgtaacaaacctgcacatatatccctgaacttaaaagttaaaaaaaaaaaaagattcttgtatcccatctcggatctacagaatcacaatctcaaaaatgagccgtaagaacctgcattttaacaagctctacaattattgkggtacatactgatgtttgaaaagtactgccctaaacactcttacctcaggccgttatagtgagtccatacacttaaaaataagcgtctttccaagtactttaaagattcaaaatgatagtggatctgaaatgccgcctgagtccccatgacaacgtgtacactgtggggcccaaccaataaagataagaaaagctttggcggtcaagcatacttgggaagctgcagtttctagaacagtctagtagaggacagcctcttcagcagcctgctaggcatttttttacttcttccttctgttatgcagacaagctaactgaagatgcggttactgagatataatttctctgctaggtcacaaagtctgaaaacatgggccttacgtgtgtaactgtgtatcatcacctgccacccccagtttttcctggctctactaatcacccaaagttctgaatgcagaagccccaggggcccccggaagatccttcaagctggcatccttggcctcgctgcgggggcttagctacctgtgggaacccacgtagcaagggtgactcaaagggttaacaagcagtggcgccgcagagtggcggggagtgcagccaatagggtgtctaggcaggcagtacgtctggtgtgggcgggagtgagccaaagtgtgctaaaggaaaccaacagcggcctaggggtgaaaggacagccagggttagatgttctgaggaggcgggagcaaccgagagagcacgtgagcatctgtcctttctacccgttcctctttatctttagtgttcagtagcagcggggatagcccggggcccggtgtatggccacrgagttacagtgtccggactccatgccctgtcacaaccagcaagtaaactctgcctcaaccccaagtcccgagcagctgcgacctggcgatctgatcctggaccacgcagggggaaacagagcctccagggccaaggtgattctcctcacggggtacgcccattctagcctgccggccgagctggactctggggcctgcggcggctccagcctcaactcagagggcaacagtggtagtggtgacagtagcagctatgacgcaccagctggcaactccttcctagaggactgcgaactctcccggcagatcggggcgcagcttaagctgctgcctatgaatgatcagatacgggagctacagaccatcatccgkgacaagtaagccragagcggaaggggaaagggaagtggagggtcttgcaggctgtgggcggggattggaagtaaaagggctaagagacagtgttcttggccttggcaaactttggagattggggtaagaccttttatttggtgtgtgtgtgtgtgtgtgtgtgtgtgtgtgtgtgtgtgtgtcgtgtaactcgaacgccaaccttctctttccaagttccggtgtctaacatcactttgggtggggaggaagactttaggtagcctctgggctctttgtctctcccaggaaagacaactccttggccattccaggcaggtaaactcccctatactatgtgggcagtgcttgtccacatggtaaacctataacccagaaatggttactatccaaggttatgcactaccaccaatcacctcaggttcataaatagaaataaagcaatttcaaggaaattctattcaggccctgaccctttagtatttgctactgcaaacaaggtcttttagtcttggagttcaggtttacttgatcacatgaaagcttatcgtccaactcttatcatttttcactgtaaactcacagaacatagttaatggatcaaagggagcctaaaggagcctttggcccttcctaatcccacaaaccaatgtagccagaacttcatgttaaaatgtaattttgaaatttctaaacctacgttgtaaatgggttttctccagggaaatatgtaccatgatgaactacagctattttctttattggcagcactttaaatgagcagcatatcaaaacaccccttttttagtggcaggggttggggggacatgccttgatcttttaaaaatggctactgaatgacagatgccactccctaaaccagactctagaaaccttgtcttacactattgtaataatactgtttctctgcttgcagtttttcctctcttccacatgcacccatacattactgtacaatcaatcttcataacatacatctttgattcagtaattgccctactcagcaaccttctttggcttctcagagcctaccaaataaagtccaggatccttagcttgattgatatttttgagacaggatctttctctgtcacccaggctggagtgcagtggtgagatcacagcttactgtaccctcatacttctgggctcaagtaatcctcctgccttagcctcctgagtagctgggactacagggacatggcactgccccccggctaattttttatttttttgtagagatggaggtcttgctatattgtccacgatggtcttgaactcctggcctcaagcaatcctcgtgcctcggcctcctaaaatgttgggattacaggtgtgagccaccatgcctggcccccttagcttgggatgaaggcccttcttcatagttcctaggaacaattctgaaacatatctgtttctgctctcatctggaattccctgtgtctcctttatgtacgttcaggatacttattcttcagggtgaaacacagcattaaataattgtccacctctgccaagaagcttccctttaatcattattcctggcttatcttccctggtctttttaatgcaagattcaccttctttttcgtatattgttatttttgtatagatcttatcctgcctatgacatcttgaaggcagaaatcttttacatttttgaatgccggccatgccttgcaaataatagatgctcaattactagagtttttttgtagctcttaaaattacatttatgaaactatactattttactctttttaatgaatcaatattgaaaactactgkggttatgttatctaatagacaaaatagtgatcctaaaaaataggaggcataggtttgctgtagttgtggtagggtaggggcagccaaaataaatcttacatatacaacaaagaaaaatagatgatgatacttgtttctatagagcagaagttactacgcttgggtcttcgactccctcgtaccagtagatgggttcagggctttaacaaaccctcataaattaactgggaaattttactcatatgaagatttttaatagttgtttttaaataacatctttattgagatataattcacagaccatacagttcaagaatttaaagtgtataattcagtggttttaagtatgttcacagctgtgcattcatcaccacagttttagaacatttgtcatcaccccagcaagaaacctcatgcccattaaacagtcactccccattttcacccaacccacccaaagccctagacaatcattaatctactttctatttctaatggtttgcccattctgcacattacatataaaaaatgtctattctggacatttcattatcatacaatatgtggtcattttgtgactcatttcatttagcatgttttcaaggttcatccgtgtgggatctttcctttttatgattaaatgatactccattatatgaatataccacaatttgtttatccatcagttggtgaacatttgggtggtttaccactctttggctattatgaataatgctgctatgaacattcacatatgtgcctttttttttagagggtgaggattccttagttttttagatttcacaaagtgtcatgataatgtaaaggtgaagtgcccttgctatagcgcttggagagggaatggcatttagcattcacatatgacaaaataatacctgattatatgtcattagtcagaaaaacctgggttatgtagtaaacctgggtgtaagtggaatccttttttttttttcctctaagtttggaaggagacagcaggatccagagaagtgatttaggcaatatgtttagcatctctgtgcttcacctttatcatttgtaaaatgaagatgttggtaaatatcacatggagcccctgggaggctaaaacaagatactgttcatgaatattcattatgaactgtgaagagctgttcacatttaaggaatttcaagcctcatgtttggatttgtgcatgcttctaattgcattcataagtgctgtcttcttgatttgtcagaagacagtaaaatgaatttaactctatgtggaattcacttttttatcttgaaaatgaatactgggatattgtagataatttttatcttgttttgatatagtatggaaagacccaccacaatttttagtaatgtattgctgcttatttaggctggggacattgtttttagttttgtttttgttaaccaaattagaggctttatattccctttatctttaaaaaattgtcatcctctctcacaagacctgttttagcccctctaggaggctggtttaaggtgcctatggtaagaggagctatatttacataggtctagttatggaaggtgccatcagttatcataccctgttctctttggggcttattctcttctctattttgatgtgacagcataaatgtgcactgtggaactgtccgataatagaagccactggagtacatattttttcttttattgtttctggtccttagcatctatatagtgaagggattgctttgtgaattgactttggtatggggaaatcgggattgagccagcaggactgcatgttgttgtatatatgtgaaacaggcaagattgagaacattgtctgtattgatttaaaatgtctttttagattttgaaatgtgcaatatttgaaacataatatgttggttgtattattgaatttcaaggaaataaatttctctctttgaaagtgcagtaaacactgagtagattatttgctcagccatacgtatgtgggttgctggtgaacttgggataagaaaaaatttcttcatttatgtcgttttgttgttgttgcaatggattaaaccacacatccttctcttctgcctcctttatatactaaactcagcaaaatctgagtaatgtgcttttcctgtgaatatagttcatgacctcatatttaaaggcaatgcagtgtatttaaaagatcatcctccctgtccagttttttgttttttattttttgtttcctgaaacattaaagctgttgtgtgagctgttgaatgcttcctgtgtatttgtcctaggtggggctttggcatggcctcagcaagctgcttgtttaaaagtttagcaatgttagagtatgtcagtatgtgacataggacaaaaaaaggagcacattcagccttgtgactctctttagtcacctggaggggagaaaattatccttagggtgaatgaacatcctgtgtaaccctaatgtgagtgcaatctaatgtgatttgagttatgtgactaagtaatgtattgtccttaaccaaagctgtgtgcatcagaattgcctgtggagtctctctctctttttttaaaatacaagttcctgactcccatccttagcagttgtttgtatagtcttgagtaaaacctgaccacaggtaattgtgctgtgtttagactgggccattgcccctgggagaatggccagtctcccttgtgtgctgatttgctagcctgctgattcgggctatagatatggtgatccagggattccacacactaaacagaactaggctagagagcctgacctagcattacatcaacactggaggaatctcccaacatttccttccagcttgcacaaaaccaaaatgcccaccgcagaaaaaaactgtgacgtgcaaattgtttaaaacatggacatattttcggtttttgtgtgtttcccgtgtgagtcctctgacttttagagcaggaaggaggaagtcaccactaagctatacggacctctgttataacatttactgggcatatcctggtatacctaactagactggactccaaggaggcagaaagggggtctgacctggcacagtccctgacacaaaggataattaatgtagcaattgtaatcagataaaatgatagtttcccttgtttttctgtcccatttttttgcaataatttcaacatttgttttatttttttaaagctttcaggtttcacttatttatttttttccataagttattggggtacaggtggtatttgattacatgagtaagttctttagtggtgatttatgagattttggtgcacccatcacccaagcagtatacactgcatcatatttgtagtcttttatcccttgaccccctcccaccctttcctcccaagttgctaaagtccattatattattcttatatctttgcatcctcatagcttagctgccacatactagtgagaacatatgatgtttagttttccattcatgagttacatcacttagaatagtaatctctaatctcatccaggtcactgcaaatgctgttaattcatttttttaatggctgactagtattccatcatatatatatatttgatatgtattccatcatatatatatatttgttggccatttgtatatcttcttttgagaattgtctattcatgtccttagcccactttttgatgggattgtttgtttttttttttcttgctgatttgtttgagttcctcgtagattctggatattagtcctttgtcagatgtatagattgtgaagattttctcccactatatgggttgtctgtttactctgctgactgtttcttttgctgtgcaaaagctctttagtttaattaagtcccagctatttatctttgtttttattgcatttgcttttgtgttcctggtcatgaaatctttggctaagccaatgtatgtaagccaaagttatcttctagaatttttatagtttcaggtcttagatttcagcccttaatccatcttgagttgatttttgtataaggtgagagatgaggatccagtttcattctcctacatgtggttagccaattatcccagcaacattagttgaaaagggtgtcctttccccacttcatatttttgtttgctttgtcgaagatcagttggctataagtatttgggtttatttctgagttctctgttctgttccattggtctttgtgcctatttttgtaccagtgccatgctgttttgatgactgtggccttatagtatagtttgaaatcaggtagtgtgacacttccaggtttgttctttctgcttagtcttgctttggctgtgtggggtcttttgtggttccatatgaattttagaattgttttttctaattctgtgaagaatgatggtggtattttgatgggaattgcattgaatttgtagattgcttttggcagtatgatcattttcacaatattgactctacccatccatgagcatgggatgtgtttccattcatttgtgtcatctattatttctttcagcagtgttttgaagttttacttgtagaggtctttcaactccttaggtaaattcctaaggattttattttttttggcagctattgtagagggttgagttcttgatttgattctcagcttgggtactgtttgtgtatagaagagctactgatttgtgtacattaatcttgtatccagaaactgctgaattcttttatcagttctaggagctttctggaggagcctttagggttttcaaggtaaaagatcatatcctcagcaaacagtgacagtctgacttccactttatcaatttggatgccccttatttctttctcttgtctgattgctctggctaggacctccagtactatgttgaagaggaatggtgagggtggcatccttgtcttgttccagttcttagagtgaatgctttgaacttttccccatttagtattatgttgtctgtgggtttgtcatagatggcttttattacattaagttgtgtcctttctatgctgattttgctgagagttttaatcatggaggtatgctgcattttgttgaatgctttttctgcatctattgagatgatcctgtgatgtttgtttttaattctgtttatgtggtgtgtcacatttattgacttgcatacattaaaccatccctgcatccctgatatgaaacccacttgatcatggtggattatctttttgatgtgctgttggaattggttagctagtattttgttaaggattttagcatctatgttcatcaaggatatcagtctgtagttttcttttttggtcatatccttccctggttttgctatcagggtgatgctggcttcatagaatgaattagggagcattccctctttctctgtcttgtggaatagtgtcaaaaggaatgttttcaattcttctttgaatgtctcatagaagtcttctgtgaatctatctgatcctggactttttttttgttggtaatttttaaattaccatttcagtcttgctggttgttattggtctgttcagggtatcaaatttttcctgatttaagcaaggagggttgtatttttttcaggaatttatccatctcttctgggttttctagtttatgtgtgtaagggtgttcatagtagccttgaatgatcttttgtatttctctggtgtcagttgtaatatctcctgtttcatttcttagtgaggtcatttggattttctctcttcttggttaatcttgctaatagtctattaatttaatttatcttttcaaagaaccagctttttgtttcatttatcttatattttttttttgcttcaatttcacttagttctgctctgatcttggttatttcctttcttctgctggatttgggtttggtttgttcttgtttctctagttccttgaggtgtgaccttagaatgtcagtttgtgttctttcagtctttttgatgtaggtgtttagggctgtgaacttccctcttagcactgcctttgctgtatgccagaggttttgggaggttgtgtcattatttgggaggtatgtgtcattcagtttgaagaatttttwaatttccatcttgattttgtttttgacccagtgatcattcaggaacaggttatttaatttcatgtatttgcatgattttgaaggttacttttggagttgatttccagttttattccactgcggtctgagagagtgcttgatataatttcagttttcttaaatttattcaggcttgttttatggcctatcatatggtatgtcttggagaaagttccatgcactgttgaatagaatatgtattctgcagttgttggacgaaatgttctgtatgtatctgttaagtcaatttgttccgaggtatagtttaaatccattgtttctttgttgaccttctgtcttgatgacctgtctagtgctgtcagtggagtactgaagtcccccactgttattgtgttgttgtctaactcatttcttaggtctgttagtaattgttttataaatttgggaggtcctatgttaggtgcatatatgtttaagattgtgatagttttccattggacaaggcttttcaccattatataatgtccctctttgtctttgttaactgctgttgctttcaagtttgtttcttctgatataacaacagctactccagctcggttttggtgtccatttgcatgaagtgtctctttccacttctttaccttacgtttgtgtgagtcctcatgtgttaggtgagtctcctgaaggcagcagataattggttggtgagttcttatccattctgcggttttgtatcttttaagtggagcatttaggccatttacattcaatgttagtattgaaatgtgaggttctgttgcattgattgtgctctttgttgtctatgtactgtttttttttgtttttagttttggccttttacttgtatttttgttatataggtcctgcatgatttatgctttaaagagtttctgttttgatgtgtttccaggatttgtttcaagaattagagctccttttagtggtttttgtagtggtggcttgataatggtgaattctcttagcctttgtctgaaaaaggctatatttttccttcatgtatgatgcttagttttgctgcacacaaaattcttggctgattttttgtttgtttgtttgtttgtttgaggaggctgaagatagatagctcatagcttgtagggtttctgctgacaaatctgctgttaatctgataggttttcataggttatctggtgtttttgtctcacagctcttaagattctttccttcatcttaactttggatagcccracgaaaatgtgcctaggctatgacctttttgtgatgaattttccaggcattctttgtgcttctcatatttggatgtctatgtctctatcaaggctggggaaattttcctcaattattcccccaaatgtgttttccaagcttttagaattctcttcttcctcaggaacacggattattcctaggtttagttgtttaacataatcctagaattcttggaggctttgttcatattttcttattcttttttctttgtctttgttggattgggttaattcaaataccttgtcttcaagctgtcaatttctgtcttctacttgttcaattcggttgctgagactgtccagaacatttcccatatctaaaagtatgtccaaagtttcctaaatttttgattgttttttctttgagctatctgtttccttgaatatttctccattcagttcttgtatcgtttttggatttccttgcattgggctttgcctttctctggtgcctccctgattagcttaataactaacctcctgaattcctcttcaggtaaatcagggatttcttcttggtttggatccattgctggtgaactagtgtgatttttgggggctgttaaagagccttgttatgtaatattaccagggtttgttttctgtttcattctcatttgggtatgctctgtcagagggaagatctagggccaaaggctgttgttcagattcttttgtcccacggggtgtttccttgatgtagtactctcctccgtttcctatggatgtggcttcctgtgagctgaactgctgtgattgttgtctctcttctggatccagctacccagagagtctgttcagctctgggctggtactgggtgttgtctgcatggagttctgtgatgtgaaccgcctatgggtctgtcagccatggataccagtgcctgttccagtggaggtggcaggggggggtgcagtggactccattatggtttttagctttggtggtttaatgttctatttttttgctggttggcctcctgccaggaggtggcactttccagagagcatcacctgtagtagtatggagagggactggtggtgggtggggccctagaaatcctaagattatatgccctttgtcttctgctaccagggtgagtagggaaggaacattaggtgggggcagggctaggtgtgtctgagctcaggctgtccttgggccggtcttgctgtggctgccgtaggggatggggtcgagatgcccaggtcactggagttgtgtacctaggaggattatggctgcctctgctgagttctgcaggttgtcagggaagtgggggaaagccaggagtcacaggcctcacccagctcccatgtaaaccgaagtgctggtctcactcccaccatgccccctccaacagccccaagtctgtttccaggcagtgggcacgactggcttgaaaaattgcccagactacctgcctccaagttgagaaagaaaaacttctttccctgcctgtggagtctgcacactggatttgtgccctccccctagttctggccaggaggcttcttgccccattgaaattgttaaaaaggtcagctagagatttccttctccctgtggagatttaccccctgctcctctggcctccctcctgatggatccctgttttgtcaggcaggaatgggctgcttggggacccagcaagcttccagggcctttctgctgctttctctacccctgtatttcactcggctctctaaattgactcagctccaggtaaggtcatacatttctcccacaaacagaccttcagattcttcagtgggggtgtgtgtttgggaggggagggtctccctttctcacttccacagttggggcactcacagtatttggggtatctcccaggtcctgcaggagcaatctgcttccttaagagggtctgtgggtcctctcctctgtcctattttgaatgttcacattgaatgcagctttgaggtgcaggtaaatagttattgacactctgtgagtttattaagaaggcgctaaagtgctgtggccttgatgccttgcacctggcaaaaaaaaaaaatagtaacataatattattttttttaaactttttgcttttggttaaatttgctccaaattcttcactgggggtttgtttttgtgaaggtaaaggaaggagaaggaaaaccattcataaatcatctgtatactacgacaaactttgggactatattttagtgatcacataataataaagtagttatggatgtaaagctcatgttttcactaaacattaaatgaaacattcctttggttaaaacctgccggaaaagctttttttgttgtactttcctttaacttgttgctcaaaaccaaaaaaagcacattagagctgagtttgagtccatttaattcttcctcctcaacttagattgcctggcaaagtacaggatgctcagttaaatctgaattcaaataaagaatgaataattttttatgttaagtatgtcctaaatatttcatgggatttctgaaatacaaatttacttggggggggggtgggtcctgattttgatttacttaatctggcaaacctatgcccaactacaacamccaacctgcccctcgccccatatgctacaaacaaactttgtatataatcctcccagagagagtgatatatttaaatttttgaaatgacaattaattcagtgctactagcattttatttaaattaagttgtttttaggtgataagtcacaagattttgctttagtcattgttggaaagggtatattcttgtatgtggtaaccttagtatgtattttacaagccacgttataaaaacttttccctcttcagaaggaatattttaatgatgttttatttgcctcccaaactctttcattgttttgtgtttccattgtatatacatatcaatcggagtcacagggagagaagtatcataacaggacatctaaaaaattggctaccttttagtagtaagcattcccttattagggcaaaatataagtcattgcttttctcagagacttggaattggagagctccaggctgtgaggaacctgactttacttttggaagcctcactgttctcattgctaaagtggtagtgataataaaatctacttcttaaattgtgtgaagattagatgagataatataccaaaagtggttactactgggcaccaaggaagcttttaatagatggtggcctctggaaaagaaggtagtaatatgtgtataacattaggtacctcctgtaatttatggacctttttttaagaagagttatatacttaagtctttgtaatttaggatatatatatgtcacacacacacacatacgtatgtatatgtagttgttaaattgatttttgtaaaaaaaagatgagggttgttaagtgtattctgaatagagagaagaaacagaatgagtgataaaatgtcaatatctgctgtgagaattgaagttgtaattatcccaggggagaatccctccatttagaagttgtagtaatagtaatagtactagtagtagtgaggcttagtaagaagatgggagaagctccccatgttaacattttaatattataaaaattttcctctttttcatatttctatatcttgtggataggtaactattagtttattgaaagaaagatcagtgagactcttaaaaggtttcatgttgttttgggtctactatgagatgtagatatttttaaatatatacaattgctacagccccaggaaatgttaaagtgctttatagacagtctcacttaatatttaggaaagagtcaggtttaacaagtccacattaaattgaggatttgcaaaaaattctttgaaataaaacagagacacaacataccaaaatctctgagatgcagcaaaagcagcattaagaggagtttatagtgctaaacacctcaaaaagttaaaaagatctcattaacaatctaatgtcacacctagaggaactagaaaaacaagaaaaaactaaccccaaagctagcagaagaaaatacataattaaagtcggagtggaagtgaatgaaattgatacacaaaaattcatacagaggatcaacaaagtcaaaagttacttctttgaaaggataaacaaaatcgatagaccattagctagattaacaaaggaaaaaaagggagaagatccaaataagcgcaatctgaaaaggcaaaggtgacattacaaataatcccatgtaaatacaaaagatcctcagagactattatgaacaactctagatgcagaaactagaagatctagaggaaatggatacattcctsgaaacaaacattctcctaaaattgaattaggaagcaattgaaaccctgaacagaccaacattaagttccaaaattgaataagtagtgaaaaacctaccaacctaaagaagacctggaccagatagagtcacaattgaattctaccagacatacaagaagagcttataccaattctactgaaactattccaaaaaaatcaaggaggaaggactcctacctaactcattctatgaatccgatgaatccagcatcaccctgataacaaaacctggcaaagacacaatgaaaaaagaaaacttcaagccacttatgatgaacatagatgcaaaagtcctcaacaaaatactagcgaaacaaattcaacagcacatcaaaaagttaatttgccatgatcaagtaggtgccattactgggatgcaaggataattcaacatatgcaaatcactaaatgtgattcaacacataaaaagaattttaaaatatatgatcatctcaacagctgcagaaaaagcttttgataaagtataccatccatttatcataaaaccactcaaaaaatcatttcttagttatcaaaggaaaatacctgaaaataataacagccatatatctataacaaacccacagccaacactgtactgaatgggcaaaaactggaagcatttcccttgaaaactggaacaagacaaggatactcactctcaccactcctattcaacacagtactggaagtgctagcaagagctatcaggcaagagaaataaataaaaggcaaccagataggaaaagaagtcgtcaaactatctctcttcatggaaaatatgattctatacatagaaaaccctgtagattccaccaaaaggctcctggaactgataaatgacttcagtagtgtttcagaatacaaaatcagtgtaccaaaatcagtagtatttatatacaccaatgatattcaagctgagagccaaatcaagaacacaatcatatttacagggctgggcatggtggctcgccaaagcaggaggatcacttgagctgaggagttcaagaccagcctgggcaatatagtgagatcccatatctataaagtaaataaatgaaaaaaagttccatttacaatagctgcaaaaaaatacctaggaatacatctaatcaagggggcaaaagatctctacaaagagatctgcaaaacacagctaaaagaaataataaatgacmcagtagaaaaacatttcatgtgcatggattggacgaatcaattttggtaaaatggatacactgcccaaagcaatctatagatccaatgctattcctctcaaactaccaacattattttgctcagaattggaaaaaaaaaaaactattctgaaattcgtatggtgccccaaaagagccagaatagccaaagcaatcctaagcaaaaagaacaaagctggaggcatcacattacctgacttcaaactatactacaaggccacagtaaccaaaacagcatggttctggtgaaaaaacagacacacagactgatagaacagagtagagaacccagaaataaagccacagacttacagctatttaatcttcaacaatgccaacaaaaataaggaatagggaaaggattacctattcaataaatagtttggggatagctggctatccatatgcagaagaatgaaactggacccccacttttcaccatgtagaaaacttaagatggattaaatatttacatgtaagacctcaaactacaagaatcatagaagaaaacctggtaattacccttcttaccattggccttgggaatttatgacaaagtcctcaaaagcaattgcagcaaaaacaaaaattgacaagtgagacctaattaaactaaagagcttctgcacagcaaaagaaactatcaacagagtaagcagacaacctacagaatgggagaaactattcacaaactctgaatctgacaaaggtgtaatatccagaaatctgtaaggaacttaaacacattgaacgagcaaaaaacaaagaacccccttaaaaaggtgcaaaagacataaacagacacttttcaaaagaagacatacaaacagccaacaaacatatgaaaaaatgcttatcatcactaatcatcagataaatgcaaatcaaaaccacaatgaaataccatctcacacccgttagaatggtgattattaaaaagtcaaaaaacaacagatcttggcaaggctgtgtagaaaaggagatgcttatacacttttggtgagaatgtaaattagttcagtcagtgtggaaagctgtttcaagatttctcaaattattagaaaccatttgacccaagaatcccattacggggtatatattcaaatgaaaacaaattgttctaccaaaaaaccacacgcacttgtatgttcatcacaacagtatttacaacagcaaygacatggaatccatgtaggtgcccatcaacagtggattggataaagaaagtgtggtaaatatatatgatggaatcctgtgtagccatacaaaagaatgaaatcatgtcctttgcagtaacatggatgcagctggaggccattatcctaagtgaattaatgcaggaacagaaaatcaaatactgcatgttctcacttataaatrggagctaaacactgggtactcatggacatgaagatggcaacagtagacactggggactactaaatgggggaaggatggagggggacaagagttgggaaactaactgttgtgtactatactaagtacctgggtgataggatcatttgtaccccaaacctcagcatcatgcaatagacccaggtaaaaaacctgcacatgtaccccctgaatgtaaaataaaagttgaaaaaaagtaaattaaaaaatgaggatttggcttccagtatgaatcccattcttttgttgtttcagtgtgaagataactttttaaaatgactgcctttggcgtttgtcttatgctacaggtgtgtgacacatttgtttatgtgaggaggtgtcaagaaaagtgggttctcagatatggttaaatctgcatcgctaaacctgcttggggtttgtacaatttaaaatatgctcagcttaacaattagatatctatactttggattacaagtgcctggatatcattatctgtttaaatatttgatatttggttttttagatgtatttaaaaatattccagggatgtgtgcatgtgtgttttttacattgtgataattttacattagactttatttggaactattatcagatacaagataattaatgtgtctttcaaagctttttttccagtaggagagattacggttatgatttaaaatgaagtgtgtggaatgaagaagatctggagtctggttcatattaaaacatccctgttaacaaataattcagcctagcgttgtgtctaaaatagagcctcagagaatacatgcagcttcattgatacaagtaaatacctgctttatgaagctctagtcttaacaatgttaaagatttaaatatgatattgaaggccattgtggaattaaaaaaaaaaaacgaggtcaacttattgtattctagatatactttaatttctaaatggatttaaaatgaatagtatggatctgaagtccgtctatacagcaggaaataggtaagtaattacagcttgcagtaragttacttggagtggtaaatgattttattggaggtcaaatagctgtcaagagataacagctcatattaggttctcacagtgtgtaccttttttggaatatagagaaagcaggtgcttattgtgcaaaagttatcagctgaggctgatttttttgtgggggagggtgtgaaaggtggtaaaatgtttgattccaaagtaaaataacagatttgggcgactctgattacttaacctaatatactgtttmtctgtaataaagtgatatctaactgttcagaaattaaaactgacatttcaggtgtctcctataatatataacaccgcatatgtctttaagtcaaatccagacttctttcttgttgaaaaactatgttctagctgcctaggtaagttagtatagacctagcaaacagagcagtaggtttcagtattttttgcagttcactgagtgaagattaattatataaatgaaaggtgctggtgtaattgtatagtcttatttgaaaaccacagtacgtgaaattgagcctgttttaaaggggctctgtgtgtgtgtaggtatgtgtggatagagttttctgagtttaaggaatttttgtaaataaacaacacagacctatattcttgctgttgctaaattgtggtttatattttagagagctaatatctgtagtatgatagaactgtggttaagaaacctaatgccatttgtgtcagggctatttcattgctttttccatctcagggaaatcaaatgcaacttgaggcaaaagagtggaaattaatgatatactgagataatatgtgtttgcatatatcattttgaggctgttttggagaatactttaggtggtccatagataggcagatgggggtttttaagtacataagctgtaaatcaatccattcagtcagatcatttaacttatatggaagaaagatgaggaacaatactacatttttatgtgcagaaataacatcagttatttaacattccctttttggctcgttaacagcttgtgggtagacgtagccctggattattattacttggttacctcaggatattgaccagaggaaatggacaggaaaatggcagaaagatctagggaatgaagtactcatttgaaaaaacagtcaaaaggaacaaattatcaattatttgagaatgagttcttggaaattagtttatatgtttttgaaagcagtagcaaaagcagaggatttatttattggtaccattctagttccaaaaaggattacaaagtagatgggttacttatcttggtaatatgggttttagatcaaggtgagttgagggggagaatggggagaaactgcttctcttactgcaaagtttcctctcaactttagctctggacttgctctcaccctccaggggtaacttgttcatctcccggttgactaatatgtacttgggcagctcagtgggggactgcatgatcttttcagttccagtctctaatgttggtatcaagcattttcattattgatcaagttatctcatttaggtgcctgtatcctagtaaaaagtatcttgcctcagtaatagtctgtacatgtaagcatttaagcttttagtatgttataggtcttaatatcagtgttactgtacatattaaataacattttgccttaaagctctaatttagactaaaacttgtattatctttttttaggacagccagtagaggtgacttcatgttttctgcggatcgtttggtaggtgggggcttttcattttcatttcattgttttgcctagtgatataaccatggtagaccaagggatatttttgttctagagcattctggggctgaaagagattgtactaagtaaccatcatcttgctaggctaatgaagtgttgtttcactgttgcattaaagatctacttcaatacttttcaccacaaagcattgcccatgaactaattccctgtatttctgagataacactacctctcaaatggatcttggtaacttgagtttcagcaattcttaagtgcctcctcttagggcagtgaagtacattaaaagaaaaccaaaaatgtaaggagacctcatagttacacttgtggtatccaacgaatgtacaaaaatatatatttcttgtagtttacggcggcagcagggggaggcttattttgcctcttctttcctgtactagccttcacatgtgaaatagtacatttgactgtctatggtttcctcaggcacttcctattaagaattgaccaagctcaattctgtttagctagtgtgatctgagaggatctcagtccaaattggtttgtcttcagggtaagcactgtgttttcttcttgtgttaatatctaagcatgcttagtgcttgaagtgaggttgacatgttttctgctgtggctattagtttcaatccacagcagaaaatacattacattcaggaaagtttagtgtatatttatatttatatatagtttaatgtatatttatattcagtgtatattcatgaagtttagtgtatatttcatgaatgtatttcactaaaattgcgtgaatcaggtattgtgctaggctgtgtccagagagatgagatacaatagtgaagaatgtaggcatggtctctaatctcttggtgtttatgatctaaatactagatttacaaactaagtgcaaatttagtttgggaaagaaaggaatgaacagggcttcttagccccaaagttataatcagattaaggtagatgattaaaaggaatgtgaaaaaaaggcatgaaacttttcatttaggttttgcctgaggatttattccaaaagagcatagacaactcctgttctgcttttcatcgtaagtattcttggttcagagaccaattttatttaaaattatttgagttttcattggcagtaataacccttagatagtaacaagataaatgtggttgacattcctggagcaatagttacgtcattctgtcttttatgcttttatcaaaccaaaagaacaggcttgaagaacttgtatcttaatggctgctgttttggtgtttactggtagaaaacggttcctctttcttttgctgttcttatgctctttttctatagaaagtaggagttaagttcacggttattgtaagatgcttccctgaaagggcaagcataatcttagcccagtgagatagtaaggacctatggcataattcacctgaggggataatgatttggatctctctctgttctctgcaggtggctttcaaggtcctgatatggggtgagaaagggtctgttgtggttgtggtagagactggagctatttaggtttaacttcttgaggatttctagtacactatctcctgcagcacatgtcattaatatatattatcatatatatattaatttcatcctgaatttgtcagggttggcttccttggccctcagatccttgggttctttatattttagtcactcttctgattttatgcactcctgtaagagttgggcacactaatttctgtcccagtgttggaggggatggggataggaggtaagactcattagaggactgttactaggaggaaaagatctaggctcttcaaagaaaataatcctcttttacccttgtaatttgctcataaaaaaaaatctccacagaagatggtggctggaagtgagtatgcacacatgtgcagtattcatgaggtgcctgggccctctgtctgatgctgcaggctgacaaaatcctggcttatttagaattgattgttttaatggcagcagggtgttattatatgttgtgataacagagcatagggcctggtgctgctccctgctgttgcagattctcaatcagtaatgtaatgttgattggataaaatgtgcattgcagactcagcattacttttactgtagttggctttggttgttcatggaattaccatatcttgtttttggaggctcttgtagtagttctgagtgatgctttcctttgtaccacacattatgattgatatgagccttttctttagctgagaagccccagtgcattttactggatcctccttcaagctcagtaaattggttcagccaatgcactcatttatttcctctaaagaagtttcaggctttatttacattatagtgggcctttgttaaaaataatctgacttaatgatttccaaggtactgaataaagcagagaaattcccagtgagcactatttccagaataataagaagtatattacttccaagagtgcttgccatgactgttgtcacttgctggagttttgtgtccctcatagtctggactgacagaatgagaatcagaaggaatattggagccttttggtgrcaatcatggcctatctgaggttggatacctagcagcaagtagtatggcatttggatctatccctgtatctaacacatgatagggggccccttactgcctccacaagtgaaacctttgcctagtgtgttcatgactctgcctactgttcagctcctgaagctaacagctaacaggagattcccagcaggttctcaacttcttcttcctttgactctctagatcagacttgttgtggaagagggattgaatcagctgccatataaagaatgcatggtgaccactccaacaggtaactagggctgttattctcaaattttcctcataaaaattctgagctagaatggggaaagatgtaagtaaagcagtctaagtaaaataaatatgcaaaatgaagggctaggtggagctattcttttaaaatcttaaaaataaaactcaggcatttaggaaagaaatctgtgtagatgactttttgttaagggcttgcttgtcaattcaagttaaaggttaacaaatactcttcagcatgcacgtgttgcctctaatgatggcccattgagaccatagttaagaattgctggcagcttatcttcatctctatgggaaagctgctggtgagcacaaatgggcaagtctgttttggcactgaaattacatgttaaaaaaggatagaaagtaaaaaagaaaactaaaaatgataagaattggagaaggtgctttgttctatcctttaatagaaagtagccaaagatccctgtttcagggatttgaaattatgatttggtttagtaaataacgtaaaactgttctattcaaagggtttactttatgaaacttggggactgagtttgtagcatcataattgacacaaattcaggatgagaccaagagttgagcatgtcttaataactatttcagccactttcttctgcttttaaggcagaatggaggctcataaagaagaacagaggctcataaagaagaatggaatgaggaagctttctgctgtggctcacagtggggtcccagtttgaattgatggggtatatagcattctcagagtgcagtgattctctttgaattcagtttgaggaatgtgtatgtgaatatcgtgttataataagtcctattcccattcaatgaagtctgcctctcccaattatccccacaggtttcttatgaagaattaagaaataactgaaaaatcatgactcatctcattatttccacagggaatctcaggcattatacagtgtgtctgaacaagggttgctttgtgcccatctactttaaaccgtagacactttataaaatatgtaggttactccagtgatgaaagataaattctttggttttatttcctaacagggtacaagtatgaaggagtgaaatttgagaagggaaattgtggggtcagcataatgagaagcggtaggttcacgtgtgtgtgatttttgtctctttgtatgcatagaaatggttgctgttttccagaagagaggcaggcttgtctgtcataattgcagcctgcctttagttaaatctcactacctgtgttatctagcctcatggtgctgtggagtcatggcctgtgtgaggctaggtttggctaattttaactacagagcgtattccctaatagagtgctcccatgggcaagccagctttcaaagagattcagaggaggatgggaggataggaggatgtggtgatgctatcttggggagaacaggtcagtttgaagactgagggaatatggtataaattcgggcttggagaactttgaatacctgactggagaaaatatttcttctgtttttatttctgttgttgggctaaatgacttgtttgatatttttactttttttttttttttagacagggtctcactctattgtccaggctggagtatggtggcgtgatcatagctcgctgtaacctcaaactcctgagttcaagtaatcctcccacctcagcctcctgagcagctagtactacaggcacatgccactatacctagcaaattaaaaaacaatttttttttttttttggtagagatgaggtcttgctatgttgcccaggctggtctaaaactcctggcctccagtgatgctcctgcctcagcctccgaaagtgctgggattatgggcatgagccaccatacccaacctaatactttaaaactttatatatgatgagtacgtgaccacataggcaaaagtgcttgactgtcattaattctaggtatttccatctgctggtcttatgaatgttgtatttgtgtttgagtccaactgattacccttctaaaccaacctttgtatagcaaaatcacttgcctgtgattagaacctttacctgttacatggggttttttccattcagccaacttaattgtttcacgtaagatttatgttttttttgcataagtggtagaagctccacttgtttgcactgaatacatatagtttaatttttaacatataaacattcacttttctcttctggttatgaagttatgtttgtgaacaattaaatgcctcaagtaaactaggaactttaagctccttttttctaggaggaagctcttaagcactgatagcatttcaggacatttcaggacaatgatgttcaacttttaaaaactggtaaagacaatggacttttaaggtgcagtttcttctgtttcagttcagcttcttctctaaaggcacaagcatggtccttgtacccttagtatgtactagatgacttgtggtgatgtacagcattgcttataaccttaatagccatttgttgattttcatatatattagaaagaaacttgttttatgtttacactagtgatatagtttcctcttaaaataaatttaagtgaaaacaataaatttaagaaaaatgttaagtaaatgccagtattggtagaattctgatatggcctaaaatcttgaagatggcatgagaatgactgccttttggcaaacacttctttaaaggaattcagactcaaaaatagctctgtgttcagaaatcaacggtggtagtgctagttattattacctgggagagggggaacaatatacaactttttcactgcttgcagcaaaatctttgctgttgagaagtcattgttgagctaagtgatgtcccctgatgctaccttgacctaaaaggagactttctgatctacatcctttattcttccataaatcttttgcattttctcatacaaaagtcacaaatttaggtggtttaaaggcttctttaaaataatagagataaaaatattcctgatattaaaaaagctcagggagctgctcaacaaaatgctttatttcctataatcacggaagcatgacagctctaaaacttgtaagctagcaataaaactagcttattctagtttcattaaccagcccttaacctggtttcattaacctccactaagtatgaaatatgagcatatcagaaataaaagctgtcagcttcaaaataattattttcatcttccttcctttttgtattaataacagtgacaaactatactttggcctgttcttggactttctctctctttcccctaatcttttttctttcttttttcttcttcaaggtgaggcaatggaacaaggtttacgagactgctgtcgatccatacgaattggaaagatcctgattcagagtgatgaggagacacaaagagccaaagtatattatgccaaattccccccagacatttaccggagaaaagtccttctgatgtatccaattctcagtgagtggcttccatttgtttgtaacctttggttagggtttaaattcaacttagtgcctgcctcctaggtacccttatataaaaggcaaaaagagtttctaaatgttyttttctcagttgggaaaactgccccaggcagttcactggagagtttttattgcataataagagaatatacagtagtcagaccttattagccccaacaaacttccgtcttgaacacattgaaacaaaggatttaatgaggcaaaatatatggaatacagaaaatatattgaaacatatctcctctttagcctaatgagtacagcagtgattttcctcaataatttattctctctggaggtaacattttttcctgctattctgttctgtttcttaagcttactcagaccacacttggcatggtctttaagggaggtgagagggaatatgttaaatttgatacctcatatactaaatgaatttagggcttggtatttgataactgaaaagtgtatgtgtcatgttcattattgaagatagcattaataaagaacaagtaccttcatatgaagtggtttcttatgttagattgctatattgctcttacttcaaagacattttgtggccgcgtgctgtggctcacacctgtaatcccagcaatttgggaggtcgaggtggaaggatcgcttgagcccaggagtttatgaccagcctgggcaacatatggagaacccatttctgcaataaatagaaaaagtagctgggtgtggtggcacgtgcctatagtcccagctacttgggaggctgaggtgggaggatggcttgagcctgggaggtcaaggctgcagtgggccgagatcatgccactgcactccagcctgagtgacagagtgattccctgtcccccctcccccaaaaaaagaaaaaagacatttaaaaatgaatgttaaggttgctaattcatttggttatcttttgatttcaggcactggaaatactgtaattgaagctgtaaaggttcttatagaacatggagttcaacccagtgttatcatcctactcagtctgttctccactcctcatggtgagttcagcatgaggcagtaactagggctccatatagtcctgaggtgggtaagtatgcattttctagcttctaatcctgaggaaaagtttatctgctttcacattaaatctgaatctaatttgggtaattataacttgtgtttgtcatctgtaagcttagtgataacattttataccattytaatgttcaaatgcaaatggagaagtatgaactaaccccatttaaaagaattgcaattgttttcctggtttggcctgcaaatgactcaaaggttcctatttcccttggctcgccacttgagcctgagaactgctcacaaacagcaagaaacataaggttctagctagccctgtagtcttactgaagtaatctttgcagtgtgaagtgaagagcagaagtttttaaagttagacttctgctcaaagggcagagagaactgtgtgttctccattcctgaaggaggtgtacctaacttaagatcttagtgtttttcgccatacattgcagaacaattgggaatatattttaagaaaataagtataggtgcatgtagaaatttagcttctaggatgtttattgtagagttatttggtataagaaaaaatgtgaaagtatacaaatgactcacaataaggaaatggttaaataaataatatatattcaaaggatatactattatgtaactgttaaatcatgtttttggaaaatattgaatggcatccaaaaatgtacatggtaaatgtaaaaaagcagtataaaaataacagcattagaatagggtaaagtgttaycaccaagcttggagatgaccagtacaaattatgactattttaattacaaaaatcagagttggatttaatatggaacctaataaatctttccttagcatgagaggctagacagacacacagtgttgtttcaattttggtttcaaaatgcatacacaatattaatagtggttattttaggctggtgggattctaagtgcttttcattttatttttaagctttaaattggtatttttcaaatgttctacaatgaatttgtatttgcttcataatttttaaaaagggcaatatatggcttctctagtcaggtgttttctcatttccaaaatttctaagtcttagccagttctgaagaggctacagtatatctagttgggaaagctggtttcagtaggttattgacaggagttatggcctgtttgattactttgctgtttcataactaaatattacttgtagttcaaatgttggtggtaacaaaaggcgatttgcttaagttatcatttatatatataaaacacaggtggcattgaaaatattgagagaatccaataattattaaaatttttacctttgggaatagaaaagcactctttttagttctaatagtatacatgagaatggtgtactattctttgaaatttatagctgaaaaattttattctgtggcaactttgctatggatttttagtttgacagggtaattaaaatagtcataatttgtattggtcatctcttaagcttggtgataacattttatgtgattctagtgctgttatttatacattttttacatttttacatttaccatgtacatttttgatgccattcaatattttccaaaaatatgatttaacagttatatattacatcctttgaatatatgttatttatttaaccatttccttattgtgagttatttacatactttcacattttttcttatgccaaatcactctacaatgaatatcctagtccttgttacttttccctacctattcccctccccataagctagagtcctaacttctaaaaagctggcgtgctctgacacaccagctttttctgtgaaaagcaagtacactgtgaaacactacacttgtttcacagtgtttcagttgagaaaccatcatcttacgtgtgttcctctttaatttttttttaatagagatggggtgttgccgtgtggcccaggctggtctcaaattcctggccttgagtgatcctcctgcctcagccttctaaagctctgagattacaggcttgagccactgtgcttggcctgtgatcctcattttaaaaaggactgtattcactctattacagtcacctttaaaattaaacaaaataaaaaatactctttagggggaaagtttctataactgaacaattatatttttcaacttgagtataaaataataattctaagaatgtattagtgagatggagggggcataatctgactactgtcaaagcttttcagactttatacaaaggaagagattaaccaagtctgattaggtatccaaagatcattgctctctgtcttctctcaattttagacctagtggcaataactacaaaattcctgaattacaactggtgttaccaaaacatcctaccataataacttttgtttttttgaaggtgccaaatcaatcattcaggagtttccagagatcacaattttaactactgaagttcatcctgttgcacctacacattttggacagaaatactttggaacagactaagttatttaagtaaaataattrtcttatgtaatattacaatcatgttttgattttctatttgttttactgattcacttgagggtggcagagaaaaatgtgttaaaatgctttttagttttggaagtgggtatatttgaggttatatctcatttrgttatttgtttactgttggcaccgaattcaacaatgaagtatatgcaactcttacaaaacataaattttaataatattctaatgcaaattactgaaccctcagtgcattaaaattatttcctaatttatgagcctcttagtttggaggttgcttgaagccacaaataaaactcaaatgagagtcagttctttgtcccactgtagtttgcattttgtttagtttggttttagctctactaaggtttcacatatgtggctattgccacattcctctactgttttctttctgatactggacatgctagtaacttggagaggagaataaaagaatgtctcctggaattttacattcccattaatgtcctcattcagttggcagacctaggatgtatggttaactctcaggccattatgtttttcatggctcatttcccaaactgcattgttggtaggtgccttgctaagctgtaatgcagtgaagaagatggtggggcatttttagtaattggaactgtaacattaatttacaagattgaaccggggatgtctggatgctgacaagggagagccaagtactgttaatgccatcaatcctctaggaaggaattggtggtttttctgaagtgtgggggaaagggtggtttcttgctggatttcatggccagtaagtaaatttaaatgcttcatttttaatttggatgtttctgctagagacctttgatttggaaattagttattttgcatgtttgtcaactgtatatgtatgaaaatagaaaaaaaccatgctttttgtaaaaacccctaagatttgtatatgttcatctttaggcttctgaaagggagagaaatcatattggaaatcagtgttggtgttctgaaatctgcttgtaaaactctcatctcattttacattgatattaaaacattttaacagtgttggctagctgattacttgattaattatactcccatggccccataggaagctgttgtgggcctctgttcaaaagcacagaaaagagcagaaggaaatgtcttagaaagaatcaaagctgatgaaatcagcaaagattgggggaaaggaaggaagcctggtgtagattggattatatttttcctttggggactagaatactagaagaacttcagtatatttttccctttatttttgaatactgtcatataataaattgagattaataaattactcatattacagttcttccatggcaaatgttgctttcaagttgttactgaaattctcatctatacttgtcagttaactgtcttgatacagtgtggattttgtttactcctgactagcagaagttataactaaagcccgttaaagctagaatttctatctccctctcccagcacagatgtgaaccagcaaatttagatggagaacagatatgcttgagattggtgcatcaaactagttgaaaagatgatgcctaccactataggagttaatgcttctaaattattgcttatgttagggcttcagtatttcatttgaggtgactttccaaaacagcagacaaatttatattcaagtgtagatataaaaccatattttaagcaaattatttttgtattaccagccatttagatttaacatgtctttgttcctcgattgatatttagttgactacatttggttcccacatgaagggcctagaatgagcagtaggaagtattcaatgaggtcatagtcgcccctgatatttgtcttctatccctctctagatttcaagaaaattatacctatgggttttgaagtttgggtctttttagcaaatgaggcattatttgtagggttaatcacttgcaggactctgagcgtgggacattttttaagtattctaaatttaacacaagattaacagactattgaaaacaacattgtttttaagtaatatgaacttcagagtagtataaactttgtatattccttgctgaagaacacaccctagcacaataaaaagaacagtccaatcgtatatgcagtggttctcaaaacttgaatgtgcatcagaatcacctagagggccacagattgctgtggcctaacaagttcccacgagatgctaacattgttttggagaccatattttgatttaagacatttcttttataatagaagcatttaatgttataagttttcctataaatattgatttagctgtacctcacaaattttgatatagaatgtttcattttcatttatattaaaataattgctcatttttcatttcttctttgacccagggttatttagaaacatgtcatttaatttccaaatatgggattttccagatttctttctgttattgctttctaatttaatcccactgtggtgagagaatatacttcttattatttgaatccttttaaatttatggagacttgttttatggcccagaatatagtctcttctggtaaatcttccatgggtgcttgaaaactatgttttatcctgccatttttggatagagtgttctatgtcaattaggttaagttggttgatagtgttgttcaagtctactttactgattttctcttttttcatctgctccttctgaggcaactttattgactttctgtctacttattctatcagttgttgggagagatcgatgaaatctctgactaaaatttatatttgtttgtttctcctttcagttttatcagtttttgctttatgtattttgaagctttgttgttaggagtgtaaacttttaggattgttatgttctcttgataagctgactcattatcatgaaatattcccttttatccctgttattcttctgaaatctactttgcctgatgttaatgtaaatattctggctttcttttgaataatactaacatggcatatctttgttcatccttttactttttttttttttgagatggagtctcattcactctgtcacccatgctggagtgcaatggcgtgatcttggctcactgcaacctctgcctcctgggttcaagtgatgctcctgtctcagcctcccaagtagctgggactacagacgtatactgctatgcctggataatttgtatattcttagtggagacggggtttcaccacattggccaggctggactcgaactcctgacatcaagtgatctgcccgcctcaacttttcaaagtgctggcattacaggtgtgagccaccatgcctggcctcatccttttacttttaacttatgtgtggggtttttttgagacagggtctcagtccatcaccccggccggaatgcaatggcatgatcatagctcactgtaaccttgaactcctaggttaaagtgatcctcctgccccagcctcccaagtagccaggactacaggcatgcgtcactacacctggctaatttttaatttttctgtagagatggggtcttgctatgttgcccaggctgatcttgaactcttggcatcaagggatcctcccactttagcctcccaaagccatgagatcacatgtttgagccatcacacccagccctatttgtgtttttatagattttttaaattaaacatttcaaaattttatttctagagacagagtcttgcaatattgcccatgttggacttcaactcctatttcctgagtagctgggatgacaagcatgtgccaccacacctgaattgtttttatatttaatctgggtttcttataggtaacctagagttgggccttgctttatttttccaatttgacagtctctgccttctaatcaggatgtttagaccatttttatttaatgtgattattgatatgattggtttaaaatctaccatcttgctatttgccttctatttgttcattattcactttttcctctttttctaccttcttttgcattattatttattattccattttatccatttggattatattagatgcaatactttcttcttttagtggttcctttagggtttatagtatataactttaatttatcacagcccacttcaagcgtaagataagaacttcatgtacttctattcccccactcgagtctgttccctattattgtcatgttttacttctacacatgttaaaccttataatacattgtgggtttttgtttgtttttgatacttttaaagtgatataaaaagaaataagaaaaaaggtattttcatttttttaaatatactttaagttctgggatacatgtgcagaacgtgcaggtttgttacataggtatacatgtgccatggtggattgctgcacccatcaacctgtcatctaggttttgaaccccgcatgcattagatatttgtcctaatactatccttccccttgctccccatgccccaactggcccagtgtgtgatgttaccctccctttgtccatgtattctcattgtttaactcccacttgtgagtgagaacatgtggtgtctggttttctgttcctgtgttagtttgctgagaatgatggcttcatccgtgtccctgcaaaggacatgaattcattcttttttatggctgcatagtattccatggtgtatatgtgccacattttctttatccagtctatcattgatgggcatttgggttggttccaagtctttgctattgtaaatagtgctgcaataaacatacgtgtgcatgtgtctttatagtagcatgatttataatctttgggatatacccagtaatgggattgtgggtcaaatggtatttctggttctagatccttgaggaatcgccacactgtcttccacaatggttgaactactttacactcccaccaacagtgtaaaagcattcctatttctgcacatcctctccagcatctgttgtttcctgactttttaatgattgccattctaattggtgtgagatggtatctcattgtggttttgatttgcatttctgtaatgaccagtgatgatgagctttttttccaatgtttgctggttgcataaatgtcttcttttgagaagtgtctgttcatatccttcacccactttttgatggggctgtttttttcttgtaaatttgtttaagttccttgtagattctggatattagacatttgtcagatagatagattgcaaaaatttttgcccattcaaaaggtagcctgttcactctaatgatagttttttgtttttttttttctgtgcagaagctctttagtttaattagatcccatttgtcaattttggcttttgttgccattgcttttggcattttagtcattaagtctttgcccacgcgtatgtcctgaatggtattacctaggttttcttctagggtttctatggttttaggtcttacattttagtctttgatccatcttgagttaatttttatatgaggtgtaaggaacgggtccagtttcagttttctgcatatggttagccagttttcctaacaccatttattaaatagggaatccattccccattgcttgtttttctcaggtttgtcaaagatctgatggttgtagttgtgtggtattatttctgaagtctctgttctgttccattggtctatatatctgttttggtaccagtaccatgctgttttggttactgtagccttgtagtatagtttgaagtcaggtagggtgatgcttccagctttgttctttttggttaggattgtcttggctatacaggctcttttttggttccatatgaaatttagttttttctaattctgtgaagaaagtcaatggtagcttgaaggggatagcattgaatctataaattactttgggtagtatggccattttcacaatattgattcctccgatccatgagcatggaatgttcttccatttgtttgtgtcctctcttatttccatgagcagtggtttgtagttctccttgaggaagtcctctacgtccctttaagttgtattcctaggtattttattctctttgtagcaactgcgaatgggagttcactcatgatttggctctctgtttgtctattattggtgtataggaatgcttgtgatttttgcacattgattttgtgtcctgagactttgctgaagttgcttatcagcttaaggagattttgggctgagacaatggggttttctgaatatacagtcatgtcatctgcaaacagaaagaatttgacttcctctgttcatatttgaataccctttgtttctttcttttgcctgattgccctggccggaacttccaatactatgttgaataggagtggtgagatagggcatccttgacttgtgccagttttcgaagagaatgcttccagcttttgcccattcagtatgatattggctgtgggtttgtcataaatagctcctattattttgagatatgttctatcaatacctagtttattgagtgtttttaacatgaagatgtgttgaattttattgaagtccttttctgcatctattgagaaaatcatgtggtttttgttgttggttttgtttatgggacggattacgtttattgattagtgtatgttgaaccagccttgcatcccagggatgatgcccacttgatcatggtggataagctttttgatgtgatactggatttggtttgtcagtattttattgaggatttttgtttcaatgttcttcagggatatttgcctgaaattttcttttttttgttgtgtctctgccagtctttggtatcaggatgatgctggcctcataaaatgagttagggaggagtccctctttttctattgtttggaatagtttcagaaggaatggtagcagctcttctttgtaccgctggtagaattcgactgtgaatccatctggtcctgggctttgtttttggttggtaggctattaattactgcctcaatttcagaacttgttattggtatattcagggattcgacttcttcctggtgtagtcttgggagggtgtatgtgtccaggaatttttccatttttttctagattttctagtttatttgtgtagagatgtttatagtgttctctgatggtagtgtgtttttctgtggtgtcagtggtgatatcccctttatcatttttttattgtgtctatttgattcttctctcttttcttctttgttagtctggct

SEQ ID NO: 94778 - DNA, 105404 bp, Homo sapiens
ttttctttttcttttcttttttttttttgagacggagtttcgctcttgtcgcccaggctggagagcaatggcaccgtctcagctcactgcaacctctgcttcctgggttcaagcaattctcctgcctcagcctcccaagtagctgggattacaggcgcccgccaccaagaccagctaatttttgtatttttagaagagatggagtttcaccacattggccaggctggtcttggactcctgacctcaggtgatccacccacctcagcctcccaaagtgctgggattacaggcatgagccaccgcacccagcccaccaagatttttatagattaaattctatttctaagatctgctccaaaattaattcaataagacaaagtagaagtaggtaagattagtcataaatagttgatgctgggtaatgatacatgggagttcattagactagcctgtctacttttgttttacrtaaaattctccataataattttaaaaagttacgtttgtttttgtagtcctcaagaggggatgttcactaaggtcacagcaaagttgcactatacgactctggcttatacccagaaagcatctagccaaacctagcctaagttatgctagattctgaggtcttgctacgacagaaggaagggaagaccacagtggttgtagacttcagagaaataattctttttttttttttttttttttgagacagagtctcgctctgtcacccaggctaaagtgcagtggcatgatctcagctcaccacaacctccacttctcaggttcaagcgattcccctgcctcagcctcctgagtagctgggattacaggcgtgagccaccatgctcagctaatttttgtgtttttagtagagacagtgtttcaccatgttggtcaggctggtctcgaactcctgacctcacgtgatccacctgcctcggcctcccaaagtgctgggattacaggcatgagccaccgtgcctggcctaaaataattctttttaaggcccttctacaacaccccaaatgtagaactgagttgctgtattaaatttgacatttaaatcttggttaaaacaacaacaaaaaaagggataaagaatatttactgtgttttttgctttatttattcagagagtgaaactgtgttacagtgagctaaatttttagctgtacttagaatgtgctccctcctacatttcactctggaaaagtgaagtatcttatcatttcttagaaacctggatgtgaaactagtcaatattaagatcttatacacatcctgagtgatgcccaatttaaggctttgaatagctattcatgtaagtkgacttttctgtgcatttgtatcggggaggatccagttcaggttgatgtcctgggaaccagtgaggctctcgcttaaatcctgagggaagaaaaaaaaaggaaggaaagacaaatgaaaacagtcaacactaaggagttttagtaactgatcttgctcttatttctagggaatagacagtaagtcctgttaaaattgaagaaaaaatcctgtttactcattcatgtagttattcaccttttttttcttttttttttttgagatagagtctcactctgtcacccaggcaggagtgcagtggcttgatttctgctcactgaaacctccacctctcgggttcaggtgattctcctgcctcagcctcctgagtagctgggactacaggcatgcgccaccaagcccagctaatttttgtattttttttagtagagatggggtttcaccacgctggccaggctggtctcaaactcctgacctcaagtgatctgcctgcctcagcctcacaaagtgctggggttacaggtgtgagccactgcgcccagcctcacttattcacctattcagtttacttttatttgagttccttctatgtgccggtcactgagttaggttctgaaaatgtaagaatttgaaaaaacagtccacgtactatgtgttgaaagtggcattttgttgttgtagcttgtatcatatgttgtttcaaagtagtgtccaaactggaaagaaaaattaacagattaagaatctggaagtctacagctaacatcaggaaataaagatcaatatgacatgaattctcacggactgtcatattttagatggactgagttctatggtgttagtctatatccttctaactttcacatgttttgtacgtttgtttgtttaggagcgatttaagtgcaagactcagataaatgacaagtctagataggcaaggaccaggggaaaagctagtctaagtcagaagacattataaatttctgtagactaagagataaagtccaaacagaagtaagagaaaaagaggactgcccttccttttgaaaccttacagataataaaatattcaacttgacagtaaagtagcataggtggttcagctgcggactgttcctctgccccaaccacttcactgaaaactgagagatcactgcaccagaagttattacatccctgcatttcaaatggccactacatttcttttgccaacagaaggaaacaaacaaacaaaaaagacaaagttagattacctgggaaggcaagggtttgggstgcacgatattcctcaggtcatatctttcctggttccagttgcccatcagggtacggtttgaataggtattctcattagtggtgcatcgccatccatactggaaaaacttggacatattattccaatctgtccacrcttcaccatggccatctgcattaacaaggctgccacagtgtgggtttgtgaggaaacaggcgaggttctgtctctgggaaaagacaagaatagaaaagcttattgcataaaccagagaagagaaaaagcatcttttcctgcccttgttttacatagccaggtataacacaagcacaccgtactaatgatccaggctatgttatggttctgtttcttcttctctaagtcctgggaccctttgatccattctttcaatcagcaacagtgggtgactacatggattaaatccacacccccgctccccaggccccgtgaagagacaggaaaaacttcagtattcccaatacaatatggagaattagctaaatttttaaggtaattttgagatgtaggcattgagggactaaaagcactgctacagtcaaagagaacaaaaagaagtgagagttgagtaactagataacacaataaatgagtaataaatgatcatttccttccttctagctcaaatgatgccttccctgaagttagcttctctttcaactcacataaaactttatctttccctgtatttataactttttaccatacattagagttctttaagtctgcattatatctcctatacagagctgtatgccccttaaggacaggatctgttttattcattattgtaccctgtccttctgcctgttctcccaatcaatctggattgcatataccagatgatcaatgtctgatttcattttttttggtaagataaaagctcaatctttctttttccccaaaatgtgagtctggccccctgacttaggaagatgatacctttcctgaagaagagtaacttgatgctgagtaggttgagctctttgaagatttcttatgagagtcacagaaatccttacttggctgttccatgttctttaaagatgtcaacaaacctggctttcccagttctccaagcaaagaaagaatcacccagattaccatgggcaagtggccatgatttgggagtcaccacccacttgcctttccacaggcagaaacaaagccaataatgcagcattgaaggatgacatcccaggtaactaccctcataccatctgcctttgtgaagacagaygcatgcactgatgttaccaaacaacatgatgaccagagtagctggtgccacaaagtccaatgggcctggtactcatactggagatctaggtgtaactgtctctagggctggaatgacagacatcaccatccactcagttgtccaagccagaagcctggggcttatctttgactctgacttgtctttaattttcatccagtcactaagtcttgttgatttttgaatcagactgccaccctccattcccattgccaaatttcaattcaaatcactgtcagctttgtctccattattgcagttgcctcttgttttatcctgccatgccatcagccttgttcctctccaaacctttctccacaggaaaggagaatttttcaaagtgaaagtataattgtatcatcttcttatttaaaatctttcagtggctttccaccgttttcagagtaagattcagtctgttaaaatggcttacaacagaacagagaaccaaatacagcatgttcttgttaccggaaggggtcctgatccagaccccaagagacacaagaaataattcaaggtgagtctataaagcataaggaagtttattaagaaagtaaaggaataaagaatggctactccatatgcagagcaaccctgagggcagctggttgcccatttttatggttgttgattatatactaaacaaggggtggattaattcatacctccactttttagaccatatacggtaacttcctgactttgccatggcatttgtaaactgtcatggcgctggtgggagtgtagcaatgaggatgaccagagatcactctcatcaccatctcggttttggtggattttagctggcttctttactgcaacccgttttatcagcaaggtctttatgacctgtatcttgtgctgagctatctcatcctgtgactaagaatgccttaacttactgggaatgcagcccaggtcttagccttatttacctagcccctattcaagacggagttgctctggtataaatacctctgacattctcacttataagtgggagctaaacattgagcaaacatggacctaaacatggaaacaacagacactccaggctactaactagagtggggagggcgggtggtgtgggttgaaaaactattaggtgcaatatacccatgtagcaaacctgcaacctacctgggtgcaatatatccacgtaacaaacctatacctgtacccccatttgtaaaataaaagttgattttttttaaaggcttacaacgctccctatgacctggcccctgcctaactcttcagtctcatctgttactctccctccaattgtgtttcagccaaactcaactattctgtttctccatcaagcttttgcatatattgttccttctgcctcttcacgcctcttgactcagttaagatgcacttttaccctgttagctttcaactcgggtttacttcatccaaggactctctgaccctcttcgcccccaaacttggtaacgttcttctgtgtgctcccagagcacacaccctgccatatcagagttgcctgttttgctctgtgcattccccaccagactgcaggctcattgaaatcataggccacattttgttcatccacatatcgtaaccaccctcacagtggcctggcacgcaatagacactcaatactctttcttgaacgaatagaagataggagatttaagcacctggaagagaaattttgagcagcagagacactgggaggcagccatttcagacgaggtgaaaaaaggttcaaaaccttctgcgtcaggagcatgcgagacacagtccaacctcttccttggcctcagccccgccccgtttctttcacccagaactcgcctcacccccctgcgctagtgactgcttgtgacctcatgcaggtgtgatgaagtcgctcaaggccatgcttgggctaaagacactttgatcttcccgagggggtgaaagggcgaggtgacaggaaagtgcgcgtcttgcttttgcactcatagttatcatccaccggggagtcggtacaccggctcgtctagacaaccaggcgccatgggtgcgtcatcaactagtgacgggagaagacggggcggagagagatccgtgaaggaagtgacgtaaaacgagcgccacagagaacgcgagccgggagtccgtggaggccatggcccctcggcgcctcctgttggttggggaggggaatttctccttcgccgccgctctgagcgaaaccctggatcagagcrctcaacttaccgccacctgcctccagcgcccggccgagttggctcgggatccactggcctgggagaatctgcagtgcctgcgcgagcgaggtagcgagcccgcccctctgcgaaaccccgccyagcggccggcgcgtcccaaagtggaaagggtgggggcgtggggatgtaacccacgtggagattgttcttgatcgtcccacggatattcacataaagccggctttgtgcccagacttgggctggtctgcacggtttaagttaggaagagtttttctgttycatgtcttgaggcatcctcctgtctatattttgcgcccccaaactatctttgccaggtatcgatgtacgtttcggtgtggactgcacccagctggcagatgtctttgaactgcacgagagagaatttgatcaaatttatttcawcttcccgcattgtggacgcaaagctggcgtagctaagaacagggaactgcttgccaaatttttccaaaggtgaggaaaggagcrccctcacaaggaaaatgtttaagatgtccataacatagttactgtacccaaacataaggcacacgtgcaagctactatgatatgtttagaagagactataaagccccaaaggaaccccaagtttagttggaaagacagatatataaaccctaaatgctaaatgaaagtacaaataatgtactcttgggtgtgtaaaagaggatcatttatttttgacagtgcaaaataatgagagccatatagtctaatggctaagaacgtgcacttagaagccagactgcctggattcaaatcccagcccaccacttaacagttgttatttttttatttttatttatttttattttttgagacagagtctcgccctgtcgcccaggctggagtgcagtggtgtggtgcaatctcggctcactgcaagctccgcctactgggttcacgccattctcctgcctcagcctcccaagtagctgggagtacaggcgcccgccaccacgcccagctaattttttgtatttttagtagagatggggtttcaccgtgttagccaggatggtgtcgatctcctgaccttgtgatccgcctgccttggcctcctaaagtgctgggattacaggcatgagccaccacgcccggccaacagttgttattttaagcaagcttacttaatctttacatgcttccgtttcctcaactgtaaactagggatattaatagtaactaactgggccaggcgtggtggctcatgcctgtaatcccagcagtttgggaggccgaggtgagcagatcacctgaggtcaggagtttgagaccagcctggccaaagtggcaaaaccccgcctctactaaaaatataaaaattagctggccgtgctggcacgtgcctgtagtcccaggtacttgggaggctgaggcaggagaatcgcttgaacttgggaggtggaggttgcagtgagctgagatcgtgccactgcactccagcctgggcgacagagcaagactccatctcaaaaaaaaaaaaaaaaaaaaagtaactaacagcctcataaaattattgtgaactgaaaacagtgctttacatgattataccacaagacatgatactattggaggtgtccgatggggcatagctgtcaataaagttttgacagaggtggtattttaaactagtatttgaatttcaggagggcagtgaaaagaactttctaaatgggaagaaacagcctaagcaatgaatcatatataggaactgtgcagatattgatctttctgtgacatatgcatgaatgacacaaatgcaaagcagaccctggtcagccaatcttatcagtgagtgggttgaacatttaatttatgcttctatttacttccagctactttctttgcattttttgaggtctaataratttttgcacataggtatgattggattttaattatttcacaggcaaaccatgtgtatgttgccaactcctgtggtaatttctgcttgtttatgataattagttagtgtttcttttctccctattagctgtgcagacgttcttgcagaggaaggagaagtccacgtggcattatgtagaggacaaggtggaactcctgcggataagccccagagagaatggcacaacagttggcaagtggttgccatggcagccctgggggggctcattttaagcgacgtgtatccattcagctgtaaggctgtggcagggtacaagtgcactggatataggtaggtaatagcataggtttaagccttctgcgttttcatctctctcactaatgataacaaaatctcatagacagactcaataggccctgccaattaattgattcrgtctctaaaaatacttgcttattttaataatgacagacttcatattggtgtctattttgccaggagtcaagataagtcctttcatgtagaaggtgctttgaaccatatcttcaccaggagcttacctttygaaggttctcaacccagaatcttcaggatcaaactgggtaaccagtggttttcctttccagaaccagaagcacttgtaggaaagttgaacaggtaaccagttattttgctggaaatcacttccatctccagttgtatcctgattgtcttgatggcaaccatatattgaatggatggtgcataaattgttagtgatgttggtgctatgtttatttgtcagcctggcctccttaagcatctctagaattataaatggtcacattttctgatatattgtagggatggtggctgtcagagttctgaaatacacgtctgtttctccttatggtagatgatttctttgtttcctttcaagatcaatttaaagataattcttttctgtccagctatttgtatttttaattctagctacattataattatttactatcttaagttagaaaagttatttttgtgtgtgtttaaacaggggtttcctggaagcaccttcatgtcatcctatcaaaaccataaatgagaaactcattgctgaattaggcaaagttttcccgctaaaaaggctgaagtgttcctaccctttgctgccacaggaaggtaccagtgttcttcctttctggaattgtgactttctgtcagctgctttttggattagtctccatgaagataactcaaattctgagtccctgactggtgggacatcacaagatgtggaagactttctagtgtcattttcagaacttagccttctcaagaatcctggaagagatggtaaagaagaagcttgtgaaggaacctgtggccaggccaagatctgccttagaccttctctcctagtgcatgttcaggatgtcatcgaagtaccagacttcctctcaggttctctgcacatcctcagtggacctgtctttcagaagtgccacattttgcctttmacaatgccagcatttcatgaaactttatttatccttggggttaatcaaaatctgaaggatggctgtcttcaatcactgctggatcatctgaagggcattctagatagcctgctgacccagacattgccggagagctctaagctgagcagtttagtcaaatttgtccttcagtcaaatggaaaggattatatgattcgtgtgaagactcataattttagcccagattgtactgaggatctaattattgggtctgttatcacatctgccmctagtgttatacataaagaccagtgttttgtgtttgtgtctatgaacttggacttattagccatgcttgtctggtgtatctctgactggagaatgttgtggacgtttgataaccgtttcctgaaaaattttgtccctggcaaaatagaaccctttaaaagtcattctctgtatcctccatgttatgtgcatgatgttagtttttggatagatcagaagaaaggatttgatgaactagagtttcacactgtggcccgagcagtgtctcaggacactattatatccatacagtttcttagccgtttccagcatccaaagactcaacaggtcagtctctgctatagattgacctaccagacctgtgacaaggccctcacccagcagcaagtagcatcaatgcagtcccagtttaggaaggagattcaacaacacctatatgttatacctcggtagtttggtaaatccttttctgcagtgtgatccttcattgcgggggatgtggaggaaaattaccaacttgcaaccagtagtcctttctggatttttgtttttgtaaaatcttttactttgtgaccatagctactgttcgttgatctttttttttttttttttttgagacggagtcttgctctgccgcccaggcgggagtgcagtggcagtggcatgatatcagctcactataagctccacctcccaggttcatgccattctcctgcctcagcctcccgagtagctgggactacaggcacctgccaccacgcctggctaatttttttttttgtatttttagtagagacgaggtttcaccgtgttagccaggatggtctcaatctcccggcctcgtgatctgcctgcgtcggcctcccaaagtgctgggattatagatgtgagccaccgcgcccggcctactgttagttgatcttaaagataccttgactctattactgaaacttatagattataatgtgattggtgacatttggagttgtgtaatattttggtcccgagaagtgactaaaacaataaacaaaacagcatcttgtactttagatgctctattgttgaacaggcagtagaacttaagtgtctcatcaaatataaatatgttttccacactgtcaattactcttcccttaactttgttgtatcatttcattaaatcaccttatgagagtagtttttggcatcagactaacatttattagcttgggaaattgcaaatattccacattaattttggtattattattataatcatcaccattttaattctgtggttgaaagtcatggaacgaataaagtgtcagatttagggttaacatttgggtctgtttgactctaaagcccatgttctttctgctactttctgttacttcttccctagtctttaacagtaatcgttcaactgtgattaaactttgcctctctggattttggggccttctgttgtaagtatctctaagggacactggaaaattagcttaggattctgcagaatgcggtactctaatgtgaagtaatgtatgctcctgttaatagttaggctccacatttgggattatattctgtgagagacatgactgtcttatttattcttagagaaaagcacttgggaaggcaagaatggaagtacagagacaaattaggaggttattgcagtaatgcaaatgagataatgacctggaccaaggtggtaaaatgttgggttggataatatttggaaggacttgctgatgaattaaacatttgtgtgtgggtgagagaggtgtggggttagagaaataaaggaattaagcaagactactaggtttttgacctgaatacctagaagattggaagtgtcattaacttggatggaaacactgccatacgagtaagtttggggagtgggataaagaatcaagggatctcttacagacacatctattgctgagctctccacattgactattttgctaactgatggcaggtaatgtgatttatccctttcttctatcctcagtagtgcttggtacatgtataaggtagcgtttgaaagctggatcttaaaacaagggcaggaatgtgaagggagaattgttaggcaagtagggtgtgcattttgggcagaggacatccataaacagagatatagataagggagcatttgggggcactttctaggctagttagctgggatgtaaagtgtgcataggaaagtagtgggagataagattggaacggtaagttggggctggagttcatgaakaccaaatgctagaataaggagtttgtactttatttggtaggcaataggaaaacatccggtggttttttattaaggaagtgccccagagtagtgctttggaaaattaactggttaatgttgcacaggatgaatttgagatgagtgatccctgtggagatgctattgtgttagtcctacgtagacagggagggacctgcattagacttaaatgaaaaggaggagatggrtatatgagatacagttaggctgggtgtagtggctcacgcctataatcccagcattctgggaggctgaggtaagtggatcacttgaggccaggagttccagaccagcctggccaacatgacgaaacctaatctctactaaaaatacaaaaattagccagtgtggtggcaatagtccctgctactagggaggctgaggcaagacaatctcttgaacctagggggcagaggttgcagtaagctgagattgtgccactgcactctagcctgggtgagcaaggaagactcttgtctcaaaaaaaaaaaaaaaaaaagaagaaaaagaaaagaaaaaaagagttaagctggatatttgaacttggtaactaatgactgcatgtgagaattgagcaatatgatcaatctccattttcaatacttgggaatttttagtaggaaatcacaaccttctgagaccttgtcaagagattagcattccctctataaacttgtcccagttactggcatggagctcgacagggtaggatatagctctgtgattagaggagtggatagagtgtcaggattagatgaatgacccccaagatatgggggtcacaggtatgatatcatcaatgtgccagtataaaaatgattgtaggaaatgaagacctttcaccagatctggtgggaagagagagcatgggctttccggtaagatagtcctgggctggaacatagctccaccatttactagctccaagtttatttagtttcctggtaaataaaacaaggttgttgtattaagtttaaaaaggataaaatatgtaaaatgcctaccacaatgccgtagtagcgatgacagtgatggacatctggttcaatttgccgcacagaatttcatcagtctacactctgccattaccggtttgtctctctgaagcagtttttagctacaggctgcctctgtcactcttaccaaaatacagagaaggcaaggtgttaaaaatgacattttaaggaccttttagtagatagctgtgctgtgatatttaactgaatacttcacatctcactatgtagatttctttaatcactttctatttgttttttcatttaaataggggagctgagaggtggttttttttttttttgagaatggagaatgctgaaaagtgacggaaaagagggttggagggaggtaggaatggctagagttagaagcaggtggatgggacagccctgatgaagaaactcctcaggttctatttcttcgctactcggggatctgccccaattggcccagtaacgctataatttagtattttctgcgcatgtcaaggtcttttgtccctcggcggacaccgtttgccagccaaagctatgtctgcgcgctcaccgacttcatagggtgccgaattcttttttccccaggcttgccatggctagtcgaggggctcggcagcgcctgaagggcagcggggccagcagtggggatacggccccggctgcggacaagctgcgggagctgctgggcagccgagaggcgggcggcgcggagcaccggaccgagtacgtgtgcggcgcggcaggggcgtggccggccggcggggcggttcggggctgcccccgggagggtcttagctgtggcgcgcggggctcagtccggcctggcctcaccgcgggaggcccgagctccctcttcagctaggtcctattggtcttcctgggcgggtcagcattcagtcttcgcccaccttagatccctccactgcgctgtaaaactgccttggagtgcggatctgtgatgctcctgggccaggcctagagtgggcacagcctctgtgggagatgtagacaggatcaaagagtataccttttacggctgttcctcacagctccttttattctccctcaagtcccgaccctttactgggcccatccaacccgccatcacctcttcccaaaccctggaggctgcaggttagaactgcattaagggagctgtcaacatatggaattggagtaggctatgtaccttgcacctaggcttctatctgaacataagggggaatgaataaagccatcaaaagcaatgaccttgttaagaaaagaaagaaaaggagaatgacagctttgtggccttcaagtgagtgattagttggcttgggataaatggagtggcataaatgcattgagctaaagtgtatgagttaatttatgccttaaaagcaggaagtggaaggagtgattgagtgattaaagtcaattcttcagaaggctgaggcaggaggattacttgagcctaggagtttaagtccagcctgggcaacatagcaagaccctatctcataaaaattttttcttaaaaatctgaatttttattaattttactgagaaaaaacaactagctattcacctttttaggtgaataacttaagtgctttgatgtcccttgccctttttgtcctttctatctagatttaggtcttctgattagcaggtccttcctgacatgctttttttttttttttttttttkgcttttgaacaggttatctgggaacaaagcaggacaagtctgggcacctgaaggatctactgctttcaagtgtctgctttcagcaaggttatgtgctgctctcctgagcaacatctctgactgtgatgaaacattcaactactgggagccagtaggtgatttctttagttttctctttttgttcttgattttgcagcataggtgttattaccaatcgagagacaaataatatacaagtgtgactcctagtaaaataactgtattttcttaaaaaaaaaaacaaaaaaacaggcctataatcccagcactttgggaggctgaggccggtgaattgcctgaggtcagaaattcgagaccagcctgaccaacatggtgaaaccccgactctactaaaaatacaaaaattagccgggcatggtggtgggcgcctgtagtcccagctactcgggaggctgaggcaggagaaatgcttgatcatgggaggcagagtttacagtgagccgagatcacaccattgcactccagcctgggcaacagagcgagactctgtctcaaaaaacagagatgggggctcattatgtcaccgaggctggtatttaactcctaggctcaagcgrtcctctcacctcgccttccaaagtgttgggattacaggcgtgagccactgggcctggccagtaacatgttttcacttttgtattctaagcggatgatttacctgctattgaaggctgtagggaatttagctggtttacacaaaggtgtaatttgtaattttctttttttttttaaatgaaaataatacctggagatagtttttaaagttaacaactactaaaatacctaaaggaaaaacagtagctttctattccacttctcgtgtccaaatcctactttccagaagcaaccactttttttcactttttaagttatttcttctgacggttaccaaaatagtgttactaaatagtatacttttattgctatttattgatttacacattacctgttgacttttattatagaaaattcaaaggtaaaattttctgatcacattttgaattaaaaaaatgaaggaagactgttaagtgtaggttgtttaaggagaatataaaatttagaggttttctgttttggctaacaagtattgagaaaaaataagtagaaggtaaaatttaagctttcagtgttgaccaaacagcaatcttgtaaaatttataatgtcttaatattttaaatattgtatcattttgattccttttttatccatcaattgcagatcgcccaggctggagtgcagtggcatgatctaggttcactgcaacctctaattcccaggctcaagtgattctcctggcttagccttccaagtagctgggactgcaggcatgcaccaccataccatgctacttttttttttttttggtagagatggggttttgctatgttgcccaggcttgtctttaactactgggctcaagcagcctgcttgccttgccctcccaaagtgctgggattataggtgtgaggcatcgtgcctggcttgcctttgtttttaatatttctrctcagaaacttcacttgcatctgcttaacagagatttttggccagtataaccctgaatctatctgttttgtatttttagacacactacctcatctatggggaagggtttcagacttgggaatattccccagcatatgccattcgctcctatgcttacctgttgcttcatgcctggccagctgcatttcatgcaagaattctacaaactaataaggtaagggcagaccaacctggaagcaatcacaattgatcaagaggtgagtctctggtatagttttgagaaaaggacaaaatgaattggaagttaaaagggaactttttttgaagaagratcatttatccaattcaccattcaacaagcattaatgaaacaacttttatttggtagacactgtattaagtgctgtggctataacagtaaccaagcccctgacttaatgaaacttgtggtttagtggagaagatgaacattgaacaaatcattctaaatatggtgggtcttatggaggaaaagtacaatgtacggtggaatagcatattaggagggtctaatttaagtagagtgctgagaaataattagatgttaactgggacctaacctgattagttttcagaaatttgactatgatgcgtcttggtgtggatttctttgggtttgtcctgtttggagtttattcagcttcttgaatctttgggcttattccttttgccaaatttggaaaggttttagtttttatttttttgaatactttttcagccctgtccggtttcctcttcttctggaactttgatgatgtgaatgtcagatcttttgttattagtcccccaggtctttgagactctgttttcaatttattttctctcaatggtcagtggaggcctggtagggaacctcgagttctacctccacttggcggtaacaaggtagagacttcccactaacgctctttccctgctgggttagtgggaagtagtatcaaaagaagccagctaaaacagaaagcttaaataagatcgtaggagcacaacagtgcaaagaaagcatgctgagcccatgaataatccagaatctcataatgcaatacctaaaatgtccagctttcaactgaaaatgacctgtcataccgagaatcaggaagatctcaaactgaatgaactgttgttcacattgagtaatttcttttcttctgtcttccacttcactgattctttcctatgtcccctcttccaatgctgaccccgtccattgcatttttagtttgttctatgtactttttcagttttaaaatttccattcagtttttctttatatcttctaattttttttactgagaccttctcctttttcatttgcttcaagcatattcttagttattcactgaaatatttttacaaagcccgctttaaattttgttagataattctgacacctctgtcatcttggtgttggaatctatcgatggactgttttcattcagtttgagatttctacaagacctggtaggatctattaaggtattagactgttgttcttttccccccaagtctgttatgtaaagccactgcaaggttttcagacaaaagagaggtatgattgcatttacattttagaatgatcagaaaggtrgcacctgcagaaagtgacaaaatactgtccctcccttccctatccggtatctcatttccatttttttgtttgtttgtttgtttggtttgtttttgagacgaagtctcactctgtcgcccaggctggagtgcagtgatgtgatctcggctcacagcaacctccgtttcccggattcaagtgattctcctgcctcagcctcctgagtggctgggattacaagcttgagcccccacgtgtggctaatttttttgtatttttagtagagacagggtttcaccatgttggccagtctggtctcaaactcctgacctcaagtgatccacctgccttggcctccaaagtgctgggattacgggcgtgagccactgcacctggcctcatttctggtttttttttttgaacttgtcaaaggaaagataataaagggtgaagggctcagcagaaaactaacaatgtgctatgcagagsgtttttatttccatttggctatctagtatcacttcaaattttacatgttcaacacagaattcttcctcttctctaatcctgttacatcactgatgtgcacagcaagtgaaatggaaagcaagatttctcttcttctcttgttcttacttctgatctcctttttcctagccattcagcaaaggggaattgtagcttagagagtcttagccccagcatcataacgttgagtagagaaggatggttgtttctgagagacagggtggtaacaattggcacatctagtgatagctaccttctcaatctcttgctaccccaaatgaaagcacctttgtattatctcttcatggacctgttcgtgaatttctctgaagtgtacactcaggagtgagatcccacaagtaggcccattttttttgtttgtttttgagatgragtctcactctgtcgccaggctggagtgcagtggcacgatctcggctcactgcaacctccgactcccaggttcaagtaattcycttgcctcagcctcccgagtagctggggttacagttgcccgccaccatgcctggctaatttttttgtatttttagtagagatggggtttcaccatgttggccaggctggtctcgaactcctgacctcaagtgatccgcctgcctcggcctcccaaagtgttggaattacaagtgtgagccaccatgcccggccagttatactatatattaagtagtgtttaagttctgagaaattcagtgctcttaaccatatggtattctgtagtataaagctacttaatataacccctattttattatttttattttttaaattgatgtcaattataaaattaataaagccacataacagaactttggaagataggaggaaaaatactcatctaaatctaccaggttgctatagctacttttaccattttattacatttctttccagtctttccacatgcatatagtgtccatagctgtaactgatgtataaataatattgtacattttctcttaatattttgtcataatcactacctgatatattatggttgttgaagaattgcttgttgaatgagcattatattgcaagaatgttttcactatctttgtaaacataaattttaatagctgtataattgtccatgagctagatgtagcctagtttatttaatcatttccctataattggatattttgtagtttttgaaacagtttttactaaaactgcaattaacattttcatgaatggagctctacctcccaacccccaccagctggagtgatagaagtaggtatactgatattgagtcaagggatatgaaaattcttgatccatgttgcttttcaaaagaattataccaatttacagtgttattgacaataaatgagagtggttcatgtttatgagtttttctagctcatatctgtgacttctgttttctttttctgggtttyttttagattcttgtgttttactttttgcgatgtcttctggcttttgtgagctgtatttgtgaactttacttttacaagtgagtataaaaactttgcttctaaaagtgctgtgaggaaacccattattgcatagattatctgttgtgatagtctaggcagtgattagaaatagaaaactcttgaccgggtgcggtggctcacacctgtaatcccagcactttgggaggccaaggcgggcagatcacctgaggtagagagtttgagaccagcctgaccaacatggagaaaccccatctctactaaaaatacaaaattagccggttgtggtggtgcatgcctgtaatcccagctactcgggaggctgaggcaggagagtcacttgaacttgggaggtggaggttgtggtgagctgagattgtgccattgcactccagcctgggcgataagagcaaaactccatctcaaaaaaaaaagagaaagaagtagaaaacactttcctcctagctcctgatatatatatcatatacatatttttttttctgggaaagaaaactttttttttcatactgagttttattgtatgctgctgccagtgtggataaaacagttacccttgtgaaatagaaattcatgaaattcagagaggtagatgttaaagactgatgaaactagaagttcgtatattacagcacatgtgctacagggataagcttttgtacaggcttcaaatttagctctcttttgaatatccactggatcataagaagtggtttgggaaacttttgaaattcattttactacaaaaaagaacagattttctggggtctgaagggatttgtacttgaagatactctagtcagcagagggtcatgttgaacattctgcagacagaattgtttgaagtctgcagctgcctgggaaacttttatgcagttgagcctggcctccagccggggctgttgaaccactttcttcatagcggcaacgctggaggagccagacatggtgcacgtgagggccgggccagttcgtgggttggtgggtcgtgggtcagcggggcctgactgaaaacttcttgcttttatttattgttctcttctttttctttttttaatttttatttttcaatagtttttrgggtacaggtgggttttggttacatggataagttctttagtggtgatttctgagattttgatgcacccatcacctgtagctcctgatattaaatctgaagtgtgacttctcgtttgaaaccaacagttgaagggaacactgtacttctaattatcgttttctttcctgaggtcataaataccatatccttatatcattcattttaattctgttaaaaactatctaactggtctttacttgataggatttagtagaaccctattttcggtcctaagatacaggatcatgatttgcctctgccctacagcttagttgataataaactactcccggtgtgggatatcactgctcttgtttgcacccaatatattgtctttcacaaagtacctattagttgattgaatattagttgggactattaagcatttaagtgtcccggtaataaatatagccaccttttttacatgataactaacaaacgtcttgttttaataatgctttagtaatatatttaaaggtatttggacttagtgatcattatttaaaatcttcccacagctaaaaatgtcagattttaaaaaatgtttggccttgactgtgagtggagtggagggaaaaaaagtaaagctagtgctgcctttgaggattgtaaccgtaaattccgtaaattggtctttatatgggtttgggcctgaattcaratcacctatgtggtccttcaagccctaagctgagaatttactttaatatattttatttattttattttatttttgagactgtcacccaggctggagtgcagtggcatgatttcggctcactgcaacctcagcctcccgggttcaagcaattctgccatctcagtctcctgagtagctgggattacaggtgcaaaccaccacgcctggctaattttttgtacctttagtagagatggggtttcaccgtgtcttggtctcctgacttcgtgatctgcccgcctcggcctcccaaagtgctgggattacaggtgtgagccaccaggcccagccgagaatttattttaaattgttctgggttggtagtgcccgtggcatctggcaaaaaatttctctagagaaatggacccttaacccaagtgtctgaaaattaccagagataaagttctagtgaacaagaaattataataaaaataaatcagagcacagagggagcaaaacattatgggtgagaatcagcagaaataacagtcaacagaacgttcacctgaaaaacttcatttattgggaaataggaatataatgtaagtatatttaacattttcaaacaagtaaaagaaccaaaaacatgaacaagaaacaagagatgaccaaataaatttaaaaaattcagaacttataagaatcatataatatgtaatattatataatatgaataatatgtatataatatttatatttaagactcagtagataaacagcagattagacattctgatgagtaaactagtaaattggaagattgatttaaataaattactcaaaatgcagtacagacagaccaaaaaaaaaaggtaatatagaaaaggttaagaaatgtgtaagccacggctgggcacggtgttttatgcctgtaatcccagcacttagggaggccgaggcaggtggatcacttgaggtcaggagttcgaaaccagcctggccaacatggcgaaacctcatctctactaaaaatacaaaaattagccaggtgtggtggcacatgcctatagccccagctacttgggtggtagaggcacgagaatcacttgaactcaagagacggaaattgcagtgagccaagatcaccccattgcactccagcctgggcaagtgagactctctctaaaaaaaaaaaaaaaaagaaaaaaaagaaacatgtaagccagagttgaaagaactgacatacatctaatcagattgtagaaggagatgatagaatgcggagaggcaatattcggggtattaatagctgagaattttctagaaatgatgggaaaaaaagatgctaatccatggatttagtaaacctaacatatcccaagctagatacataaaaaattagtgtagtgaaactgtgtaagacaatagagacaaagagaaagattttaaaaattgtcagagaactaatagaatacctgcaaaggagtgttaggcaattacactgacagaagactttttaacagccagaagaccaaaaaagaatatcttcaaagtcctgagagaaaataactttcatcctaaaattgtatattaggttaagccatcttttaagaccaagagctaaatacagacttttcagtttaaaaaaaaaagagaaagggaaaaaaaaaggaagaagcctgtaatcccagtgctttgggagacttaggcaggaggatcattgaggattgcttgagctcaggaatttgagatcagcctgggcaacatagcaagacctcatctctacaaaaaattagctggatgtgatggcacatgcctgtagtcacagttactcctagccattcaggaggctgaggcaggaggttccattgaacactggagttcaaggatacagtgagctatgaccatgccactgcactccagcctgagcgacagagagtatgactctrtctcggagtgggaggaggaggggaagaaaggaaacgaaaggaaaccaaccaaccaaaaaaacggaatttatcattaacagattcttattgaaataacttctaaaagaggtacttaggaaaaagcaaaattatttcagaaagaagctctgaaatgcagtaaggaatctgagctaggaaatgatgaacacgtgggtatgtccgaacaaacattgactgagtgaagcagtaataatgcctaaatacatttaatttgtggggttcacacctacaagaaagaattagaagaagatacgtaattgcttaagtttgagaaacactgatttaaccacttattcacattttcatctatctcctagcctttttttctgacaactaccatttattgagcaactatgtgccaggcactctcctaagcacttttccttgcattgtcctcacagaaaccttacaaagtttgtattattatcattattttatgcttgaggaatcagacagagacattattcaaccagagtagggttccactgctagtaagtggcagagccagaatttgaatgtgtgcccacctgtatctgaggtctattatttttcaccacatcattctattttccacttgatagatataatcttagcatgtaaagaatacattttcttttaggtagggagcttctcttctgtgtcagaaataagaatgtttgggtttcttatgcacagtgaattgctaacaaacctgacaaggtagttttgtgtttgactttagatcttcagtgttatctgtggtacgtgtttttctcctttgatttgaaatgtctattcctaatattctcaatgctgatagtctttgcctttttcctagggctgtgtgcaagaagtttgggttgcacgtgagtcgaatgatgctagccttcttggttctcagcactggcatgttttgctcatcatcaggtaagtaaaagggcagatgagggaattgcaggtcatcaccaggtaagtaaaagggcagatgagggaattgcaggttcaccaatagttcacagttgcatttaaaggaagcatttgtccaaatgtaggttatatttgtagaacatgtcaataatttgcagagcactgttatctacattatcttgattgacctttgtaacaatcctaccatgtaagtaagaaaaacattttctcacttttgcaggtaaggacattgaaacgtagatgaaatgatttactaaaagtcaaaattcataaatggtagagctggtagtctcaccaggatgttttctattccattcttgcatcaaccacccacctcctttcttggccattagtggaaagaaagtaattcttttattttgtttaaagaagttatttgtacataaagacctgttgttgatgattctgttttctactgatgatacattatttgatatgtattctatgtgcatcttctgctgggctttcttttaataataagcttctggaaatttagaataaaaacctcactctagagcattggctttcagactgttctgccattgaacatttgtgttgtataagctgaatcaagttggtccactgccaaatggtagtctattcccagttctccagaaaaattaagttactggatataattgtctcaattttagtttctgcttgtgtgtaccaggatctagtatatacagagtatacacaaaaacatagtatctggcacaaaattatatgcttacttttcccttattgaatatatcaaaattgatgttgttctgcagagatgtcagggctgtactccagagtgactttgagagcctgtcctaaatgcatctgtgctctaccctcagattcctctgccccctttgtcctctacactgcagctggaactgacagctttggatggcatcattattatttgacatttattggtaaagggtgtacctcagatgttttttaagttgctttcctactactttttttcttttcttttcttttctttttttttgagacagagtctcgctctgtttgcccaggctggagtgcagtgatgccatctcggctcattgcaaccccctcctcccaaggttcaagcgattctcttgcctcaggctcctgagtagctgggattacaggcgtgcaccaccacgcccagctaatttttttatttttaatagagatggggtttcaccatgttggtcaggctgttctcaaactcctgaccacgtgatccacccgcctcagtctcccaaagtgctgggattacaggtgtgagccaccgcacrtggcctcttttcttttcaagtgcaaggtcttgctcttcacctaggcaggttagagtgcagtggcacaatcgtagctcactgcagccttgaattcctgggctctagcagtctttccactacagcctcccaagtagctaggactataggcatgcatcaccatgcctggctagttttaaagttttttgtagagatggagtttcactgtgttgcccaggctggtctcaaactcttagcctcaagcagccccccacaccttggcctcccagagtactgagattaaagacatgagccactgtgcctggcctgctactcctacaattgatctttatatgtagaaaattccttagaatatctttagttttgtaatctcatttgagacacagataagttgaaggcatcttttcatacagagcctctgaaccctttgctgagtttaaaaaaacctcactgcctattaattgtggttgttttgtagttgatactgatttttcttccctactgattcagactttctgcagcagaagaggcagatctgcatttttgttcagagttactagaaacactttaatcaattgtttctgttccagagaccctgtactctgtcctctgctgtataaaacaaggttgaggtagatggaactaattagggggctatttaaaggccagattatctgtgtcagcaggtggagagtgcaaagcattgctgccatacaatatctggcccttgaggaggctttctagaatttccggggctagaggttaggaccaggacagtctcagaggaccaatggaagataagcttcttcagaagtaaattgtcagcaatggctctaagtcttttaaagcatattcccttcctggaaatataatcatggggtgttcctggggagcgtggaattctatgagtttttgatttgaggtgtaggctgggagaggaattacatggttagaattgtataattgggttggtacctaaaaaaacaggaaggagaggccaggtgcggtggttcacgcctgtaatcccggtactttgggaggycgagacaggcagatcacgaggtcaagagctcgagaccagcctggccaacatggtgaaaccccgtctctactaaaaatacaaaaattagctgggtgtggtggcacgtgcctgtaatcccagctactcggtaggctcagtcaagagaatcgcttgaaccagggaatcaggttgcagtgagctgagatcccaccactgcactccagcctggtgatagagcaagactccgtctaaaaaaaaaaaccaggagtgagaaaaataagagtcattgaacttcatttttttaaaaaagaatatcactttgctgtcctttctaatatagcatttccccaattatgtacctgtttattgacattttatartgtaggtaaatttttaatcagtttttaattgatacctaattaacctcgagctcttgtcctcctgccttttttcacttctttactcttgcagcattccttcctagtagcttctgtatgtacactacgttgatagccatgactggatggtatatggacaagacttccattgctgtgctgggagtagcagctggggctatcttaggctggccattcagtgcasctcttgggtaagaaactaacagttctcctcccatatatcgctgggcatatagtaaatcttaatgttggattagctccatattgtctgcatagaatctgaagttaatcaattgggctttcaaagattctgggaaatggaagaatatttctcttagcacttactattatgattaattctaataagaataatgaccattgagcatctgctatgtgttaggcacagtgaaacccttcgtaaaccttatcttgaaaccttacaacaactctgcaggagaaatacaattattagtactttataaatgagaaagtagactctgagagtttgaataatttacctttaagattatgtttgcttttgaatccaggcctttttgactctatagctgatgttttctccacgcggcaccaccctgttctgtgaattttttcactcactcggatttgaaatctgagtttcctcccgtcttccttctttctttatttttatttatttatttattttgagacggagtttcactcttgttgcccaggctggagtgcaatggcacgatgttggcttatcacaacctccgcctcctgggttcaagtgattctcctgcctcagccccccaagtagctggggctacaggcgtgcgccaccacacctggctaattttgtattttttagtagagacagggtttctccatgttggtcaggctggtcttgaactcccgacctcaggtgatccgctcaccttggcctcacaaagtgctgggattacaggcatgagccactgcgcctggcccagtcttccttctttcttgcccccagcatctttttttccaccaagctccttgtatactctttgttcccactacttctgttctagtgtgtggtaccttaatttcttacctgtaccacaggtaatttaggaaaatattttaatctgatgctaaggttattttagaaggattatatctttattgtaaaaaaaaaaaaaaaaagtaagtaccagattgtataaggtaaaaacaattcctaattttcttctccgctagctcaatcctcaaagatagtcactgctaatagtttggtatatgtctttccagaaaaattatgctgtgtrtataaatatttgtatacatacctatctacattcttaaaacaaatggaattattctgtatatatataggtattctacatattaaatttatataattgtttatattggttgcataacattccatgatttacttattgccttattggtagacatttggttttcatttttttactgttataaccaatgcttcagtgaacaatttttttttcttttttttttttttttttttgagatggagtcttgctctgtcacccaggctggagtgcagtggcacgatcttggctcactgcaacctctgtctcccgggttcaagcaattctcctgcctcagcctcccaagtagctgggtttacaggcacatgccaccacgcccagctaatttttgtatttttaatagagacgaggttttaccatattggccaggctggtctcgaactcctgacctcgtgatccacctgtctcggcctcccaaagtgttgggtttacaggtgtgagccatcgtgtccggcccagtgaacattattatacagatatctttgtgcacttgtgggaatttacctatggggtaaatttttatgaggggagttactaagagaatagtccattttaaaatttcttaagtgccttttaaaggctggtttcctcatctccattcctttcttctattctattttgcacattctcagattttcatgttcctcaggattgtatcttaggtcctcttctgtactttctgctatctctcagccatcttggtgattcccatagcttaatgtctagtccagttatctctcttgagcttcattcatatattcccagctgcttagtagatagctgctgaattcattatcttctctccatagctgttcctttacttgtgtttctattccagtaaatagtactgctgtctcctcaatactgacccagaaacctgaaaattgtctgtgactcttctctctttcccatcagtgttaattggttgtatctcctgaatatcttttgaatctgattacttgtcttcactcccccttgttcctggatcactacacggcctcctaaatgatctcctcctctctagtcttgacccctgtaaatcagctctccaaactccactagagttatattcctcaaatgcagatgtggttgtatcacttccctgttttaaactctatggcagcttctccattgctttatgtcatggaggttggccgactgacctgtttttgtatagcccaacaactaaatagtttttacgtttttaaagggtttttaaaaaacaacaaacatacacagagggagaagactatgcaacagagaacatatgtggcctgcagaccctaaaatatataccgtcagatcctttaaataaaaagtttgccaacycctgccctgtggtatccaaactcaaagataacacagaaagccctgcatggtcttccttttacttttccagcttctttttgtcagttcttccattcctttcattcactatttcatctacattgaatttcactgagttcctcaaatacctcttgggtgccacatttcgatgagtctgcctttaccaagataagtgatttcaggatcacaattagtcagttagcaatcagtatactgtcattcattgaatgctttgtgctagatactgctgatattttagaaattagacagtcatggttcctgcccttttggaacttaacattttagtaggaaagacagatattggacaagtaattaaaagtatgacttatcaaaggagaaatacaggtgctatggaaatggaagtagttggggtgacaaaaaataaaaacgcaaaatgttatacggaatttacataacaacatggaggttcaaatcacagaagaggtactgtgacagcacatgacattgctaaatcaatgatagagatgatgatgccatataaattcaaagatggggccaggcgtggtggctcatgcctgtaattccagcactttgggagggcgatgcaggcagatctcctgaggtcaggagtttgagaccagcctggccaacatggtgaaaccctgtctctactaaaaatacaaaacaattagcggggtgtggtggtgcacacctgtagtcccagttacttgggaggcttaggcaggagaattgcttgaacccaggaggcggcagttgcagtgagctgagatcacaccactgcacccagcctgggcgacagagtgagactctgtctcaaaaaaaaaaaaaaaaaaaaaaaattagccagggctgatggcctgtgcctgtagtcccagctactcgggagcctgaggcaggagaatgctggaacctaggagatggaggcggtagtgagccgagattgcgccactgcactccagcctgggcaatagagtgagaccctgtctcaaaaaaaaaaaaaaaaaaaagtctgtaataaggttattactaaaatcctagtaaatcatggaagggtgaggttagtacttatttatttggcagggtgggtgtaagacagtagggcacatatattttaaatttctgttacccataaatgtgtataaaatggaattcattccagcagctcagtaattctatttcttgtgcatcagtgggatacagagcactctgacaggtcctgtgacgacatcctctcacataccaggtttcttccctcactataactggcagaggcattttattctcagttcagcatgaggtatgtgtgaatctgatttgtctctgtcagtatttatttaactccccgctctgtttctctgttaaatagtttacccattgcctttgatttgctggtcatgaaacacaggtggaagagtttctttcattggtygctgatggccctcatactatttctggtgagttttcttttttacttgctttgtcctaaagttgtaatgaaagcaactttgatgtgaaaaaaggaacatcaggagtttattctgtttttcattctcaggtttatcctattagcattttgagaatgtttctagatcaaaactattttctgctctgttttaggtgcctgtggtggtcattgacagctactattatgggaagttggtgattgcaccactcaacattgttttgtataatrtctttactcctcatggacctgatctttatggtaaggctttgtgaaatttgggcaagtgttaggagatagcttaatttgcctgaacttcagcattttaattcagttgcctcgtattattagatgtagcatttcttggctgatattatcttttcctatttaaaaatgacatctgagtatagcacaatgatgacacgtagccactcaaatatttctccttgattaatgtgatattccaatactggctctctatttttcctgtttgttattttcactttcagagttttgaggactctgggtatgctatggcttttgatgctttttttttttttaattaaaagttacttttttctcttcttattaaaaaatcagtatgataggagaaggaaatgaaagcataatactatcatctccatataactattactaacacctgggagtataccccagacatttttttttttttttttgaggtggagttagactcttgttgcccaggctggagtgcagtggcgcgatcttggctccctgcaacctccacctcctgggttcaagtgattctcctgcctcagcctcccgaatagctgggattacagctattagcccgccaccatgtctggctaatttttttgtatttttagtagagacggggtttctccatgttggccaggctggtcttgaactcctgacctcaggtgatccacccgccttggcctcccaaagtgctgggattacaggcatgagccaccgtgcccggcccagacattttctatatatacacacatttgatgttactttttctcttccagatttgctttacttcaattccagcatttggggagaaagtttggaaaatctgtagacaaagttacagcgattggggctgggctggggtcagcatgggagggtggggaagttgaccagcttaggrttaagagagaaaatggaatgcctttaatctggggatgcagtcttcagtttaccccatctccactccttccctgatgcctttcactccaccagccagtttcatttggcccctgaaggaatttgcgttagttacagtaatggggggatgagctagagatcttttggatcaaatcagccaactcagcaaacatttcacgagagaggcagttttttcattaaaataattatagtttcttcagccttaatcttttgagggtcttggaacattctgtataagggcttgctttggggttctgctatgaagcaggttaagattatatctatctgtactcctgtcaatttaagtcttgtcactagccatgtccatcatttgcctgtgccattttgccaatagaaccaacagattgaataaggagatttaaagtaagaatatgaatgagatttacttgagtcttctggaattttgggaatattatcattctaggtggcaagtaatagtttaagataagcagtgctttgttcagtggattgaattcacaaattgcacagttagagaataattactaagtgaaagaactttaaaaaagctcctttatggctctaagatccccaggggtgtgagaaaaggccccagtattaagcttttgcctctagatgtctccctttagctagggagagtttgcttgtttgtgattgcctcttgttttagtttacttgtaaaattttattctatttcacaaggcaataaaagatcttagatctagactgcacagtagaaattgtttcacagagagcctgttagaaacacaatatctactctctgtgggtgaataaattgagttaatttgtgttaattttgaaaaattgacttctccacctttataatgggttactgatactctaactctttataaaaccttttgtgagagacttatgaaagtgacagatttttttgtatccctctggattgatgaatctctctctctctttttttttttttttttgagatggagtttcgctcttgtcacccagactggatgcagtggcatgatctctgctcactgcaacctcccctcctgggttcaagcaattctcctgcctcagcctcctgagtatcgggaattataggcgcccgccaccacacccttctaatttttatatttttagtagagacggggtttcgacatgttggccaggctagttgccaactcctgacctcaggtaatccaccagtcttggcctcccaaagtgctgggattacaagcatgagccaccacgcccagggatgaagctcttaaatataggaataatcagggtggtagggaaagtaggaaagaaggaataaattctgatttaagtttacggtgctaatttaacagtgggtcagtcaggaacccctgtggtaggttttgagatccagtagagcagtagccagtctttcctgggatattggcatttgctgttcatttcagtcagcgtttaacagggaaagagtccttgggacttctttctgcctactttaatraacctgrgatagcttcagttcagattttgctattttggatgtacagaaactgatcactttcctgggggtagcaaaaactttgttgaaacagagagaattggcataccaaccatgaacaggactgatacagtgctgcagtcagccagactttaggcagttgttccttgatggcaggatttgtgtgcctttacctcatctttgaatttggtaaaagaaaaaaatttttgtctgatttttttttttttttttttttttttttttttttttgagacagtatctcgctctgtcacccgggctggagtgcagtggtgcgatctctgctcactgcaacctctgcctcccggattcaagctattcgcctgcctcagcctccctagtagctgggattacaggcacccatcaccatgcctggctaatttttgtatttttagtagagacagggatttcaccatgttggccaggctgctcttgaactcctgacctcaaatgatctgcctgcctcagcttcccaaagtgctgggattacaggcatgagccaccatgcctggcctgatttccattctttgagagtgttaactcctttttggtttaggaggcctgcagagagaatacttcttccatcttaggagtaggaattccttgtatattccagacttacaggaaagatctgtcaagaatcaatgaatggataaattctggggtatccattgggttacattagtgtgtcatttacagttgtatcatagaatcactttagttagacctgttgtggtgctagcttgagattttcgtgataccaaataataatactataatagatagaaataaaataccttttaaatcaaaaagtacttcatgattgtcagctaattttattataattggtgaggccattcagtatacataaaagacttgtattttactagatgttttgaggcagtaaaattgtcagacagcgagatagcatgtcttttgtattggaaatgctagctctttcactttattacatgttgggcactatttggcattgttttggctgttttacaagagtctcctgctccaggtgcctcattagctatgttaagcacacagtttcttatctgaaaattaaaaatgcattgtgctgtatacaccatagaatactatgcagccataaaaaggaacaagataatgtcctttgcagggacatggatggaactgaaagccattatcctcagcaaactaacacaggagcagaaaaccaaacaccacatcttctcacttataaatgggagctgaacgatgagaacacatggacacagggaggggagcaacatacactggggcctgtggagggggcggagggagggagagagcatcaggataatagctaatgcatgctgggcttaatatctaggtgatgggttgatctgtgcagcaaaccaccatggctcaagtttacctatgtaacaaacctgcacatcctgcacatgtaccccagaacttaaaacaatttaaaaacaggaaaaaagatagtttttgcatacatctcttagtgctatttctcatgtgtaagaacatactaagcctattaatatttcttgactggatggacaaatgggcttcagttaaagaaacattgaagktcaggtgtggtggctcacgcctgtaatcccagcactttgggaggccgaggtgagtggatcacttgaggccaggagttcgagaccagcctggccgacatggtgaaaccccatctctactaaaaatacaaaaattagctgggcgtggtggtgcatgcctttaatcctagctactcaggaggctgaggcacgagaattgcttgaactcgggaggcagagcttgcagtgagccgaaactgcacgactgcactccagcctgggcgacagagggagaccctgtctcaaaaaaaaaaagaaagaaagaaagaaagaaacattgaataaattgcttttgagcattaatcttgtttcatcatagtacttactgtctaattaggctgcagacacacaaatagataattacaggacagtgttttatgtgctacaggggaaagatagggaatcataggagcatgtccttctggtggtgtcaagaaaggtgyggctcttgagctgagcctggaaggaagagtaggagtgtccttagtaaatgcaagaggggtacatttctgacaaatggaatgtcaaatatagggactgctgaagcaaaaagattgaatattgagttctttataaaaacttatttttacagcattggttggattttaggtagaaactwttcagacatgagcaagatgatttcaatcactccattgtggttataatcatataaatgtttaccctttctattgttcctggttttcttttttttttttttttttgagatggagttttgctcttgttgcccaggctggagtgcagtggggtgacctcgactccccgcaacctctgcctcctggattcaagcaattctcttgcctcagcctcctgagtagctgggattacaggcatgcaccaccacacccagctaatttttagtagagatggggtttctccatgttggtcargctggtcacgaactgttcctggttttcaaagggacctttctacactttcctggctaggtagcatgtattagtgagacattctagacttgagctgacacctttcatttgaagctggggaaaataaagggagtacattttgaaagatattaattacaatatcttctgattattgaatgcctactgtgtgtcagaagttattcacataccatcttttttcactcaaaacactctgagacaggccttatttatttgtattcctggatgaagaaactgaggttgagatggtggggaatatgccacatagttaaaaaagtagcaaaagtgggataagagtctagtgttgtctgacttcaaagcccgtgttctttgcactgaaaacaagacccttagcaaaaccctggagtttggctactgagactttaccagagaataagcttactaaagcagagagcatgagttgagggtgggagaagataggatccaatctatagaataggtggaaaattatacctttgaaggtttgtgcattttggtttggaaagtgatcaggagcccctagcgagcttgagtggcagagtgacgtgcacactggcaagttctccttttacatgggagcgctgtaccagacccttttgttgaagaaagaaggagtgtttggataaggtaaagaacatttggcacttagaaaatttagaataggatagactagaattgtgaagtcttaggcaaaatgtctctgtggggtcagagatcaagaggcgaaatttagtgttgcagaaaagaaagtgattggtcttgtcactgattttgcccctcataacatttcaagttctcagatgttgatgctggcaagtatttttgtctggtgagtgaagagtggtgctctctgctgaggagtgcacaggcctggagaaggcatgggaatacacttacaggaaatactcttgcctcagaaagaacagtgaatctgctcaggttgccactttgcagcttaggacaggatcccattgcctgtttatgtgttttatcaacatctgtctgatcactggatggaaagtttcagacgatacccgcaaatgccctctgttgggaggcccacaggtttccataattgcagtggcagaggaagaagccccagtggggtcttatcagtcctgcttagaattcactgccagccagaactgttctagagcctttgctcttttgttaatcatttctcttgaacttagtggcttttccctctcggtggtacaaatttgacatttataaggatgtcttactatgatttagttcctacaggtctataaaattataactttgggaagtagttctccttcattcaatctatggagcagtaaacattatcccttcttttagcttctttgaaagcttcccttagctcatttgattgaaaggacttgaggcactttccataaagaggaggatgggtgagtcactccctgcagagaccctgctgccagctttccttcacctaaacatcttgcaccagttcagcgtttagcttgtcattctgacatggttttttgcatagttcagctctgatgttttctgagcagcagcattgaatatctccctgaaaagagataaaagtttataccctttgctttcctaaggcagatgtgtcatcaagcaggggaggactctggctgatagaagtcactctttttgttcccttttgcccttgtttttaagactgttgacacttgaaccttcttcacttttggcttatcccccaatttttgccccatctttcagggaaataacagtctgttatgaaatgttcacagcctagttggaaacttgatttatgagctctgaatacataaaaatgattgcatttaccagcttaatacttttgtttcctcatctcagagtacagtatacctagataaaaagatagctgtaacaggagggtatagtaaattgtgttagagacaaatattttctggaagctaaagtgctttcctgaaaaaaacagtctgtatttgcaaatatgaaagagacaagtggctttttcctattggtgcttgacatctgtaatagataatagaaaggataaccccttttctgtctggtcactctatggtttttcttcacaagctcagatttccagaatcctgttaagaaaaaggtgagtcagaggttgctagccctgcttccgcactggtggtcaggagaggattgtgcaaaagcttacctctctggaaattggatcctaaaggactcagtttaaaaaataatgttgttaaattctaattaagattcagaaaagacatttttgatttgaaaataaaaccatccgttagttttctataacccaaatgcatatttgtaaagaatacaagattaaaatgtccctaatgaactgggcctggaataggacctctgttcatgaatattctctatcattgtattgagacaggaaggagtgagcttcccccaaaggtgacgcacagttgaacttgaacttttccttagtgtaacctccctccctcttacttctcccctaaatgtttctagcattatgggtttggtttctaatcttattttgctgtgcaagctgcaagaatgtcaggtttttctgactattcctctgccttctgattacccttttaagcaatgctgattgcaggaaattgctatggtgcaaggcgggtgtcacaacacacagtgattaaaacccgcatgtgtcattcacttcttgattgaagtaatcatacagaggggaaaagcagatgaaaaacctgctaaatgtgcagagggggtctgtttctcatcatttgggtgtaaggattttgagttaaagaataaaaaatagtgtgagtaagacttgtgtttttagtgattttgcttcattctgaatccttaaagcttctcagcaaggcctgggcctctgaacatgatctaagaaaaacgggttgttgctttataccaaacacatgttgcccaatgtacgcgactataagtggttgagcatatcaaggggaaagatgctagaatgtaaatgggacaagcagatgaaaacaaaatgggagakgcctgaatagctcaaactaagttccttatttttatttttatttgagacagggtctcactgtgtcgcccaggctggagtgcagcggcacgaccacagcccactgcagccttaacctcctgggctcaagcaatcctcccatctcagccttcctagtagctgggattacaggcatgagccaccacacccagccaccaactaagtttttttatcactctttcctttggtctgcgcgatcttgagagaatagttaaattgaaatggcagttttattattttagccctatgtggctctaaagcgatttaaattatttggtgcttctcaaaagtattagttccattggggcatagcaatttgggctagatatagtggtcagtatagaaaatacagctaactatttgaaacttgatttctccctaaatcctcatgaccaatcccattctcttccatctcgctcttgtgcttcttttgtgtagcttagcatgggaagagtgggctgtgsactctcattcccatgaggcataggatcatcagtgttattccaacaaagaacattatatgtcaagcaccgtaataggtgttaaaggcatccactaatgatttcttacctttatgtctccctcaggtacagaaccctggtatttctatttaattaatggatttctgaatttcaatgtagcctttgctttggctctcctagtcctaccactgacttctcttatggaatacctgctgcagagatttcatggtgagtggcataagagatggtaggtrttttgggaggaaagagcaagtaatggtgtataccaagaactgaaggaaaatcctacttactttattttccacattcttcctatggaaatggttggcttactgaattttcagtctgtgtttgttgatccattgaacccttgtgaagatttggtgaattgtggcaaattaaattgacaggaggaagagctttattattgctttaagtgaggaagtcaatataatttacacaatcacccagggaagtaaaaatatttataaaatctcagaaggaggccgggcgcggtggctgacatctgtaatcccagcactttgggaggccgaggcgggtggatcacctgaggtcaggaattaaaaccagcctggccaacgtggtgaaaccccatctctactaaaaatacaaaaattagccagacatggtggtggatgcctgtaatcccacttactagggaggctgaggcaggagaatcgtttgaacccaggaggcagaggttgtagtgagccaagaccctgcgccgctgcactccagctgagcgacaagagcaaaactccatctcaaaaaaaatctcagaagagaacaagcctatttgagttttctatcttttaaagaagtgtatattaacctgataggttgcttaaggtaatccacgagatagtacttcaaacgaaagtataaaatctgaaccatacagggatttccccaaatttgatagtgaagtaagggaagctttggacttcctcagaagcatgatgcttttctttgttcctttttgtttctgtgtctgccttattggagaaagtttggtttgtcgtttgctttgcttgctctgattctgtagtgcacagctggtgttttctcaagttgtcgtggctctggatatctagtgcctctcatttcttttatggaagacagatttgaacagaaattcatatgaggtttggaaaaagatttaatttcagactttgcagtctgatttggatgccatatgatcagttcccccatcccacctccattctgcttttctactattaatggtttataatgagttcgttgtattataagaatattagagcagccttcagagtcacttttctttggtgttaggacttttgtttcaacgtagccataatgccattatcctaataaaattatcagtaatttcttaatatcatctaatacccattgatttcctagattgtctgaaaaatagccttttatagttagtttaaagcagaatctcaacaagggtcacgtactgaatttagtgttatatttcttaagctttttaagaagacccccatcttactttttttctttcgaagatttctttaaagaaaccaggccatcatcttgcataatgtcccacattttagactcagctgtttgctcccttgaggtgttaacttattcctctatcccttctatttcttaaggatcactttttctttttttgaaaatagctatttttctgactataaaaataatttatgatagctgggagcagtggcacgtgcatatagttccagctgcccgggaggctacggtgggaggattgcttgagcccaggagttcgagaccactctgggcaacatagtgagacctgtgtctctgtttttaaaaacaacaataataattatttatgcttgtggaaaatttggaaatgcttgtaacgtcagtaaaaaaacaggatattaagctgttctctacagtatgataaaattttaagtataaaatattggtttaaaatgcataatgtatgcacatatctacctagtaagaaaacattttctgtttttttctttatatttttatgtgattttagaatagaaccaatacttttttaagagaaaaaagaccaggcacagtggctcatgcctataatcccagtattttgggagcacgaggtgggaggattgcttgaacccaggagttcaagaccagcctgggtgagatagcaagaccctgtcactacgaaaaaaattaaaaaattaaccgggcatggcgatgcacacctgtagtcccagctacttgggaggctgaggtgggaggattgcttaagcctaggaggtcaaggctacagtgagccatggttgtgccactatgctccagcctgggtgacagagcgagaccctgtctcaagagaaaaaaaaagtcccccaaaccatagaaaattattaagaagcaggaaagaaattactcttgatttcatcatatctagctgtggttgtgattttgtatattttatggaggacatttcaaaattttttgccttattaaaaaaagattactcgttagcctttaaggtacagaagagaaaaggactgtttacttgtggacaataagtggatttattttcttctaattaaaaaaccccaccttaggccaggcacagtggctcacgcctgtaatcccagcactttgagaggccgaggcgggtggatcacctgaggtcagaagttcaagaccagcatgaccaacactgtgaaaccccatctccactaaaaatacaacagttagcctggtgtgttgatgcatgcctgtaatcccagctactaaggaggctgaggcaggagaatcattcgaacctgggaggtagaggttgcagtgagccgagattgtgccactgcacttcagcttgggtgacagagagagactccgtctcagaaaacaaaaaacaaaaaacctcccccttaaaatatactacctagaaaggtatatattctaaattattatctaaaatcccataatgtcttagagcaaaagttgaaacaaaatcttgttattgtagttcaagaatttttatccttaaagaatttctacagtgaaagtgatagcctaggaatgctaaattaggcatagctaaagtggatcttgacgataatcctgatcttgtaaactggcttactgttaacatggtggacaccagggggcgctgtctatctaccatttgcccgcatttgcgttgctcattatcactcctgtaaacgcagtaggagatgccttcactgtgggttgcaggcttatctctcatttctcatgtacctaaccacgggaactttccagcaggttcttgggttttagtgttcattacattcctttaattctttcacatgctttaagtacatttttgttccaatttggggatccggagtggatgagtattgcaaaatggagagaaaacaatcactgaacttcctttaagagcatttttatgtttgccttgaaacaaactccgtcatttgtggcttgatgaaaaccagtaatgaatttgagaatccaacaattttgttttcctttgatccatggctatttgaacagactgattggtgtatagataagagacaccaattaaacagaacattggaattaaaaccccagaaatgaatttatgttatgcttttggttaaactcaggaacttttcgtcttagtggcaggactcattaaaggagacggcttatttttccttcatctaacgtagaatttattaagttctattagccattaacttgacatttatatgtgtcctaaccaaatctagtattgtgcttgttgttagagtttagatctcttgggagagctaaggagtatattcttctctccttttgatgcctttatggcattggagaaagtgtraatacaagagtagaaacattctatggagtgtcctagggcatactcctaaatttgagatcaagataacactaaaactaaatatgttgttttgttctaatataatgaaagatgggtatttttctgtgtcttgcagttcagaatttaggccacccgtattggcttaccttggctccaatgtatatttggtttataattttcttcatccagcctcacaaagaggagagatttcttttccctgtgtatccacttatatgtctctgtggcgctgtggctctctctgcacttcaggtgagtttcagggagaagtgtatctgcctcattcttttttacttattaaataattgctcacaaacttaagtgcaaattacagaatgcttccacctaagatattttatccataacattaaacctgatatagatcatattattaaaccttcttatattgattgcttagctgtttaccatacttgtatttgctgattacatgtttgcagtgttaatttgtgtgttactttgcctctgttaccaacaggaatccaattgcagaattccattctgtggcagaagtaatggaatgtctgctctttgaactgctagatcataacaaaacttgctcaagagtttgggatcacagcaggcagttcacagtatggggcactttgtaatcctggttgaaaacctgcccaggtcaattctctggcagagctcatcttaactctgtttgaatatctctgtacttacggcttcagtagcctcagaaccctgtattgccctctgctaccatttgcagttggcagaaaaaaaataattaggatgataggtttttttcttaacaggttttttgagatataattcacaaaccatacagtttacctatttaaagggtatgattcagtggtttttagtctattcacagatgtgtgcagttgtcaccacagtcagttttagatcaaaaaccctgtaccctttagctattgttcccccattccctttctcatctctcaccagccctaagtaaccattaatctactttctgttcttatagatttgcctattctgaacatttcctatacatggaaacatatgatatgtggtcttttgtgactggcttttcttaacataatgttttcaaggttcatcaatattaggtgatagttttaaaaaataattttaattataaaagtaattgaactttattgcagataatttaggaagtagtaaaagaaaaattagtcacattaacctaacaaaaactcctcccagcatttttgtatatcatataccaaggtttgttatagttgtaataataagtatacatgtaactttatatccccccccccctttttttttttttgagacggaatcttgctctgtcgcccaggctggatggagtgcagtggcgcaatctcggctcactgcaagctctgcctctcgggttcacaccattctcctgcctcagtcccccgggtagctgggactacaggcgcccgccaccacgcccggctaatttttgtatttttagtagagacggggttttcactgtgttagccaggatggtctcgatctcatgaccttgtgatcctcccgtctcggcctcccaaagtgctgggattacaggcgtgagccaccgcrcccagccactttatatcccttttaatttaatattgtaacattctctgtgcttatcattttagtagctgtagaatgttctgagttggatataatatatagcattattatgtaatatgtaatatattgacttgactttatataatgtaattattggatataattcatggtagaatttaggttgctcatttattcagtattatgctaggataaatatcttcatttagatatttagattgattcctcaggatagattccaaaaaatatgaaaaaggttcaaacagatttatgccatttgttatatattggaaaattgctttctgtaagtagtttctgtctagaagggaaggaaggaagggaagaagtctgagtagaaggtactcaaagacagcagaattcatgcatgtgtgtttatattatattcatctagtttgtaaagtcattcagcatataattaagagcatgttcctagtgttctataaggggaattcttttttcttatttggtcatgagacctttttttgatactaatagctttgataaaaactttgatagtaaagattagtactcattatatcaaaaacaaattggaatactttatatatcaaaactaccaaaaaagcattgcttaaatatttaaaaaaaataacttattaggactataaatgctagcaaaatattcaaataattttcctatgaagctagtgagattttattgttggcaagccctctgcctggccaagactacaggtagtcttagaggagttggcttttatcttagagtttggagtaggtacctcactgttggcaaatgctcagatccctaatagaacctcttttttggcttcgctcttgatgttactgtgaygtcttgtaattatgtatattctacaaattatattttcttttatcagcacagttttctgtacttccagaaatgttaccactttgtgtttcaacgatatcgcctggagcactatactgtgacatcgaattggctggcattaggaactgtcttcctgtttgggctcttgtcattttctcgctctgtggcactgttcagaggtagatcttctaagaatatcttaacctacactgacgagtcacttgctcttaggttttacttgattcatgattatataatacatatttggcttatactaagaagccatttctaaaaagagaacctgtagacttaatattaatgagtggcatatgacttctgtatcttaggattgaagagaagattgagaattccttttagtgtgattaactgtacattttttgtctatttttgttgtttttttcttttaatggatgctgataaattaaggaagccttaaacttaaaatgcaaatttgggctaacwtttcatgattatattctttcttataatcattgtttggatccataatattaaaaatatgctcaaggaaaatgaaggtaaaaagaagamggagcatagagaggggcaagaaagccaattattttttgcagaatagggcctctgctgtaaccgtgttcccagctagagagacattttatacctgcagagcaggcttcatgctggaatggctatggcccttcctgccttttaaatttcctgtggcttacagtgcgacattaatgagcagtataatwwaagtgagaatctcatcttactcatctctggctctcactaactgttctcccttccaggatatcacgggccccttgatttgtatccagaattttaccgaattgctacagacccaaccatccacactgtcccagaaggcagacctgtgaatgtctgtgtgggaaaagagtggtatcgatttcccagcagcttccttcttcctgacaagtaagttgtcctttaattcctagggttttaaatgaaggagtaaatagagcagttctatatcagtgtcttctaatttttgttttcttttggagttttcacagagagttattgaattatctaccacgtcggagagctgtggggcctgtgtactgtgtacctgcctcctgtgttcattaggcttattaggctgagggctgggtctaggtagacattctgcactgcccataactgcaggtgtctggggacttctgaaaatgccctgggtcctaggcttttgccagtggctcttcgtggggattcatatttacatttctataatgatctgatgttaatcctcttctaaaagtggtctagaaactccagctagaagagagaagacattcttgacccaacagtagtgaaagttctccaccattatgtggacactggggaaggctgtggttaaaatgtctataccagtttcctttatgctttctgtggttctgagagcataggccctaaagttctttgtagtttgcttcatttggccagagaagagtcctgtgtaggttaaagggaaatctggttaagatgagtcatgttgctccatttgagaaatggcttcagtagcttggctttactgggtagtagtttcttatgcttcataaagaccctgtgtcagtcattaatgattaaattaaaacttgttttttaagtgttgactttagcctttgccttttacgtttgaaatagttttatagataaagatatgtttgagggttactccggaacaaagtatttctcccatagtgtgttctcagtgccrtatattacatttcattctttttctctacacctgataatttgctttatttgataagtctctctgcccacatagtaattgacaataagcattggcacttctctggttttttgatgatatgaccatttggttgtgaatttcactgctaacagttggtgaaatgggtcaagagacatctaattataaatttctcaatgattttggactgacttgtgacctctgcctctgtgctccctggttgaggttttagcagaaatattttttcttcaagagaaatgtttttcacatgattttcctggcttgtttgtttcaagtacatttagcaatattatccccctgtgtttttcttattctccttgtgtttctgacagttggcagcttcagttcattccatcagagttcagaggtcagttaccaaaaccttttgcagaaggacctctggccacccggattgttcctactgacatgaatgaccagaatctagaagagccatccagatatgtaagggctacattctcttcttgcttctctgaaaagaattctatgcctaaaagtctgttggtgtgtatattagagcattgataaaatgagaatttcttagaaagcaatttttttaaggccgggtgctgtggctcacacctgtaatcccagcactttgggagacgggcgggataattgcttgaattcagaagttcgagaccagcctgggcaacatagcaagatcacatttctacaaaaaattaaaaaataagccaggtgtggtggcttatgcctgtaatcccagcctttcagaaggctgaggcaggaggatcacttgagcctcggagttcaaggctgcagtaggccatgattccgctactgcactccagcctgggcaacagagtgagaccctgtctcagaaaaaaaccggatattttttaggatgaggggtataacagcttttgttgaaaaacagtaaacagtatcacttttattttcaaattaacctctttattttctatgtaaaatgtataatttaattttgaaggttttgggtaggctgaaagttttcttacggtagaagtttgaaccattattctgaaactcatatcattccttggcctattaaaatccttaatgaggaactttcaagttatcaggtggacctttgacctagctattagtatattccggttttaacaaatgaacagtaaagactgtttccatactgaatgccagggagcagcctctgtcagggccatgatcttctccctacttgtctttacacattctgagatmccatgcgaattttacttcagttcctttgaaagatgacacttttgacatttgatacctgtgaaatctttgataatgaaaaaggtaagaagtaataaagataatgctccttttgggtcacaaagacagtgtaagatcgttgtctagaattattagaaagcacattttttgataacctgataacctgtccgttaaagaaatatgtaacagtttaaatgtcagctatatttaatttacattttcttatgtcatatgcttaaaatgtaaaatagcaagacttccaattctcttctgaagcaaacctgcagccacatctggtcttttgtctcccagattggggctggttagagttccatggagaccctcagggtttatgagtgagattcttattgtatgagctgtaactataagctatgaaaatggacacttaaagacacagccttgagctgttcccttgtaagacaggcgtttctgccacatggattgtattagagctttattcttttaatttaaggctctgattcctgttacaatggaaatacccttgggcagggtagactgttacaggtcattttaattttatctgcagatatgagtctcctgagtgcagggcatcattctagagaagctggacagtcaaagggtgggaaaatacactgtcatagggggacagtatgaattcagagtgatgttatcggagctttgctttaggaagaggtagtaaaaatggagtagtaaaaaaaagagcgtggactttggagttgagtaggcctgcattcaaacctcagctctgttgctaaacttgataaccttgggcaaattagttagcttctctgtttaatttcagtttctgtctgtaaaatggcacctactttggaattatgatatttgatattatatctctctgtagcaaaaatgcaatgttcttatgcttgcacaagtgttcttaatctgataatggtatattagacagattccaggtaaagaaacccaatctctccccttccttctttttattgtttcccatccttgtaattttattccagtgtctccagactcatcattgcgttttccaccccagtgacttcgcttatattggtgactatgcctgaactacccttgtgtctcttctcacactatcaaaattatcttcctctttgaagtgaactatttaagtccatattgagcagaccttcctttaagtgtcttcagtatttatctgtgcagttcatttagccatttaattttcttggtcttagttaaatatttctgatatcatatctttccacatcaaatatgtgaatgccatgaagagaatgactgcactttgtttcttttgtgttcaccatagtgtctaggacggtgtcatgtacccagtagttcacttttacatgctttctcagtggataatgaatattcatcgtcattgtggtaatgatgttgagagaaagctggctagaaaatctacagtggccttttgcacatttcttaggcttttatcactggttgtcttagttagatcatatttccatattctctgctgtcagacagtgttaaatttgattaaatgactctatatgagctttacccgaaaggtgatgatttttcaggatgccagtaggagtcaccaaaatgctggctgataaaagcagggaaaaacaagtgatttatgtctgctgggtagcagctgtgtccagccctttgaatgcgaggatttttttgcttatctgtggtggcagaatcatgaaaattaggcatggacctttagctctgggtggcaggttttagccagcctttggcttcaatgctaagtgctccagcctgtcccgtttctattgtgcatggaaacgaggaaagttgtatgactttttttatttcactattttctttacctctgggctaatcaagaattaggagtgaataagtgtaaaggttctgtggtttgtactgtaccattataactatattgcaaaaataatgtttttgctgcatattttttcatggtaggtattgagtagctattgaatatctcattattgaacaggaagcatttacaggggtacatgccaagattgccaagattttctgccagaatcaagatctaaatttggaagatacattcagtgtcacctctttagttcttgaaaaattcacatttttgttcactatttcaaggtgaatgatacacttccagctccaaatctagtatatgatttaggagctacctagtcaatggatgaaaccttggaggaaaaaacagctcttcaggagagagcttacagaaaaagacttttttctgactttaatttaatgcttaagcagacttgctggaagttttcctgttttctttcttttttaagagactggatcttgctctgtcacccaggctggagtgcagtggtgccatcatagctcactgtaacctcaaattcctgggttcaagtgatccttccacttcaagctcctgagtagctaggactacaggcatgcatcaccatgcacagttaatagttttattttttctagaaacagagtcttgctgtgttgcccagggtggtctcaagcaatcctcccatcttgccctctcaaagctctgggattatagacatgagccaccatgcctgtcctccatctgttatctttgaaaacatagattggtcattgatttttttcctaagcagtaatatagtcagttctgctacaataagatataaagttatgaaaaattaatatgtggtaaaaaccacaaagcttattgggaaaacggagttagggacacaatacttaaaaaactttgtcagttaaaaaagagattaaaaattagccatgcatgatggctcatgcctataattctagcactttgggaggctgaggcaggaggatagcttgaggctaggagtttgagacaacatagcgagattccgtctctacaataaaaaaaaaataaattagccaggtatggtggctcatgcctgtagtcctaactactcaaaggctgaggtgagaggactgcttgagcccaggagtttgaggctacagtgagctacagtcatgccactacactccagcctggacaacatagcaggaccctctctctgaaaaaataaaaattaaaaaaagattaaaaatggtagcatgattttacatatgttaaatggttaaaagtgcataaatactacaataaatgtggctgtttactttgcagaagacttgaagtttgcttgtggcctggtattggaaggattgcagcttgtagtagtaaaaggattatctgaaatcttacaaaagttataatagcaaaggtgaatgggtggatgtggcttataacacagtgaactgagaaggccagtagatatatttgtgtatgtatacactatgtgtattcctatgctgattggttccactgagtgtacttttctgcattcacctagtgtttcctgtgaattaaatgacataatcaaatgcaaaaattaaattacgctcaaagtgttccctaatatatccctttgttggaaaaaatttgcatttttgaaactagtattagaacagaattgactgtatatcagttcaaaatattctttatttcattcttctttatccctgcttttccagtttaaccagtaaaaagaatcatagatttagaagggaacttaaaatgtagtctgtgatctttttattttatggatgaaagaactgagatctagagagattataacttgataaagattagccctaggakaaaaggcttggtttcaggattcttcaatattattttcataccacctctttcttgtttttgtgtgatagctaatcattctttgatgttacaaggccaaatagacattaagtagctgagcattgctttctgtttgtttgttttgttttgtttttcagaggcagggtctcactctgtcacccaggctggagtgcagtgtcatcatcatagctcactatagcctcgaactcctgggctcaatcgatcttcccacctcagcctcctgagtagctgagactacaggtgctgtaaagaccctgtctctatggagaattaggctggcatggtggctcacacctgcaatctcagcactttgggaggccgaggtgggaggatcacctgaggtcaggagttcaagatcagcttggccaacatggtgaaaccccgtctctactaaaaatacaaaaattagccaggcatgatgatgtgcacctgtaataccagctacttaggaggctgaggcaggagaatcacttgaacccaggaggcggaggttgcagtcagccgagatggcgccactgcactccagcctcggtgacggagcgagactctgtttaaaaaaaaaaatttaaattagccactacccctagctaatttttaaattttttgtggagagagggcctcactgtcttgcccaggctggtctcgaactccaggcttcaagtgatccttctgccttgacctcccaaagtggcgggattacaggtgtgagccactgtgcccaactcattacttttttaaaaaattactttccatttctagtttatatatgacaggtacttactttaagtagtaaatattatgtttaacaataaataaaaatgatcaggatttcccccgacatgctttcctttcttctctttttcttcctttctctctcattttatcccttctcctgccctttttggaagtccttattggaggaaaaaataacttgccctatttgtttcctcactaattgttatcagtctcgggtatcaaggcaagcagattcaaattgctgtaatatatacagtgcaattagattagagtctactaagaatttaattggagaatgttcaaaatacttytctaaagttaatttttttagtattcattatgttggcatttagaaattaattgatgtttccatgatctataatgattgaatgaacaaaaatttttacctgtgagtttagatttttacagtgcaatgaattttttcttgtgagtttaaagattcaatcaacaaatatgtatttagcaaggctatatgagagacaaaaaactaagacagtctgtggctctggaggacaactactttttaaaatttaactggagcatatctaaaagaggaaatgaaaagacagaaaaatacttgaaatttttccctttcagatgtttcctcccaggcctccatgttcttatttcaataaaggaaatatcatgggaggatattgatgattggctatttgatagtggcaagagcattgactggaagttaggagagtctgattcttttctggaatcaagtgaaatgtattttccttttaaatgactgggaatttctaagaccattgacatttctttgcttccctttccaatttgctgaaactacacctgaaatccaactggagtgtttatattttagcttatcccattacctattttcctgtcaaatattttatggcagcacagtttatcttgagacatgtgtcctgagccggggccctcatgaccagagatggaagtctacatgctgcttctgtcctggaagagatgagtactgttagaggcttactctgtgctgtgtcccgctccaagagtgtgatgctggtgtttgagagttgagatgatgtcactgaagactgcaaccctgacaaagtttctgttacagctgatgaggaaaagctgtgacaatatttattactacccagctctccttagctcactcttcccccgacaaaatacacatcttttattattgggatctcaacctctgtttcaggcyttctatttcctttgagaatgtgtagttttgtttacatctggagtggtattaaattgttatccttaacatatgcttgtttataagatgtaaacaatgtgatattgatgatggataaattggcttgaattcccccgctattacctttttctcttttggtttagaggtgcttatttgttcttctctaaagcttctagtgggttgaaacagaaagaagtcacatttctttcaaaatgagtcttaaatgcttgtgttttacaaaattttaaattaaggcatatttttagcttcgacagctggttgatatgtagcctgtgactaatgaaatgaaacacatttttgtttcatgatcatgtgttaatgtcaccctacaattttgttatttttgatgcaagaaagaatgattaaatctgaagaaacaaaaaaaatgggctctttggttatactttaaggcagatttaaatccagtcttttgatttttgaattgtagatgatgtggttatgatctcagattttgcagtgtgagatatttataaaattgagagaataaatttattctctctggttgtaattcaagtcatgttactttagcttttagacctatggggcagtagacagttggtgttttcagggatataaactgaggactctcaagctaaaaatagtcacagtaaaacaatatatataacatgatccagatcttgtaaagaaaaatcaatatctgcagagaagttctgggatatacactaataggctgatggtgattttctttgggtcggaggactgtaagtgattttgtaagatgttttttgtaataaataatgttttaatttcatcatggaaaaaaaataactgtaatgggggctgtcactgtgaaatctttgatayycctaccaagaagatctgtggtggacttgagcaacattcagtgtgttttcagttgacctcgagtttctcttccttgaacataaggactttcaactcaaaattggaagataagtgttctatcaagtaatttttccctctttgccttcaggcctcttcttaagtcattttagtcatatttaatactatctttgctactctttccacaaattatatcttgattacttcaaaaaaatagatgtgrtttaccaatttacaagctccaaggaacgctttttgttagaaacctaggactaaagaggatgccgcagtgcacaaggcaagtacgttattaaactcttccaggcagaagtgagttaaggaattaaatacaaatttaaataaagttaattttctggttgttggggtttggacagaaagccttgtctgtcccgtaatcatgctcaagactatccattggcggtgtaattccaacagttttgaatcactggctcaagaagacaatgatgtataaatattatcagcacaaccatgttcatctcctttttttttgatggagtcttgctctgtcacccaggctggagtgcagtggcgcaatcttggctcactgcaacctccatctgtctggttcaagcaattccccttcctcagcctcctgagtggctagctggggttacaggtgcacaccaccatgcctggccaatttttttgtatttttagtagagacagggtttcaccatgttagccagactggtctcaaacgcctgacgtcaggcaatctgccagccttggcctcccaaagtgctgggattacaaacgtgagccaccacgtccggactcatctcttatctttaggcaccttttttttttttttttggakacagagtctctctctgtcacccaggccagagtgcagtggcataatctcagctcactgcaacctccacctccctggttcaagggatttttgtgcctcagctaccgagtagctgggattacaggtgtgtgccaccatgcctggctaattttttgtatttttagtagagacagggtttcaccatgttggccagsctggtctcgaactcctgacctcatgtgatccacctgccttggcctcccaaagtgctgggattataggcgtgagccactgtgcctgggcatcttttttgttcttaatcactgttaagtgtttcttactcttttcattcgttggttgattcagccattcatccaactttttattgtctctatgtgctgaaaataggtgacagaaagcataatctccttcttttgagactttcactcttattgcccatctcgacccactgcaacctcccactaccgggttcaagtgattctcctgcctcagccttccaaggagctgggattacaggcatgcgccaccccgcctggctaattttgtatttttagtagagacaggatttctccatgttggtcatgctggtctcaaactcccgacctcagttgctccgcccacctcagccttccagagtgctgggattacaggtgtgagccactgtgcccaccaatctcctgtcatttaagaaaagtcccttataagaaaaaaaggcagaattatggggaaaagaaggaattgaaagaaacagaaacaatgtaggaagcagaaatatttcctgatagattaaaaatttggggttcataaaacaaaaacatatgctcttcatattatttgtgcttttaaaagagaacaatcaggaaataagagctgctagaaattaaaaataaaggagatttttaaagtcagtagaatgattagaggataagtttgaagaaatcttccagactataataatacaaaacaaatcaaaaacaaagagatagaaaatagaaaaagaacaataaaatcagaatccagaatttagctaataggagatccagaaagagaaaacagatgagacggaggagaggagattgccaaaggaatcatgtgagactatccccagaactgaaggatatcagttttcagattgcaagagcctgcagagcgtccctgaaatgatgaatgaggaaagatccataccaagatatatcaagtaccaaaagaagttagtgtatgttactatttgataattgaaaaatcaaaagctaccaggagaggtgaggattgtttgaacccaagatagtgccactgcactccattctgggagacagagtgagactctgtctgaaaaaaataaaaaaacctaccaggagaaaaagctggaagagttgagtggttgtctctgggaagttggactggggaatcaggagggtactgctgtttttcataataagcttcttgtactaagtttttttttgtttttttttttaaactctggatatattgtktattttgtcatccaggctgagtgcagtggtacagtcacagctcactgcagyctcgacctccctgactcaaacaatcctcccacctcagcctctcaagtagctgggactatggacctgcaccaccatacccagctaattttttatttttttgtagagacagggtctggcaatgttgcccaggctggtctcaaactcctagactgaagtgatcctcccaccttgacctcccaaagtgttgggattacaggcatgtgccactgcacctggccgcatattattattattattattattattattattattattattgagacggagttttgctcttgttgcccaggctggagtgcagtggtgcgatctcggctcaccgcaacctctgcctcctgggttcaagtgattctcctgtctcagcttcctgagtagctgggatttcatgaaggcatgcgccgccatgcctggctagttgtgtatttttagtagagatggcgtttctccatgttggttaggctggtctcaaactcctgacctcaggtcaggtgtttcctggtgatccgcccaccttggcctcccaaagtgctgggattacaggtgtgagccaccgcgcccggctgtatatattattttgataaacctaaaggtgaatttagaaaaggacataartcttgccctcagagtctagtagargaaacaaacttaaaatgttattaaacagtgtactgagtgccataatgtgcatagagaaggtgagaaaactcttcgtacttcagcctcacataagaggtagcataggagttgagtcttagaggctgattaagaattttctggctgaggaaggggaaattgacattccagtcagaaggaacagcttttgcaaaggcctgaagtatgaaataacattgaatatttaggggaaattaaatggcttgaggtttctagattttagttaattgagcaggagcatttctcatttcttctctgtttcattgttctcacatatttatgtatgtgacggtgttctctggcaaattttacatttgtttaaagacaagggttcatgtttgtcattaatctttcaaaccttcacaatgcctggcatagggattatacacagcaggtgatttttaaaaatttaagtgaaatactcaaatagcccttcatttagtctttttgagctaaagagaggcctccccaaaccttgttaatagtagaaatttggaccaattaggactcaagcactaccatttttcaaggttgtttgtagtccagtaagagtaccaggttacaagcacctggagaacagggatcatgtctagctttctcctgtcgtttgtttctaatgtaaattgacagaggttggtatttggcagatttgtgtcctcactggtttcctrtcaagtttgatatgttgcaggaagatggaatacttttcttttagctatgataggtctatttcacacagatgtttccgaattctctgttcagggtcatttatggaaactaattcaaagcctgggagccatgccttcctcatgcaacttaataaaatttcataggttgatgcaaatattaacctgggtagaactttatctattgaatttatattcttctgaatgggtgatgaaaataactgtgaaaaggtttgcgtttaaaaagacattccctcttcttagattgtaaagtatatagcaggaactgataataatgcaaactaactgattaagcacagaaattacggtaggaaaagattttataagcatgttttgccaactctggataattgaaaattaacttcccattactttttacttacgctttggtataatggctttattctattggctgaatgccactcaaagtttatacatctgatattgtccatcataagttggaagctcctaaagggaagatatctatccatgtatttgtcttcctctggtccccttttaaactgtaataacaatatacaacccgtaaagaaaaaaatggagattttgacaaaaatggtgactatttgtatatatgtcgacttaactccaaagtagaaattctctaaaatttgtgtgatttttcttttgtttcctaatttagtacttaacaggactttcttaatggtggcagtgatagtgactttagtcataaatactagtgaatttcattctgtatcatagatgcattcttaaaatattttatatacactgatattttaaaagtccgatttatgaaagaaacccagaatttgttattgtaaaacagaagaaatcaagcgatctcccatgatttctcagatttctaaatctgcatttttgtataaagtagtttgtttattttgagatatgttgttgagaactaagagatatcatccagttgggcttcactgagttgcagtaccaccatcctgggtgttcacccttatgtactgatttcacaagggggacaaatagttgcaattcacataacacctctcatcaattggtagtggcttactggagcctgggatgaaagagcatgatgacattgaatccaagctcagtggaagagtgccacaattgattggtgatgtggaatgtgaacagtgggaagggaaacaaccattggagctttctttatttrccatcacctaacttcaggatagatctgtgtggtgatctaggctctgtagataagacatgtgaccttttcccaagtcagactttttatattgctaaagctcttagagatgaagaagcactgtaaaaattcagaatttttcaggcatgtaagcccacaaaatttctgtaacctttccatatttaacattggctttaaatagctccttgacatcaacaaattgagagaattgaatgatcttattttgcctttgccatttgtgacacgttcagtcacaaatgtaactgtgttcagtactaaaagcaagacatagactttctaattgctcaagacttggcagtgtaaaagcaaatcctgtatatttgttacctccagcacagggcttttaatatggaaatgtatgtaatgatgagcagcagtagtttagagaagagtagaatcagcaaaggggagtatatttgcaattgtgaggaaattgctttctctacagttgctttctctagagttgaggaattgctttctctagagttgagagggatcttagtggtttgcactccaaaccttttggaaaggtggtaaaatctctgagcctaggttaagctacttccctaaatcacagagctagaggcagaatattcagcggtcccatttcctgatgcaaatgaaaatattagctagatttaaataaaaagagcacttagtcggaggcagaaaatacagagcttcttttttatttttgtttttgagacagagtttcagttttgttgcccaggctggagggcaatggtgtgatctcggctcactgcaatctccgcctcccgggttcaagcgattctccygcctcagcctcctgagtagctgggattacaggaatgtgccaccgtgcccagctaatttgttgtatttttagtagagacgaggtttctccatgttggtcaggctggtcttgaactcccaacctcaggtgatctgcccacctcagcctcccaaagtgctgggattgcaggcgtgagccactgtgtctggcctgttttttttgtttgtttattttgttttttgagacggtgttgcattgtcacccaggctggagtgcagtggcatgatcatggctcactacagtctcaacttcctggactcaggtgattctcccacctcgccctcctgagtagctgggactacaggtgcacaccaccacacccagctaaatttttgtattttttgtagagacgaggtctcactattttgcccaggttggtcttaaactcctaggctcaagcagtctgcccaccttggcctcccaaagtgttacaattacaggtgtgagccacagcacctggccttttttttttttttttttttttgagactgagttgtgctttgtcacccagactagagtgcagtggtgcgaacacagctcactgcaaccttgacctcccaggcttaagcgatcctcctgcctcagcctctcgagtagctggaactacaggcacgtgccaccgtgcctggctaatttttgtattttttgtagagacagggtttcaccctgctgcccattgctggactcaaactcatgggctcaagcaatctgcccaccttggcctcccaaagtgctaggtttacaggtttgagccactgggcccagcacagagcattattatagtctgtttttctattgctgtcattttggagcattagccacttctaatgtttgttttatgggtgcttgttgatataacctgtatctatctcgaagtccctcaagtgggtattaatgcagtgtgatttctgcccagtgctctgaatgtcaaagtgaagaaattcagagaagcctgggtagccgggcgtggtggctcacacctgtaatcccagcactttcggaggccgaggcaggcggatcacaaggtcaggagattgagaccatcctggctaacacggtgaaacctcgtctctactgaaaatacaaaaattagctgggcgtggtgacaggcgcctgtagtcccagctactcaggaggctgaggcaggagaatggcgtgaacccgggaggtggagcttgcagtgagccgagatcgtgccactgtactccagcctgggcaacagagcgagactctatctcaaaaaaaaaaaagaagcctggggaaacagcggaagtcactatgactcttagccaaatgcctcgtcatctcattagtgacacacatgagtggaccatttctgtaagaacagattcccactgttcctacctatgattcagcaaaactacagccaasggaatgggcttggcggagtcattgggaaaagaagaccctgtygagcttgactctagtctggcatggtagagagacatgagaaatgtagaataagcaggaggccccaggggttggggatgatctccaaggggctctggcttttggtgctgctctggggacagtgccaagtaggatgtttgactggggcagtacacctgtcaaacastaatgcaggtgtgttaaggtgagctcaaggaggacagaagcctcccgtggagcagaaggggaaaagcccacttgatcttgtacaaatacagagcatgaaagtaggaccttataggaaaaaaatactgataatccattttcaaatatgtagagcatatgcaataggatttctttttactttttaaaaaattttatttttagagacaaggtctcgcactcttgcccaggctggagtgcaattgtgcaatcatagctcactgcagtttcaaattcctgatatcaagcaatcctaccacctcagcctcccgagtaatgaggattacaggtgcacaccaccatacctggcttgtgtgtgtgtgtgtgtgtgtgtgtgtycgcgcgtgtttggagacagggtctcactatgttcccaggctggtcttgaacccctggccttaagtgatcctcctaccttagcttcccaaaggattacaggtgtgagccacaatacctggccctacatttgtattttttatagtaaaaaagttgtggctaaaatggagtcaaaaaacatcttagaacttctttacatgcagaaagttctggaaggttgcagaactggacttgattatctctaacatcttgtctgtgaattgagaaaggcaagaaataccaattgggaatttgagttaatgctatggtttgtgtcccccaaagttcatgtattgggaacttgatccccaatttgtcagtgttaggaggtggcacctaatggaaggtgtttgggtcatgggacatctgccctcatgaatagattaatgccattattgccggagtggtttatctcgagagtcagtgccttgtaaaacaatgagttcatccccttcttgctgtctcttgccctgtctttgcccttctgccatgtgctgccttctgccatgagatggcacagtaagaaggcccttaccaggcgccggcaccttgattttgtactcatcagcctccagaactgtaaggaagtaaatttcttttctttataaattatcctgtctcagatattctgttatagcaacacagattggactaagacarttgctcttaagtgtgattcttctgtttatttcctttggattctgtaatccctttcccaatagcaggaatgcagtcatggatctgaatagagtcatatattttgatggcacagtgagaaggcccttaccagacaccagcaccttgattttgtttagtagatttattacgatatgatgtgatctttattgtatggtattatggaggaaatagattgtcctccaggggctagaagctaagggaagaaattcttggcacttacaaataagctggtcatagttttgaacagcgtggtgttggaagttgtccagcatcctggtgtggctggtcaccattctttccttccgcaaatactttttgactgcytgagatatgccaggtactgtaccaggcaccaggtgtattgtgcttataaagacagattcagttcttgccttcacagagcttacaaggttcagctataagaaggcttgggccttgctgcagttgctcacagagggatttgaggagatgtgatgaatcagaatttattatgtgtttggaaggaagacattctgaatgctgcttaaaagctaagtattaaattaataacatatgtcagccattgtggctgctggatagyctcagttatgaccaaattttacttagctgtgggcaaactgtctaaacagttttttcagctttaatcctcccacttgcctaggagtttacagggcagttgatttagattgatctttcacattatccccttggactcttagaggattcatgatgacagttgtttaccagaggattttcagtgacatatgagaaataagatctgtcttctgtgtggagatggtttctctgtgatgttccctgaacctcatgttggcccttgccagagatctctatttttacagctacttgcgtcattgtcatttccagctgatagatgattgaatgcaacttcacatccttcctgtcttaggacttgtggggctttggctcaggcagctggatagacagcagagaaggtcactgagaataggaggttggactattagttctttccttgtccccacatggcattctaaactgtgataaaattatttgatacaaccattgaacccattcctcctgttgccttttctcagtcttcagatccccatagtgtttctgtagcatttgaaatctactcttcacccagattttcaaaactgtgtacttctttgattcttctatgtcctgtcttctggttcccttcatccttggctgcttccacttctttcttctgcccagtgctacgggcatcttctcagctttatctgtggtctttggccctctctgtttgttttttgtctctcttctgctcttttaccttttcttccctccttcacttcctctccctttttttcatgcattcttcatgtatttgttaagtagacatttacttaggacctactgtatgttttgtactgtgctaggtttttggcatagaagaatgaatgagatagacacagccccagattttatggagcttacaatgaatttcccaattaattaatagaatataattgtaaaatgttttgagaagtactggttgctataagagcatgtaatttaggccctgtcctagtttaagaggtcagtgaagtctttcttaaggaaatcatttttagctgaaatctgaaggatgagtaggaatttatgaggggacaacagggaatgttccacgagtaggaacagaaaacagttctctaactcagtattttagtcatattggtcttctttcagttacagttgtgtgctgctcagtgacactttgatctagggcagactgcatgtttgatggtggtcccacaagattattatggctacaccatacagcctaggtgtgtcataggctatactgtctagctctgtgtaaatacactctatgatgttcacataatgatgaaatcatctaagacacatttctcaaaacctgtctccctcgttaagtgacgcatgactgtacttgagtaccccatgcttcttcccacctcattaggtgtaagacacaagttatcatctttcctcaatgtcacccaaacctattctttactgcagccttagttcactgaattagaaatcttggtgtcactggtttcatttgaaatagaagtgagggccaggtgtggtggctcacgcctgaaatcccagcactttgggaggccgaagtgggcggatcacctgaggtcaggagtttgagaccagcctgatcaacatggtgaaatcccgtctctattaaaaatataaaaattagccagccgtggtggcgggcccctgtaatcccagctactcaggaggctgaggcaggggagaatcgcttgaacctgcgaggtggaggttgcagtgagccgagaccgcaccactgcactccagcctgggcgacagagcaaaatctgtctcaaaaaaaaaaaaaaaaaagaaatacaagtgagatttgtcctttcttctttcttcattcccactgccatagaaatatcagaaggtgatgtagaggcaggtggatcacttaagcccaggagttcgagaccagcctgggcaacatggtgaaaccctgactctacaaaatacaaaaaaaattagccaggcgtggtggtgtgcacctgttgtcccagctacttaggaggctgaggtagtaggatcacttgagcctggggaggtcgagactgcagtgagttttgttttttatttttttwwgagtcagagtctcgctctgtctcccagcctggagtgcagtggcgtgatcttggctcacagactgcagtgagttgtgatttgcactactacactccagcccgggtgactgagtgagtccctgtctagaaagaaagaaatatcagaaggcattatcacttcacaactgaatattacagtagtaactagagtgcttacttcagctttttcctccaacactttcttgcctcatcctccgcagcatagctagtataggcctctctttctaagaccctgttttttatcatcttactccttggctgaaaaacctagaatagattcctgatgcataaaatccagattctcttcctttggatcctccattatcagtcctcagactgtctcactctcgttttgtttctcaacaaacaccttttgggacaggtagatattcttcctcttccccctgtcaaccatgctcctttatgtctttttccctctgttttctctttaacttttattaccaactttaggaagtcttttcaactactgtagcctccagtgatctcatcctctctgaactctgaatttttaataacactttctgcatttcatatatgctaatgtcatttccttacctaaattataagtttaagaatgacttggggctgggtgtggttgctcatgcctgtaacccagaacttttggaggccaaggcgggaggaatcactggagaccaggaattcaagactgacctcgaaaagttagtgaaaccttgtctctattttaaaaaatttaaaaattagccaggcatggtggcacatgcctgtggtcccagctacttgggaagctgagctgggaagatcacttgagcttgagaggttgaggctgcagtgagttatgatcacatcattgcactccagcttgggcaacagattgagaccctgtctccaaaagaaagaaagaaagaatggccagctggacatggtggctcatgcctgttatcctagcactttgggaagctgaggtaggaagattgcttgaggccgtaagttcaagaccagcctaggcagcatagcaagacccccgtctctacaaaaaataaaaataaattaactaggcctggtggcgcatgcccgtagtgccaactacttgggaagatcacttgaacccaggaggttgaggctgcagtgagcaaaagaaaagaacaaggacatgttatgacttatatgtaattttatatactctaggattcaccaaatagatacttaataaatgctttgaggatgcctagaagattccttttttgctttttgatctgcaattttattgcctgtcaggacaaattgtatcacccttcaaatacattcaacaaattcaatactcaaaagtgtaaaatcatagtgcccaacaactaatcaaaactactaaattgtgaagaggcaagaaratgtaacctaaaaccaagaagatttattttgatatcatttggtggatactgctagttcattgcttactggggactgtgaatggttaacattgtaatccttctgtcctgtatgttgggtttaacttgaattgataatagacactaacctaggttgaaacaaggataatttattttaatgggctctaatattccagggattgtttctaccagctaaatactcacatttcatagagctggtcaaggattccttctgatattccagctatttttatagtcctttacagtttaccagttttatttaaatgaatcatctcatttaatcctcattataactctttgaggtaagtgatgttatctttattatcagaagaagaaaatgaggtataagaraaaagattgtgagtcactcagccagtctgtggtagaacccaggcctgaatctaggccggctgactttgaactccttttctaataaccttagttgttcttgaatgaagaacctgcccttgatcatacctaatcattttctgctggaggcctttgtccttgtgtgtttgagttgttcatcagctgcttcccagagatggtgaaaaagaggttaaaagtttttctaatggattatcctcttgattaatatgattttgcttcggtgtctttcttttttttagttttagagacagggtcttgctctgtttcctgggctggagtgcagcggcacaatcagctcactgtagcctcgaactcttgggctcaagcgatcctcccgcctcagactcccaagtagctaggactacaagtgcgagccaccacactgagccaatttttaaaaaaaatttttttgtagagacgagctgtcactatgttgctcagattgggcmttgatatctttctaagacctttactttaaatggaatttgcttagggatgatatgataaatgaagcctaatctgactgatacagttgcatattaattagttaccacccacatccstggtaggccttgtacccgacaccaaatctagataaccagacctgtagtgtgcctggccagaaaaagccacgttgaggtcaagtattaaaatgtcatactgagggctccctaaccaaaagaaatctaagcataagaccctcagtgtctctgtctcttgttggttctgtttgcttacagaggcatggcacttgtaaagcttttaaaaacttgtttcatgttcttataatccttgggagatacagagtgggtgttcagaccaaaaaggctacttcctgaagtgtttatgcaaaggatcatttttagagagttatgtggaatggaattgggtctgacgtcaattctcagtgtgctttctctcccctggaggaataggccatatgtagagacagatgtgagactgaagtcttttttacatataaataatgctgggagagaatgagaacatttctgtaaggtggaggttggggaagaacagagttcacggtaagccagagatgaccaacttgtttttgtatgcacttctaaaaaaccttctagtaatgtataatctataagcctaaatgtgtgtaaagtatttgtacagtaaattagtagtaataataatagagcaagtgtctgtgtaacccaggtcaaataatagaacattgccagcacccaggagctcccccagaattccttttgatcacctacccacacccctgttctgagggagtctcctgactcctgtggtaatgattttcttgcttttctctttagatttatgacttttacatgtgtccctaaatgacttaggttcattttgcctgaatcacactgcatttatccttttgtgtcttgatcttttcactcaacattttgtttataataatcacacatgttattgcctgtggtttgttctctcttattaatatttcattgtatgactttaccacaatttattgattattttactgttgacgggtgtttttgtttccaatctgggttactacagataacaccactttgaacattcttgaacttttcttttggtgcaggcatttctgttggatatacattaggttgaaccatatgaattaccatttttgtggctcaaacatcaaataataatttcatgtggttcaatctaataattaggggtagaattgttagatcataggaaatacatatgttcaattttagtagattttgccaaatagttttctaaagaactcttaccaacttaatttcctgttagtaatatataattgttgttccacattctggccaacacttgatactgtaattttttttattgtggttttcatttgcatttgctggttactaatgaggttgaacgcattttcacttgttgtggccatttcagtttattcttataaagtacctaagtcacttgcccgtttttcttttgggtggtttgtctttgtcttgttgattagcagaagttatatatattctagatatgaatccttgatggttaaatgtattacatatatcttctctcattctgtgtttttttaattcttaatgttttttgactcactgcaacctctacctcctgggctcaagcagtcttcctgccccagcctcccaagtagttaggaccacaggtgtgcaccaccatgcccagctaatttttttattttttgtagagatgggatctcactattttgctcaggctgatcttgaactcctggcctcaagtgatcctcccacctcagcctccaaaagtgctgggattacaggcgtgagccactgctcctggccttaatgtgtcttttggtgaaaaggtattctaaactttaatatagtcaaatgtatcgtcattcttttttataattaatgctttatccacaaactcttttacccaagatcttgaagatattcttttatattatattccgagagctttatcttttcatttttaggcctattcatctaaagttgatttttgcatgtggagtgaggttaaagttcaatttcatttttcccctaagggatatccagttgtcttagcaccagctggtgaaaagacagtccgcttctttgaggtgtcgcttctgtcgtaaataagggtctgcatgtacctgcatctgatctaggctctttgttctatttcattggtctgttgatctattcctcactgtattaawttctttttttttttttttttttttttgagacagagtcttgctctgtcaccaggctggagtgcagtggtgcaatcttggctcactgcagccactgcctccggggttcaaagaattttcctgcctcagcctcctgagtagctgggactacagatgcccaccaccatgcctggctaatttttatatttttagtagatacggggtttcaccatgttggccaggctggtctcaaactcctgacctcaggcgatccacctgcctcggcctcccaaagtgctaggattacaggcgtaagccactgtacatggcctactgtattaatttctatagctttacagtaactaagcccccaccttgttgttgttgtttttctttttagtgatgaggtcttgctgtgtcacccaggctggaatgcagtggcatgatcatagcttactgctgtcttgacctcctgggctcaagcaattttcctgcctcaatctcctgagtagctaggactattggtacataccaccatgcccggctartttttaaatttttgtggaaacagagtctcactgtcttgcctaggcttatctcaaattcttggcctcaagctatcttcccactttggcctcccaaggtactaggattacaggtgtgagccaccatgcccagcctgttcttcttttttaagartgccttggctattcttgtctttctgcctttccatacacattttagaatccgcttgttgagtttcaaaaaagtctgttaggattttgattgacattatatttaatttatcaatcaatttgtttagaattgacatatttataatagtaaggtttttgtctaggaataaaatatatcactacattaataaggtctactttattgtgtatcaaaaaaattatttgaaataaaattcaccattttaatgttttttaattataaaatatgcacaacacaaaatttacaattttaatcattttaaagcatacaattcaatggcttttagtacatttataatgtacaactctcaccagtatccaagtttagaagatttttattatgcctcccccccaaaaaaacccatacccattaaatatccattaagcagccactccccagttcatagtaacctctgttttctgtcttggaggatttgcctattacgaacatttcatataaatggaatcgtatatatgtggcctttggtgcctggcctttttcagtcacagcaatatttttaaggtttatctgtggcataggctgtatcagaccttcattccttgttatggctgagtactgttctattgtatggatataccacattttaatggtatggatataccacatgaatctatctgttgatgggcatttgtcaataaaattctatcctttttttttttttttttttgaracagagtcttactctgttgcccaggctggagtgcagtggtgtaatcttggctcactgcaacctccacctcccaggttcaaacaattctcctgcctcagcctcccaagtagctgggattacaggcctgtaccaccacacccagctaatttctgtatttttagtagagatggggtttccccatgttggccaggctgatcttgaactcctgacctcaggtgatctgtccacctgggcctcccaaagtgctgggattacaggcgtgagccaccgtgcccagccaataagattctatacttttttatggagcactttcatcttttattatatttattctaaggtaaacattttcaaatgcttgtaaattatatttttataaaatttcattttgtttattgctatggaacatatgacattgattgacatcctgtaagtctaaattttgctaaactgtcttaataattccaaaatgtatttgtagagtcttttggaccattatatcattgtgatgaatgagttttgtttcttcctttctgtttcttctgccctgtgtttctttttctagtcttaccctactgactagatcctctaatacagtgctgaacagagtagtgacagcaagcagccttgacttattctggatcccaaaggaaaagcttttagtcctacaacatcaagtgtgatatttgctgcatatctgtacatgtttcaaatagtctttattttagctgacatctaacaacctaagaggactcttttttggttttaattgttttaaaaatatttttttgaagcaggtctctcttttgcccaggctggaatgcagtggcatgatcttggctcactgcagccttgacctctgaggctcaagtgatcctcccacctcagcctcctgagtagttggaactacagatatgtgccaccacacctagctaatttttgtattttttaaagagatggggtttcgccatattgctcaggctagtcttgaactcctgggttcaaacgatctgtacaccttggcctcccaaagtgctgggactacaggcgagagtcaccggacctggctcagcatagttttaaatgaaatattttaatattttcctttgagcatctacaatattctgatgtatccatgttatcagcaactggctgactctgtttttgttaatatacaatattaatgtaatacatagtattaacaaaagcagagttctgatatctcacttttactaaactttcgctgcaggagccgttccaatgtctctgtaaattctattgaatatttgaaggagatgatatgcatgatatttctgtacccctgtgaggtgtagcgtaacctcccatggctgtgaggagaggcaggccttctcacacattagcatctgtgtttagtcatgccctttgagtctgtggaataagaggtgatggactggaagagagcagtagtgagcagaagaagataggttttccagagggagattgtgggctcatggtggctttggaagtgtttatgggactagaaggacttaagaactcaacctagaatcagaccagccaaagcttacctatggctgaatgagtgtgcctctcccccacaagagcctgaatactcttatctgagtggagagagyataggcaacattgtctgaagacttggatgtttgttcctccaaagctctgtaaatttttaggattgcaattgctgttctctaccctgaagggaccttcaaaattactaatgaagagttggcctttctccatttcagattgatatcagtaaatgccattatttagtggatttggacaccatgagagaaacaccycgggagccaaaatattcatccaataaagaagaatggatcagcttggcctatagaccattccttgatgcttctaggtatgtggctttaatcctatgggatattccaggactagtatgggtaaaaattggattctaggattatataacttccagtcctgggttgactctagtagccatcgtgtgtgtgtgtgtgtgtgtgtaatggagtctcactctgttgcccaggctggtgtgatctcaactccccacaacctctgactcctgggttcaagtgattcttctgcctcagcctcccaagtagctgggattacaggcgcacaccaccatgcccggctaatttttgtatttttggtagagacagggttttaccatgttggccaggctggtctcccaactcctgacctcaggtgatccacctgccatggtctcccaaagtgctgggattacaggcatgagtcaccatgcccggcccatcattttctttttatttgggcmcagtttcctgagaaatcttaaagatttcttttttgaggcaccagaatgcaaagtatattctggtttcgcccaagtgaaagcatccaagtaaagcagataggtctgctgaagaaagcacaagtgtttgacactgattatttttggcaaccaacttcagctatcttaactgagagcattttgacactgttaggaagattgactatgccctttgaggaactagaagttcatgttcattattttcaggctcaaggctcagccagggctgagataggccttattcagtcttaaatagagagaccaaatggaccagggcttgactcgctcttcagaaaggtctcagaattaatgataagaggggatcaggcattcagataagggagtaatggggaagaggagttggaggggtcaaggtgtctgagggcagaggtccaggtaaacagacagttggagttaaggagatccagggaggcctggtgagcagagcccaggagccaggaggtctggaaggaagcaaaagacagaggacctggtcctgagagtcaggtctggggctcagaaacggactgggcccaggcccaggacaggactccagaaagacgaagtaagcacaggtactaggtgtaagcctgaggaaacagaatattgatcaggataccaagacaggaaatgaaatatggagagaaargcatgggtccctaattactgaaactgaggtataaggctggttcttcacgagtaagcaagaatccagttgttctgagtgagttcaattagagctggactagcaggaaggctgagatgctgacctgcataccaggtcactagcttggtcatagaagtgaggccaaaactgagtttggtgagctgcaggtgcccaggcaggtcattgtgcttttagactgagtctctccagtgactttataggtaattataactggcaaggaagggacggttggggagaggagggcagtaaagaggcacctgagttcttgagtgattctcaaatgtaggctcttgagccacactctcatcttgtaagtctttttgtagcctgaagccattccctcaagtatctgatacataatttctaggagtgccatttctacataatgggaaatagtgcttcttcttaacaacagcaacaaaaattttttttgagatagtctcactctgtcrcgacgctggaatgcagaggcacaatctcagctcactgtaacctctacctcctgggctcaagcagtcctcccacctcagcttcccaaggcacctgccaccactcccagctaatttttgtattttttgtagagacgtggttttgccatattgcccaagctggttttaaactcgtaagctcaagctatccgcccacctcagcctcccaaagtgctgggatgacccatggtgcccagccttaacaaaaaawtttttttttgagacggggtctcgctctttctcccagtctggagtgcagtagcacgacctcggccccaaagtgctakgattacasgcgtaagccaccacacctggcccttaacaaatttttttgagagcctgcaatgttctaggtgatttggacatatagtgaataaaacaaagatctttctcctagtgaagcttactgtttggaggtgggtagggaagacataatatacaagamaataagttatatmgtatattagaggatgataaatgcaaggmaaaaatgtattgggttaagaggagcattgagagttccactagagctgggggttacactttgagctagggtggtcagagtcggcctcaatgaaaagatgatattcaaacaaagacttgagagatgtaagggcattaaccatgtggacatctgagggaacagctagtgaaaggctgtggcataaggaagaaacaggaggccagtgaggctggagctgagcaagagtgaagaatagcaggtggtgtggtcagagtgcagtaggggtgagwgtgcaggttataaagagctttgtaggctattgaaaggcctttactctcaattaaatggggagccactgtagggttttgagcagagacttgatataacttttattttaaaaggatcattttcagttctgtgctgagaataaatggtagtaagtaagaatagaagcagggataccagttaagccactattgcaataggccaggcaagagatgagggttcttcagatcagggagagggcaatggagatagtgagcggtggttatgctgaggatatagagaaatgcactgwatttgaggtgtgaaagaaaggagtcaaagatgatcctagggattttgatccaaggaactggaaaaatgaacttgctattaactgagatgggagagactgcaagtagaacaggttttacagttttaggggtagagtgagagataagctttgttaagtttgatatcagtcaaacttaactgttcagttgccaggcaaatagaattattgaacaggcagctagatatacagtctagagttcaagggggaagtctgagctagagactcagactcatttagaactattggcatttagatgatattttttaaaaacatgagactggatgagatcaccaaaggagagaatgaagttagggacgagatgaggccagggaaactccagtgtgtagagattagggagaagaggaggaaccagcaaaggtgactgagggcaatcatcagtaaagtagtaggaaacccaggagaggagagtaccctcgaagctaaggcaagaaaatgttttcaggaggaaggagtggtcacctgtgtcagaagctgttgataaatcaagtaaaatgaagaataacaactgtccattagaattggcaactggtaaaggcaatttgggtgaagtgggtgggggtgtagggactggagattgattagaaaggttgaagtgagaatagtagaagaattggtgtagcaaatatggacaagtcttttgaaagagttttgctatacaaggaagcagggaaatagggctatatctggtggtgggtgtcaggaaaagtgataactagagattttttatcttttttaaaaaaatttttagtgtggccaggcacggtggctcacacctgtaatcccagcactttgggaggctgaggcaggtggatcacttggggccaggagttcgaaaccagcctggctaacatagcgaaaccctgtctctactaaaaatacaaaaaaaattagctggctatggtggtgagcacctatagtcccagctacacaggaggctgagacatgagaattgcttgaacctgggaggcggaagtcgcagtgagccaagatcacaccactgcactccaactccaacctgggtgacagagcgagaccttgcctcaaaacagcagcaacaacaacaacaacaaaaaagcaatggatgaacctatattgacacatcattatcatccaaagcccacagtttacattagggttcacccttggtgttatacagttctatggcatataatgtcatgtgtctcccattaccgtttcatgtgaaataatttcactgctccaaaactctgttctacttccatgctctattctcccccactacattcccggacaaccactaatctttttactgtcttcatagttttgccttttccagaatgtcatatagcttgaatcatacagcatataggcttttcatattgagttcttcacttagcaagctgcatttaagtttcttctgagtcttttcatggcttaatagcttatttcttttgaactctgaataatattccattgtctggatgtgccacagtttattcacctactgaaggacatctttggttgcttccaagttttgacattggtcttagttcagactgctataacaaatgaccataaactgggtggcttaaacaacaaacgtttacttctcacagttttgaaggctggaagaccaagatcacgatgccagtatagtcaagttctggtaaaggccatctttctggctgcagacagctgacttgtatcctcacatggctgcaagaagacaagctagctctctagcctcttcttataaggacattaatcccattgttgagtgctccactcttttgacctaattcccttccaaaggcccacctccaaataccatcacataggtgagtgtttagacttcaacatatgaattttgaggggacacaaacagcccataacagcaattattaataaagctgctataaacatccctgtgcaggtttttgtgtggacatacattttcaactcctttgggtaataccaaggcgtatgattgctggattgtatggtaagagtctgtttagttttgcaaaaagctgccagattgtcttccaaagtggctgtatcattttgcgttcgtaccagcaatgaatgaatgagttcctgttgctccacatccttgcagccatttgggattatcagtgttttgaattttggccattctaatgggtgtgtagtggtatttcatcgttgttttaatttacatttcgctaatatgatgcagagcatcttttcatatgctcatttgccatctgagtatcttcttcagtgaggtgtttgttaagtctttgggcattttttaatccggttgttcattttctwagtgttgggttttttgtttgtttttgagacaggktctcgctctgtcacccaagctggagtacagtggtgtagtcatagcttactgtaacctctaactcctgggctcaagtagttctctcgcctcagcccccgaaagcgctcggattacaggcatgagccaccacacccagtcttattgttgagttttaagagttccctgtatattttggataacagtcctttatttgatatgtcttttgcaagtattttctcccagtctgtggcttgtcttctcactgttgacagtgtctttcacagagcagaaatattttattttaatgaagtccatcttctcaattcttttttcataaatcatgcctttggtgttgtatctaaaaagtcattgccaaacccgagttcatttagattttstcctgtattatcttckaggagttttatactttcagttttgttgttgttgtttctttttttttttttttttttgagatggagtcttactctgtcacacacgctggagtgcagtggcacactcttgactcactgcaacctccacytcccaggttcaagcgattctgctgcctcagcctcccgagtagctgggattacaggcacccaccaccatgcccagctcattttggtatttttagtagagacggggtttcaccatgttggccatgctggtctggaactcctgaccgcaagtgatccacccgactcgctctcccaaagtgctgagattacaggcttgagccaccatgcccagactatacttttactttttacatttaggtctgtggcctgttttgagttaatttttgtggagtgtgtaagatctgtgtctaaattaattttttttgcatgaggatgcatggttgttccagcaccgtttgttgaaaagactgttttttattgtgttgcctttgttcctttgtgagagatttatagttaactgtatttatgtggatctatttctgggctctctattctgtttcactgacctatttgtcttttctttctccagtaccacactgtcttgattattgtagctttatagtaagtcttgcagtttggtagtgtcaatcccccaactttgttctttttttttttttttcctgagatggagtcttactctgtcacccaggttggagtgcagtgccgtgatcttggcttgttgcaacctctgcctcccgggttcaagcgattctcctgcctcagccacccgagtaactgggattacaggcacgtgccaccatgcctggctattgttgtatttttagtggagatggagtttcacaatgttggccaggctggtctcgaactcctgaactcaagtgatcctcccacctcagcctcccaaagtattgggattacaggcatgagctactgcacctggcacaccttgttcttcttcaatattattttgtggattctgggtcttttgcctctccatataaactttagaatcagtttgtcaacatccacaaaataacttgctgggattttgattgagattttatttaatctatagatcaaattgggaggaattgacatcttgacaatattgagtcattcctatccatgaatgttgctaaatttatactgaagtattgcattttggggagtgtgatggtaggaatctggacattttcttctgatggccttgcctttctcagtgaagtaggaagtgggattatcagctgagaaaggagcttaagggatgaggtgataagagatttgaggagaaagaaggtgtgaaataattgaggagagcgagagacacagaagctacagaaatatagygtgattggaagacaggatccagaatccgttggagccttaaacggggccatgtagttgctttttctcttcttcacttttgtatagttacagcttcactgtgaggcacaaaacaggtaaatttaaccggggtgtttttttttaaactttattgcagtatagtttacatatccagttcatccatttaaagtatacaattaaatgattattactaatgttaccaagttgtataaccattgccacagttcaattttaaaacatttttatcactgcagtaagatacctcattcccactgccgtctccgggcatcccgctaatctattctctgcttctatagattgccttttctggacatttcatataaktgcaatcatatgtggagtttagtgtctggcttctttcactcagcctgtttttgaggttcattcatgttatagcatttatcagtagttgtctgtttttattgctgaatactgttccattgtttaatccttcactaactgatggacatttcaatcatttatactttttggctattargaataatgctgctatgaaccttctccacacatctttgtgtagggrcttgggctttarttaagaaagttcaacacagcctgaaggaacaagggaaccgaaggtttctgcagggargtgatctamtgagtamccgtgaccttaagttggtaaggagggaagttgggggaaagcactgggagagtgggagacagtgaaaggtggtaggatcatggatgggtgttcaagacattgccagaactgcagtagtaataggagacagctggagagatagaagcaacagtgatggtaggaagttctcagaatcacacgtgttctttggtacctggcttgttgtttgttatagtatttgggggtagggctctattgtgccttcattttttatttgagaaaactgtgacaacatgagacctgggcctggaaagttccccagctctgaggggacagcagatctcaaacaacyttcctggtaacaggggaatgccttcagagaattttcatttcccataaattgtgttcagggcatgattttcacaacsacctgttgagaaggaaagaatcatttgggtaaagagctgaagaggtacagttcatgtgtaaagtatagtgaagacagcatgaggtttgcagacctgtgaatttaatcctggccacttgctgttcataccattctgattccaaaatttctatatcagtaaaacagtaactattttatgtattttctgggattgttataagaattaaatgagattgaatatatgaaagtccgtttacattctaaaacattatagaaacgttaagccttttaattaatcagcaggctgtctagggttccagaattatgctgattttctttacatttatcttcctcagcattttctagtatatattggtctaactgcaaaaacagcaggatgccacagccaattttgccacagcagtttctgtctgtcagcaccatgacatatgatgttgctgactttgggccaattaaggtagactgtactgtcagagcctgtgtgcctcagagctgaggtgatgcatgaaatgcttttgtgagcataatcttgaaatgccttcacacttatttactggagcaattaaagttcctctgtcatcttgaaacaatggtttttgtactttagcaatttatatattaatgagaaataatggtccattcatatataatggtcatttacgtcttagaccctagataagatggggctgcacacctcactattctctagctctttctgagaaaagaaaaaggttttaatargcctatgacacatagccacatgatttgtttagaaatgtaagtaggttaatttctcaaatgtttaagttcctaaaatctaaccctgctttttttatggtttttctcagatcatttgttctttcttccattgtctgtctgtccacccatcactcatctccagttagcaaatmtytattgaacattgccaggcactatgataaatcataggtagacagggataaataacagtacataccaggtcgctgtcctcttggaccttacgatacaatggtgaggctgaccttaaacaaatagccacacaaatcaataggtaattacaaaatgtgttatgtgttgtaagaggaaagtacagggtgttgcaagaggagtgagcagtggggagacacctggagttttcctggtatgttcttaagtcagctggttaggcaggtttggagatcagaaagtatttactgaatatctggtatgcccttgttatagagttagattcttttttattttattttattttttattttttgagacggagtctcgctctgtcacccaggctggagtgcagtggcatgaccttggctcactgcaacctctgcctcctgggttcaagtgattctcctgcctcagcctcccgagtagctgggactacaggcgcgtgccaccatgcctggctgattttttgtattttttagtagagacagggttttaccatgttagccaggatggtctcaatctcctgacctcatgatccgcctgcctcagcctcccaaagtgctgggattacaggtgtgagccaccacacccggcctagagttagattctttaaggcacataaaggaagtgattagacacaggcttttcccttgaataacttacaacttttgcaggaagacctacacatatgaaaacaacttgaaaatagtgttaagaccatagaggcaccaaatcatgtgctagaactttaaagaaaggagggacctgtggagattagagtacacttagaaggcttccagaaggagggggtgcttgagctgaagaaaagtaggattaaataagtactggtggtaaggagggaagaaccacttatttaattcaagaagcaatcatgagtaaaagtggaaagatataaaatgcctgttggatgaggggcccattagtcagcatcaaaaagttctatttacctctttggctggtttgaatttgcttttatgtaaggtaatctataatgtatcatccacatcagaagtcttttgaaagtaaaaggggtcctgtcctggataaattgaaatatatggtcatcttgctttaatgtgacccgagcaaagagacttgttccaaaaagcaggatgggagaaagaagatacatagatatattttctttgttccatagtccatttactatgtggatttgcccatggtttacttatttgatttaacttgctgacaattcttattattgtggcctagattgggcctcagctgtctgaaagagaagcaatcagggtagtttgaaggcagtaccagcatgtttgtttgtttgtttaaaaaaaaaaaaaaaaaaggaatcagccgggcacggtggctcatgcctgtaatcccaggactttgggaggccaaggcgagcggatcataggtgaagagattgagaccatcctggccatagtgaaaccccrtctctactaaaaatacaaaaattagctgggcgtggtggtgcatgcctgtagtcccagctactcgggaggctgaagcaggagaatcacttgaacccgggaggtggaggttgcagtgagccgagatcgcaccactgcattccagcctggtgacagagcgagactgtctcaatacaaaaaaaaattatactgtgagttatatgtaattggagtttccacttcagggagttgcaacctaaagatgattgggacaattttgtgattggggcaaatttaggaattccacatgtctgtgaatgtatgaagaagcctgttgaaattgttgcaagataagcaacatccttattgttggagtgatggagaagtacttactaaataaggctaagtggtgttagaccatttgggagaatgacagcccagatgttcgttcacttcttttcctaattggctgcttctttgccttattagaggcctacaaaccccagaccccattagtttgagagaagatccaggcataagatcttaatcaacacgttctagtccctgctcacacaactagtaccagaactgcaacttccattccctgagtttgccatgtctctctggctaattttataaaggtttatcaaactcttaggatgcggagtctaaactatttgacaatatcactttttagaccagacacatttgttactctgtggccatctcatattacatactttctaaaataaaagatttttttttctttgaagcatgatataattgttacatgaatgaaatagctgacaagtgggcagatgtaatgcctactctgagagtccccagagaggagtgaagggagagtgttgcaataaatcaccagctcagtggtgggtgcctatctaagtgtgctgagagatgtttggttgtgggagtctggtgggaaatgcctctccaggatattggagttggcttcatgagcaacagggcctgtttgtagcttcggaaacaagttgggaggccctgtcagtgctttgcacagccactttccacccactgtcctccttcattatatgtcccttttgtcttgcttgctctgctttcacctttagtttggggattgtgagattttatttttctctatttttttctttttaagacagggtctcgctctgttgcccaggctagagtgcagtgacacaatctctgttcactgcaacctccacctcctggactcaagccatcctcccatctcagtctcccaagtaggtgggactacaggcacggactaccacacctaactgatttttgtgttttttgtagagacagggtttcaccatgttggccaggcaattatagatgaagagtaaatacaaataaggagttagatgttgaacctttagctggtatggcaggagaggggccttttctagtcaaagggcaagttggggactgtgctgatawcatatacgcttattatgttctttcagtgcctacataggattctcagtggccactgaactttagctgttctggggactttactaagaccatggctctccttttaccctctaagaggtgaacccagcagctctgaggcctacagagtccattgcacttatattcatttttgtcctatgttgtagagagtaatctggttgaagggagccagcccttagctccagcataagcagaactatttctctatggaagataagacgactggagtgattactgtaaagggcaaattagccagaagcatttgttccagctattgctgtgtaacagtcatccatacttagtggygtaaaacaacaatagttgatkattgtttcttctcgtggttctgggagttgatgggctcaactggccagttcttactcaggatctgtaatgcattagccatcagatagtggctggggctggaggcagctgagtggctttctcactcatatgtctggatgctggctcttggctagatctcagctggggctgtcagccagaacacctatgtgtcttctttatgtggcttgggcttccttatagcatggtggctgacttccaagagtaagcatctcaagacctgcataattttttatgacctagccttggaagtcacacagtatcacttcctcctcattctgtttgttggcagcaagccagttgaatagctcatgctcaaggggaaaagaagtagacttcccctgttgatgggaggagtgtcaaagaagtatggacatgctttaaagccactacttatcttgcaatgccgttctccatccaaattggataaactttgaaacttttctttttaaaggtgatttcttacagaagaggcatatagtacatgcagtagtccagcaggctttttccatctgcaacttcttattacccagatggaaggagagactccacccgatggcagaatttggttgcaggccaagtttgacatgcttcagatggtgcttccctcctttgggtagaattagttctccctcctaagcagtaattggagttttttgttttttccctgtatgtcaatcatggtggtgcccttagcttcctcagcgatgccaagaatactgagaaacaggaagaagagatcagagtttctatactttggtatttatcaacttttattctcttatactttctgtttcactgtctatcagtttttggcttttcctcctcatattctcccagaatactttcttgagacccttcgtctggcagagctaccccaggccagatttggcttcaaaacacatggtgttttgccattattcagctgcttaatcattaagatctgctgacattttaagaagaataaaccttttttcatttttctgaagcttagagagtctgctttccattgttgtgaaatgagttctctagaaagaaaccatttacagaccatctgttctctaagtccatgccatagaagctctcaggtttgaagagcatgtaacatgttttaggaccaccactgcttttagctggcttagcctaagcaggcagcatcatcagaggtctttgttccaagttccttgagagttagaaccacattacatgttgattctctacaactcctagcacattatagagtcttagaaaatatgtattgattgtgtatttcacattcttaaaactggatttatactaaatagaaaaaagatggtataaggttttcttcagaagcttctgatgcccttatttggtaaaataaagattattgaattattttaagacatactcattgtttatttcatctctgtaaagcttaccagaatcatttgctgatgtgacccctaatccttctatttgtcacataaaagaagcccaaatgagggtccgaagagcakggacgaaaactctctcgaacattggcatcctctccacaggactgatgaatgggacatagagtacctttatatctaagtagctgtgagatgggaaaaaagactggtgaagagcatttctccagcaaccttgatgggactgaggtcagaaaatggccagttgcctaatagcatttttccccagttcctcactctgaatatttgctaaagatgactgatcaaaaggttatgatgttatgccagatgttggccaaggccacaaatcagtggaatgatccactctgtataccagtctcacgatgccacgattccagtttgtgcctcastaaacttcctagtcattacacataatgtatttttggaggttgctccatatagtcaaaatcaygaatatttattgaacatcaagggtctattgaacatgcctgctgaaagtaaaatatcatactggkcacatggataatgctgattcagcaaattctgtgtaaacggccacctgcggggtatattgccattatacaattatgggaccttttgcagtatattttctttagcaacacgccttccatgcccccttgcactctgacatcccatgrgccaccacagccccccagctccccactctagacttctgctttgctctgccccacgtaatggctttaggattgaattgcttaggaagagaacagaaaaaaaactttagattatttttgatatttccttttccttgtggaagatgaatattgtaagaagggtgggaggtaaaccagatgctctggtttaagagtcagagcataggcgctcattcattcacagactatttattgaggactttctgtggcactttcctaaaaactagagatagagcagttagataaaattccatcctcaagggactggtggagtataacatacagcatggaactcctcttttggataacagggttgtaagtcacctttgcattagttaccattagaataatgtctctcaccgcatttcctgttaaaaactattaaataacagtcacatttttgctccataccagctttttgagatgtgcttaaattgcttgatatggaactataggttgactatcactaagtcttgaaggaattctgagattctcttcagaactgaagatagctgcaaaagccaagttctgcactaaaggttgtagaaaatctctcactgaaaggtgagctacaatgcaagagagaaagaaactagcttgaaaaagctgcggctggaaagataactggcagtgggcttagattacaggcttacaggggatattaatgcttggatggatgggtggatggatggatggatagatagataggtagagagagaagagaaaaacagaaagagaggagaggagaagagaagagaggagaaggaagacaggacaagatgtgggccaggcatggtggctcatgcstgcagtcccactatttgggaggctgaggccacaggattgcttgaagctttaagaccatcctgggcaacatagtgagactctgtctctataaataataataatgataataaattagctgggtgtggtggcacatacctgtagtcccattactctggagacagatcagggaggatcacttgaacccaggaggtcgaggctgcagtgacttgtgatcatgccactgcactccagcctgggcaacagagcaagatcctgtcttttaaaagagaaagaaaacctggatactaggatgttttctttttaaaataaaaaattgacccagcatttccatttgtgcctgctgaactggtgacatcagggactggcagccagtcattcattgacgtcagcaagagcagatttaaatctccaccgccgaatgctcctcagccctgatagatagggccagtaattgaattagaaaacattctgagccgtgagctaattatgctgtgcaggcaattgctttgcccagatctgtttcatccttgaatcacttgagtgactttctcactgggaggggaagtatttcagtttccatgatagaggcacatatttatgtctccctgaatcacgctgcctgtgctgccctagggcagtactttggcatttcactttattacagacattattgtatgagttttgataggcattagtgttgtctgtgaatcagtctgatctttgtttccatgtgtataaatgtgtgcaggcacatgtcattccagtgcacaactgctctttccttttttttttttttttttgagctggactctcactctgtcacccaggctggagtgcagtggcgcgatctcggctcactgcaagctccgcctcccgggttcacgccattctcctgcctcagcctcccaggtagctgggactacaggcacccgccaccatgcctggctaattttttgtatttttagtagagaaggggtttcaccatgttagccaggatggtcttgctctcctgaccttgtgatccgcccgcctcggcctcccaaagtgctgggattacaggcgtgagccaccatgcctggcccgctctttccttttataaaggcaaattaccaatttgatttccttttttcaataacaatacaatataacaattcaaaatgccccagttatgcttagtatattaaagcttttgatgataaaataatctakaacagcagctggaatgttagaaatgaagaattcaagccwgcttgttcttttggttaaaaagaaaatcacaggccgtgtgcagtgactcatacctgtaatcctagcactttgggaggccaaggtgggaggattgcttgagcccgggagtttgagactagtctgggcaacatagtatgaccccgtcgctgcaaaaagtaaaaaattagctgggaatggtggcacacaccttagtcccaactactcaggaggctaaggtgggaggatcacttgaacccttgaggtcaaggctgcagtgagctgggatcacactactacactccagcccaggtgaaagagtgagatcctgtctcaaaagaaaaaaaagaaattacaatatattcccatcccagcttagaggtgagaatgggcctaagcatatattggctgctttctgattccatcttctggaagaaattagttagtggctttgtgtgatatagatagataatgctactaaagatcacagccagaatctgcaggagaaaaggaggtttgtcttctaaaggatttttttccagtgccacactctgatgttaaatagatccttcttagcttttccttctatgtaattctcaccttttttgtagttttgtgttctgtcttaactagaaatgcctccttatttcctgaatacattatttagaatttgatgctgaatttcttgtgattgattatgcactgagggagcttggcaaatcaggatgtttcttggatctcatgatgtagctaagtcagacccatgtttgtccttagcaagatggttattccaaaccacaaattcacttggactttgaattcctcattgagagtaggaggaaccaccattgtgttcctggcatttaactcattgcttgacatggagctcattcacttgtarttaaactaaattgaattaaactcatatctcatatgtgtgatatccctctctcgctgtcttcagcagtccatccattcatccttccttccatccatccaacatttgtttttcagcatttactatatgccaggcacatgttggcagataaaacagacatggcccctagaatgtgggtgtgttttgtgggggagggcagataataaactagttaaccaacaaataaataatacaaattgtgaattgtagaatgaagaaacacacaggtgcactgagagaaaagaagtgagaggtggaaacctagggcttcctaggattgttggaagacctctcaaaggaggtttttttttcttcctgagacggagtctcgccctgtcacccaggctggagtgcagtggcacaatcttggctcactgcgacctccacctcccgggttcaaccgattctcctgcctcagcctcccaaataattgggattacaggcgcacgccaccacagccaactaattttgtatttttaggggtttcaccatgttggccagactggtctcgarctcctgacctcaagtgattcacccgccttggcctcccaaagtgctgkgattacaggcgtaagccactgtgtctggccaaaggaggtaacttttaagctgagactttaaaaatgagatggactcagtcatgagaaaaacagggtggaagagtgttcctggctgaggcaacagcatatgcaaaggctctaaggtaggaggaacttgtatttttgaagaactgaaaaggacctggtgtggccggagtgtagaggtccgggaggaagattgcacaaggtgaggtggaacaatcaggcaagggctagatctcctagggctttgtaggcaatgagagagtttgggatttattcagcccacctctagttgctgctgaatgcacagagtatttaacctgagatgcctgtagatttggttatggttagacaagttgcttttcctgcttagcgtaccttggaatattggatgaataaaatgaaatgatgtgctacatgtttattaaatgctrcttatacacttacctacccagccctcagcatttgacctcccgcctgaatgtttgcattatcactttgaacttctgtgtcagctgtttagaatttaccatatgctaagttatgatgatgtatcattcataatctgtttctacccaattagcttattagccctttgagaagagagacttatatatcttcagagccagcacacaaatgcttacatatagtaggcacattgatttttttgtttgattgctttttgtttttgaaaatcaaaggtttcctttatttaaaaatttgtctactggttttaaaacattattgtaagtaataaatttatctactcatatatatttgaaatttttaatcatagcaaatggaaaaccaagtagattgtttgtgaaacaagcaaataaatgaataacatggtgtawagtacaaagtaaaagtcctctgctctatcatagagactgcataatttttgttttaattggtactgctaaaactgcctttctaggtggctgtgcaggcttacactttcactggcaatatctgtttcctgattcctcatcagtgtttgagactgtcaggctttttaacttttccaaacctgattattgaaaattgtgtctagtcttgcatttccctgattcctggtaagattsatcattatttcatgtttatcaaccatttgcatttctcttctgtaatcatatcttttgtcattttttcctgtggaattgtcttactgatcgcaggaacagtttatatagtctagatgcaaatcttctggtacatatattgcattttctcccaatctcttttattttttacctttgttttagcttgccttttgaactcaacaataatgcatagtagtccttcttctatttcagtccagccacttattttttaaatttttttatttttcagaaatgcggttttgctgtgtttgcccaggttgcccttgaactcctgggcccaagcaattctttcatgtacccaggattacaggaacataccacaacacctgcctagtctgtgttttattttgttttgctttgtttttgagacagagtcttgcctcatcacccaggctggagtgcagtggcgcaatcttggtttactacaagctccatctccaagttcaattctcctgcctcagccacctgagtagctgagattaaaggcacccgccaccatgcccagctaatttttgtatttttagtagagacagggtttcaccatgttggccaggctggtcttgagctcctgacctcaagtgagccaccgcgcccggctgctagttagtgtttttgatgataatatatccccagtgcagaccaagatagtttttttattattattctttttttttctcttttattcacacctagtgatcaggaaatttttttttccaactcctgagtggaatcagaataagatcattttctgaaattaccagaaaatttttttgaacatgatctatcagcctaccaggaaaatagtcatcaccacttactatctcagtccaattgaccctctgttttctatatttttaagtttttttttttttgagacagagtctccctctgtcacctaggctggagtgcagtggcacagtctcagctcactgcaacttctaccccccaggttcaagcaattctcctacctcagcgtcccgagtagctgggattacaggcgcgctgttatttttgtacttttagtagagacggggtttcaccatcttggccaggctggtcttgaactcctgacctcggtggcctcagcctcccaaagtgctgggattacaggcatgagccaccgcgtccaacctatttttaagttattttataggctgggtacggtggctcatgcctgtaatcctgacactttgggaggctgaggcaggtggattgctcgagcccaggagttcaaggccagcctggacaacataatgaaaccccatctctacaaaagataaaaaattagccaggcacacctgtagcccagctactcaggaagctgaggtgggaggattgcttgagctcaggaggtgaaggctgcagtgaactatgatcatgccactgcactctagcatgggcaacagagcgagaccctgtctcaaaataaataaataaaaataagtataatttatctttgttctttggaagactctaaaaagaataaaattaygaactaccaatcctcccaaatagtaaggaattgctacaaaaagaaagtaaaaacctgggacaggcgaggtcgcttgcgcctgtaatcccaacagtttgggagaccgaggcaggaggattgcttgagcccaggagttcaaggccagcctgggcaaaatagtgagaccctgtctcttggggraaaaaaaaaaaagaaagttgaaaactaaaattgggtccactggaccctgaggttatactaaggactgagttgaccagaaatatacaatgactatattaatgaagcttttattgtagagtcaactagaatggaaattacacttgttagttttatactttctttactaaagcttataggagtttgctctattttgcatctttctgttctaccctttacccttcaccttatttgtgcagtgtagatgaaaagagtaacttttttttttttkggacaatgtctcactctgtcacccaggctggagtgtagtggcatgatcacagctcactgcagcctcaacctcctgggcttatggtctcatgccatactaccagctcagacttcagaatagctgggactgcgggtgtgtgccaccctgccaggctaatttttaaacattttttgtaaacacaggtctcaatttgttgcccaggctgggctcaaactcctgggctcaagcaatccgcccacctcagcctctcaaaatattgggattacaggcctgagccaccgtgcctggccattaacttctccttgactggggtaggtgcttcctcttcctgttcattttatttataggagccctgctttgtctcrtgtctcttctccaaacctcctttctctatcaaagcccttgatagagttcactgttgaagtgaagtgaatcttacagagcacagggcactgccagcgtcctagttgggaagaatctctaagaggtgtgcatgccaagcacagtgtcattgtgtgcaggcattgtaggagtctgccaaacccaaggttaggctgccagtacaaatgccacgttgacatgacatttacaagtttagaatttggaaaaggactgccagtggagcaccttcagctacctcattcaggatggcagtaactaggccaacttttgattttcagactcagaaatcagagtcaggaagtaatactccatacagaatttaaaactatcactacaactttttctaggaaatgataaatcctgttagtctattcctgggatgcatgataaaccataatggttaagagtacagactctggaatcaaacctggatttgaatgaggcctctgtcacttactgtgtaaccctgagcaagttgaagccttaatttcccttttataaaatagggataataatgccacttcctcacaggattatcaaatggattaaatcatatatttatttttattttttatttttttaatttattttttgccaggtgcggtggctcacgcctgtaatcccaacactttgggaggctgaggcaggcggatcacgaggtcaggagatcaagaccaccctggctaacacggtgaaaccccgtctctactaaaaaatacaaaaaaattagccggtcgtggtggtgggtgcctgtaatcccagctactcaggaggctgaggcaggagaatggcgtgaacccgggaggcagagcttgcagtgagctgagatcgcaccacggcactccagcctgggtgacagagcaagactccgtctcaaaaaaagaaataaaataatttttaaaaaatttatttttattgagatagggtctcgctctgtcacccatgctggagtgcagaggcatgatcttggttcactgcaacttccacctcccgggttcaagcaattctcctgtctcagcctcccaagtagctgggattacaggcatgcaccaccatgcctggctaatttttttgtatttttaatagagacagagtttcaccatgttggtctggctggtctcgaactcctgacctcaaatgatctgcctgcctcggcctccaaaagtgctggaattacaggcgtgagccagtgcacccggccgataatatatttaaaagtataagcacttttcacattcttcagaaattcatgagaaatttaggttttcagttcttatatttcagtaataagtagatatattataatttactagggacatgttgtcacaacatgaacttgtgtgtagactctttccttgacttagacaatactggaacactatgcacaggtacccaggatgtagttttcttgccctttccaggaaaacttagagctggagtccaggtcatttgagtacttggcatctctacagtttcttagatgcagaaaccattttggtgttaagaattcatttcagcaatagaagtcctttgattgacctggaatttttctatggcacattctaatgcaaaatgaagacctagagctattctgaaggatatactgtggcttattagggacaataataaattttcgtttaggtgacaaggtactcggccttgattaagtcttttatcgtgatctagtaccgaaataataggcttttctgtgccacttgaataaaatataatccttactacagattagtttatttattttaatcacatttagtaccattagtaaattctcccaagtgataaaattcttttttttatcccttgtttttcagatcttcaaagctgctgcgggcattctatgtccccttcctgtcagatcagtatacagtgtacgtaaactacaccatcctcaaaccccggaaagcaaagcaaatcaggaaraaaagtggargttagcaacacacctgtggccccaaaggacaaccatcttgttaactattgattccagtgacctgactccctgcaagtcatcgcctgtaacatktgtaataaaggtcttctgacatgaatactggaatctgggtgctctgggctagtcaaagtctatttcaaagtctaatcaaagtcacatttgctccctgtgtgtgtctctgttctgcatgtaaactttttgcagctaggcagagaaaggccctaaagcacagatagatatattgctccacatctcattgtttttcctctgttcaattatttactagaccggagaagagcagaaccaacttacaggaagaattgaaaatcctggtactggatggctgtgataagctgttctccacactctggcctggcatctgagaactagcaagcctctcttaggccatatgggcttctccaccaaagctgtttggcagctcctagcagaccttcttattgaaatcctcatgctgaaaatgaacacagcctagttgccaacccacatgtccttttcacctccagcaagactaagcttctttaaagcacttcacaggactaggaccctgtcctggagctatctcaggaaaaaggtgaccatttgaggaactgtgacctaattttattataatgatgcctctaattttcatttcctttacaaccaactgtaactataaggttgtattgcttttttgttcagttttagcatgctattttttgaattctagactcctccatgtgaagatatcaacagacaaaactacaactgtataggacatatttggagaaaattctatcaattgatacatttggatgacatcacatttttaagtaatgtaatctgaggccattgctgaggaaattaagaattttcctttttttttaaccacccccagtgaaaaggatcagtgtatatttatagcacctattttttagttctgtctgttgtgaggcacatcctgcatggggcacttctagtcaaataggcaatgataaggacctaattaaaatgtgataagtgtatactattactttaaaagcctttacagtcagtacttcagtttacaaggcactttcacagcatctcgtttgatcctcacagtcacaacatgtggtagacaaggcaggtgatttttatccccattttacagataaggaaacaggctgcgggtggggagtgaggggaggtaaagatagttagttgcctaaggtcacacagccagtaagtaatagagctgggactggaacccaggtttccttactctcatctattgctcctccatattcctcactcaaccatgaaaacattacttgaaaggactgatgaggttaaccagagacctaactgatattgtaactttctattttaaggaagaattgtgtctgtatttgagttctttggagcctccagtctgcctgtgtgttagaccagcacagcagtgctgtgtgatgcagcctgacctgtggcaggaaagtagtgcttctgtttggaagtcatgttcttttgcagccacacaggatccaaatatcagtactattcctgtagtcaatctggggtcacattataggtgccttatttccctaagggtaactgatctgaatatctgcaaataggatgaatctatttttcagaagttccatctttcatttttctttttttttttgagacagagtctcattctgtcgcccatgctggagtgcagtggcgcgatctcggctcgctgcaacctctgcctcccaggttgaagcaattctcatgcctcagccacccgagtagctgggattacaggcatgcgccatcatgcccagctaatttatgtatttttagtagagttggagtttcaccatgttggccaggctggtcttggactcctgacctcaggtcatccacccgcctcagcctcccaaagtgctggtattacaggcgtgagccaccgcacccagccccatctttcattttcaaagagaagggcattctaataggaactggtgccaagagagaagaaaagaagtgataacagaagaaatggctagttacaatattaaaaagctcctctttgagatctcctctgcaggaatatcagagacggagttgaagcgctggagaggtaataggtctagacagtacagaacaataactggggagtgtgtgaggatagactgggctcccccttgcttgaaagatctctggcatttaattctcaattcttgattactattttccagtgtaaaactagcacatatgatctgactacaggacagagaattttaagtgaaacatttgccttacttgcagtaataatgtgctgttcttcacagtagctaaggccctctatgtttcccagaggtaaataagaatccaggaatggaggtccatctgtgatgaatggcttttttctaatcaaagtagtataatgctgttttatctgttttgtcatcttgtttttttttttttttaaaaaaacaaaaccttaattataatatagcgcaaagaaaggccaggactgatgcagggattccttggaaatatcagttcctatcacttttaaaacctgattttggatctctctgttctatgtatgtctttagtgagagcacaatacatggcagaacgctgtgccaaatgttataggtaaggaatatagaaatgaatgttttttgttgtgaaggtgttttcatgtgatattttataaacacattttaaaaaatctccatcactttttagtataggaaggatagctttgcctgggaaaaacagtttcaacacacctgctcagagtagcagttctccctcaaaaaagcagtgttcagcctgcactgactgttctgcttgccaaaaggaggaagcatgcaagatacttatttctccatagattgtggagtatagagggatgtgggactacagattattattttttttccccgagacagagtcttgctctgtcgcccaggttggaacacaatggcacgacctcagctcactgcaacctctgtctcccgggttcaagcaattctcctgcttcagcctcctgagtagctgggattacaggcacacaccaccaccgcactcagctaatttttgtatttttagtagaggtggggttttaccatgttggccaggctggtcttaaactcctgaccttgtaatcatcccgcctcggcctcctaaagtgctaggattacaggcatgagccaccgcacccggcccagataatttttaatagcctttgatcatggggtgagtgagggagtaggtatacttggcaaatgcatggttctctgatttctagctctaaagcagccttatctgaatccccaaatcttgtgatgctgagtaccattactgaaccagtctgcacggtaggcatctgctaccaaaatttacctcctacctggtaggtgtcatctgataagaaagaagacaggttattttaattttttgagataatcacagaaaattgcagcccatactctttattaccgaattcaagtttggaaatagaccctttgttttaaatcatgatgggtctttatcccaatcatttatctgggtcatttttccaactttggagttctaggaaagaaccttgaaaacctgatatgattctgcagcatgaggtctacggtgaccatttgggcaaagctccagtggcaatcatttattgtgttttgcatttcctgggatttattgaaataagaattcactgtgattatgtagtcttctggctagtatcaggcagctctgcttttaatttggttaattttattttctctgaagagggagaagaggtacaatttaatcttggcctccacaagcatattaaagctcacgtgttaatcagtgcattcttatgctcctacattaaatgccttgggtaaatggataaatggacatgtgcccagctttaattttttttgcaacagaaagatcagacttccgtatggcatcgttggatttcagaggctttctggtgtatctgtaaatctgaatgttgccttctgccagtctgtataaccaggtgattcatgctgcaaatgaaatcaggaagcagtaaagtgttaaagcaagagtattgtccaattcacttgtcttcctgatccttgtactttatttcacgtgtcggtgtttacattacatacttatatttcctgtgaaagaaagagttaaataaattgtagcagtttgattttctttttcttaatgtgacattttctcttttgcttttaaatctttcttggaaattggaaactgaaggagctcaagtcctttctccctgactccagccctattcctcagtgtggagacctgccttctacaggccaaatatcccagaatgtttattctgaaaactttagaagaagactttgggaaacccagtgaggattagttttattttaactatgttaaaaccacgcacagtaggaattaatatatgggccaggcgtagtggctcacgcctgttatcacagcactgtgggatgccgagacgggtggatcatttgaggtcaggagttcgagaccagcctgaccaacatggtgaaaccacgtctctactaaaaatacaaaatagctgggcgtagtggcgcatgcctgtaatcccagctacttgggaggctgaggcaggagaatcacttgaacctgggaggtggaggttgcagtgagccaagattgcaccattccactccagcctgggcaacaagagtgagactccatctaaaaaaaaaataataaaaaatgaataaaaattaaaaggaattactcaatacatgaacattgtacctaaaagagatgaagtcctggatccatcttaagtttttggaatgagaatcactggactgtgagagtctaattttcttagaaatcctaatccagttatatctaacacttaggtaatttccccctttgttggggttgtcagaaggaataaattttttttaatttttatattttagaaatggcatgtgttacattgttcaggctggccttaaacaacaaacagtcctcctgcctcaacctcttaagtagctaggactacaggcatgcaccactgcacccagctggaataaatttttttttgtaaatgaattcctaatgtccttgttatgccatggactttataccctataacttctagcagccatctggtgttgtgccgttggttattattattcttcctataggaccccagatgcccttaacttggtttgatttatttctcccaaattgtttgaagaaaggatgcttttattagtgtaattccaggaaggagaagtccacaactttaatttattttcccttgtctagaatgtcatctttctccctatttgttactgttacttttagggctgagtctcctttttctaagaaggctttctagacttcagactctttgattacattcttttctgagccttcttgattacccagtgtccttaataatggcatagaaccgtaacatataaaccatgcgaccctgtctcgcaaggccattgttggcatatgaggggcaaagaccacatcacactgctatgtattcccggtgctcagcgtggttccctgaacattttggtactgtatatttttattgacaatgaagaaagaaaagcaaaaagagacctgggactaatgtacaaactgttgctctcaacttggcatggattagaccatagaaaatatggcaagttggccggacatggtggctcatgcttgtaattccaacactttgggaggctgaggcgggcagatcacttgaggtcaagagttcgagaccagcctggcctacacggtgaaacccccatctctacaaaaatacaaaaattagctgggcatgatggtgggtgcctgtaatcccagctacttgggaggctgagacatgagaatcgcttgaacccaggaggtggaggttgcagtgagccaagatcacgccactgcactctaacctgggtgacggagcaagactctgtctcaaaaaaaacaaaaaacaaaacaaaaaaaaaaacggcaaattataaatcctgcctgtagtactcaaaaagggcaatttggaagatatgaatgtttatatttcgccaattctcctgaaatacaagtgcttctttacaaaagcattttagaagggtagcttctaaaaagagagaaagggtacctttatkgaatattcctattgtgacttgcttttagagggtcggacctagcccaggaggccttctgaacaagtttgggtcagaaagcctctcctccaggtgtgaggaggtgatcgggccctaccagctacatgtcctgctaggaaaaggaagtctggctgcaagatgaccgtagccatacatcagattgaataatattaagtagcaagggatattttaaaactgaaagctgttttggctctcttcagctgtggattcagcatagacctgacatttaaacaaatgataaccaacacgtgagaaatataatgtaggaaatttagattagggatgtgagattatggaattgtagtgacaaggaaagactgggaatttccagttgtaggttggtagaataaatagtctgttaaaattaacaattgggtttaaata

SEQ ID NO: 94779 - DNA, 62264 bp, Homo sapiens
aatgcagtggcaccatctcggctcactgcaacctctgcctcctgggttcaagcgattctcctgcctcagcctcccgggcagctgggattacaggcacacactaccacacctggctaatttttgtatttttagtagagacagggttttgctctgttggccaagctggtctcgaactcctgacctcaagtgatccgcccgcctcagcctcccaaagtgctgggattacaggtgtgagccaccatgcccggtcttaaaaccagtttcttatatatctctctggaggtattctaggcatatatgagcacattctcaagtacatattatcctcccttcccctatcttttagacaaatgatatcaaactatacatcttgtgagattattgcataccattatatgaagataccattatatcctttttaatgcaaccatattgtacaaatagactatgatttatttaacctgttatctatcagtggatatttaagttggtagttggttccaatcttttgctcttacaacaattctgcaatgactaacattgtataaatatcatttttaaaaataattgcattgaagcataatgtacatgccataaaatccacccatcttaagtgatttcacctgttctcagaaatttttagtaaatttaactaattgtacagccattaccataatccagctttaggacattttcttttttttcttttcttttcttttttttcttttttttttttttttgaagtggaatcttgctctgtggcccaggctggagtgcagtggcgcgatctcagctcactgcaacctccacctcctgggttcaagcgattctcttgccttggcctcccgagtagctgagactacaggcacatgccaccacgcccagctcattttttgtgtatttagtatttgtgtatctagtatttgtgtacttagtagagacagggtttcaccatgttggccaggctggtctccaattcctgacctcaggcgatccacccgccttgacctcccaaagtgctgggattacaggtgtgagccaccgcgccaggcccgtaactgtattttaatatagccattctatggatttaatatggtattttattatggccttaatttgcatttccctagatactaaccatgctgagtgtcctgtcwtgtgtttattaaccattcatatatttttagtgaaatgtgtatcaaatcttttgcccatttttaagttgacttatttgtttgtcttcttactattgggttgcatatgtttttgatataagtcctttatcagatatatgatttggaaatattttctaccaatctgtggtttgtttttcttaatggtgtcttttgaagtgcaaaaggtttgaattttgaagtacattttattgattttttcttctatatattgtgcttttggtatcatgtctaataaatctttaccaaacccacagttacaaagattttctcctgtcttctttttatactttttacagctttatggttttagctctaacaataaatgtgattttgaacatacataagactatttgtaacaaacacaaataaattgaattgttgggcacttgtatttgcatttgtaattttattaactattgccaaatagcagttgtaaacacgtacacacacacaagtgtatatacacatatacatatatatacatatacatgtatgcatatatgcatatatacatatatgcatatatacacatatatacatatatacacatatacatatatgcatatatacacatatatacacatatacatatatgcatatatacacatatatacatatatacacatatacatatatgtatatatacacatatacgtatatgtgtatatatacacatatacgtatatgtatatatacatatatgtatatgtatatatacacatatacacatgtatatatacacatatacacatgtatatatacacatatgtatatatacacatatacacatatgtatatatacacatatacacatatatacacatatgtatatatacacatatacatatatgtatatatacacatatgtatatatacacatatacatatatgtatatatacacatatacatatatgtatatatacacatatacatatatgtatatatacacatatacacatatacacatacatatatgtgtatctacacatatacacatatacacatatacgtatacgtgtatatacgtagatacacatatacatatatacacacgtgtgtatatacgtatatacacaagtgtgtatatacgtatacacacatatatgtgtgtgtatacgcatacacacatatatgtgtgtgtatacgcatacacacatatacgtatatatgacagggtcttgctctgttgctaaggctggagtgcagtggcacaacattggctcactgcagcctcgactgcccaggctcaagcaatcctcccacctcagcctcctgagtagctgagatttcaggcgtgtgccacaatatccagctaattgcttaattttttttatagagagagggtctcactatgttgcccaggccagtctcaaactcttggggtcaagtgatcctcccatctcatcctcccaaagtgctgggattacaggtgtgagccactgtgcccagccaggttgtaccaatatacactaccaataacaacaaacaaaagtgcctgttactccatacatgttccaacagtgtattattaaacttttgaatcatgccaaactgaatggcttctcactataattttagtttacatttttcttattaaaaattggaggctaggtgtggtggctcatacctgtaatcccaacacttcgggaggccaaggcaggtggatcacctgaggccagtagtttgagaccagcccagccaacatggcaaaaccctgtctctactaaaaatacaaaaaattagctgggtgtggtggtgggtgcctgtaaacccagctactcaggaggctgaggcaggagaattgcttgaacctgggaggtggaggctgcagtgagctaagattgcaccattgcactctagcctggacaacaagagtgaaactccgtctcaaaaaaaaaaaaaaaaaaaaaaactggagtaaaccatttgtttttccttctcatgatacataagttcacatctttggtctttttcttattgacttacactaaccccttacatatttgggaaactaggtcttttgtgatattagttgcaagtctttttccaactttatgtgttttttaactttgctttaaaaaacacattggttagtttttcacgcacactttacaattatttgcatgtagtataattcactggtctcctatggtctctaggttacgtttcatatttagaaagtctttctccattttaaaattatccttttttaaaagttcccccatgaattcctctagcatttttatggttttattttatgcatttatatctttgacccatctcgaattgattttagcatcagatctaatgtagtaaccaactttaaatacagatagttacccagctattccagaaatattattgaatgattcattttgcgtccattaattttaaatgctgttacaaccccactcgccagattataagctccaagaaggaaaacacttacgttttttcactatggtatccttaggaactagaacagtggtaggcacacaaagattgcccagggctttttgtgtgtgtgtggtaaaagatatgtaacctaaaatttaccattttaaccttttttttttttttttttgagacagagtctcactctgtcatccaggcactctagcgcagtggcacgatctcggctcactgcaacctctgcctcccaagttcaagcgattctcctgcctcagcctcccaagtagctgagattacaggcgcacatccacatgatcagctaatttttgtattcttagtagagacagggtttcaccatgttgaccaggctggtcttgaactcctgacttcaagtgatctgtccacctcggcttcccatagtgctggaattacaggcatgagccactgcacccaaccccattttaactatttttaagtgtaccattcaatggcattaaatatatccacaatgtgtagccatcatcactacccatttcagaaatttttcatcctcctaaacagaaacttggtacccattagacaataactcccattcgcctctccctccaatccctggtgacctctattatactttctctctcaaggaatgtgcctattctgtgtaccacatataaactgaatcatacactatttagtcctttctgtctggctcgtttcagttagcataacgttttcaaggttcatcaatgtttcagcgtgtatcagaacttcattctttttcaaggctgaataagtcatctgtagctatataccatattttgtttatgcattcatctgttaatgaacattctgggttatttctaccttttggttattatgaatagtgctactgtaaatatatgtatacaagtatctgagttcctgctttcagttattttgaacatctatatcaaagcggaattgcttgatcatgtggttatactatgtttaactttttgaggaatcatcaaactgtttttccaaaaagtctggactatttaacattgccatcagcaacgcatasggtttcaatttctccacatctgccaacaattactttcctttttttttatagtagccatcctagtaggtattaagtggtatctcatgattttttttttcatttccctaaagactagtggtgttgagcactctttcatatgcttatccaccatttgtacagttggccttccatatctgtgggctctgcatctgtggcttcaaccaaccatgaattggaaatattccaaaacaaatttcatctgtattgaacatgtacagactttttgtcattattccctaaacaatacaacactatttagatttatgttgtattaggtattataagtgatctagagatgacttagtcatctctaggatgacacaggaggatgtgcataggttatatgcaaatactgcatcattttatgtaaggaacttgagcatccttggattttggtacccaagggggtcctgaaacaaatcccccacagataccaagtggatagtcattctcttggaatgtatcttctttggagaaatgtctattcaagtcctttgcccttttttgaactgaactgtttgggggtttttcgttcttgtagttctttacatattctagagatgaatcctttatcagatatatgagttgcaactattttctctcaatctgtgaattttcacttgcacagcgcttttaactcttgaaaattatgctgcttctattatttatgtgtatcccgatctcttgccctcgtgacccgcccgtctcagcctcccaaagtgctgggactacaaggcgtgagccactgtgcctggccatctatgtgtatctcaaaacaaccttgtaggatgtatactgtctccactttacagataagaaaactgaaatccaatcaaagatagcacactccaaagattgctccaaagacagcacaacaataacaaacttgtagttgttattgctgttagtgttatccctttgaataatagagagtaacagaagctgcttcaaaaaggtctaggactggtgggaaaataagagagcagacccccaacagaggttgcgagcagagccagggatcacagagttttatctgccctcggtacgctgatttccaaaacccagcctcatattctatactccaaagcgcactgccaggtgggccaactccagcccccacaatccgatgccaaggccacttcttgccacttcctgcccgcctccagcccgcccctaacaagctagcgcatgcgctgtaggactatttgcgcgccgktccccccggtgagcctgcacaccgtgcttccggcgcggagatgaacttccacatgccccggcgcttgttgatgacgtaacttccggttgctgtgctgagtcgraagtgggaacccttcggccgctgagattctgtygtgtcgtcgctgctggcacttcaggctctggtaagacaggcaatagcttcaggggacggggtcgttgactttgcgttgtgatattttctgctggtccaatgccacttcaagcctgttcactcttatcttctccaaattccttctcctatgctttgctaaccagggaccttctccttcttgaacttcgaccctgtctgatttggaaccccttacagtgccccagcttctgatgtctctttgtacatttctgtccccatctttgccaagcccctcctggaagaggccggagcgctatcattgcattatcttttgacttaactttctctagaacgtgccccgggcgggtggatctccctccttcccgcgaatcccttatggarcatggaaggataaaatataaagagtagataacaaataggcagatgccaagaagataagattaatcgtgagtcgtaagcaaaccagttcaatgcatacgtcagggtgttgataattcttaaggcaggtgatgagttcaccacagataactcttggggcactctgcttcatgtttccttgggtttagaagacacttctaaaattgagtgaccatgcctcatgaccttatatttgatgagccttccttttaggatcagttttatgccctgacagcaagcatgtgtttagtctcgctgtcatttactgttttggtctcacgtggaagcccacctgcgataaaatgggatccaagaaggactgctgtctgctttttgacttgagatccttctaggctgcagatagatgtgttgatggaatttgttgccacattagcatggcctgatagtgttaggtgaaacatacgacaacgaaaattgtttcttaatttctattttaaattgatattttaatttctattttatattgatatatgtattatttgccaggacacagaccttatgggagtatgatttgatagagcttgattttgacgatcccagttttacaaagtgttccagatatttctgttgaaaaacaataccaagtctgatgttaacacacttgtgtgttcatgagagctgacagtggtcttaaaggattagtggtactattcataaacaaaagcttgtattaggaggaagtgacagaattttgtaggacagctattatagatatagatctttgcagcaagtgtatcagagtgaaacttgttttcaaggaggatatattttaaaagaatcaaatccaaaagcttctaaggttggtagctgtaccatcccaaagtgtctgacaacaggatagtgttgtatctctgtatggcagttgaaaataggaaaaaaaatacatacatatatgtatgtatatatgtgtgtgtgtgtgtgtgtgttwtttttttttttttttttttgagacagagtctggctctgtcacccaggctctgctctggagtgcagtggcacgatctcagctcacggcaacctccatctcccagtttaaaagtgattctcctgcctcagcctcccaagtagtgggattacagcctggctaaggtgtggtggtatgcgcctgtaatcgcttttagtggagacggggtttcaccacattggccaggctggtctcaaactcctgacttcaagtgatctgtctgccttggcctcccaaagtgctgggattacaggcatgacctactgcgcccggcgctgaaaataggagattataaatcccgaatgacattattgaatattaaacaaaatatttaggtttcattttatcggacctttagagtgggtgattatctgggtactcttactttggtaagtccattgaacaaatctaaactggcatctccacaaaggttctcatcaagtgatcagtcctcctttttcctgtaaaatttttctataagtgactacacagttttagcccttttttaatgaaaaaaagtttgtgcacagatttgacatacgtgtgaaaaagatgagcttagtgaaagataggtgagaacctttttgttttttacagatagtagagatgacaacagagacttatttccatccaccattctacacatgccaagataccaaagaaccagtgtctagcctggtagcttgaccttccactgcaacctaagacaagtagtaaagcccttaccttgaagtagggtcatgggtgatgctgttgattacaaggagttcagaaagaactacatgtaagattgaagccattcaataactacttatttaggattttgtgattgtgatgtataatgccagacacagaagaaagaataatcagatatgaacatgtaatcagaagagcttacagcctagcaatgtagaagatctgcttagaaatacaatgcagaaagtttaaaatcctagtaaaaatagaggtaaaatgtagaaagctagtttctttatacagtgcaacagtatagtattgagaaagaaggaagtaatgcagtttatggtgataaattctttttgtttctcttgatagtctttttgtttgtttgtttgtttgagacagtttccctctgttgcccaggctggagtgcagtggcaacgatcttgtctcactgcaacctccgcctcccaggttcaagcaattctcctgcctcagcctcctgagtagctgagattccaggtgcacgccaccatgcctggctaattttttgtgtgttttaagtagagatggggtttctccatgttggtcaggctggtcttgaactcctgacctcatgrtctgcccgccttggcctctcaaagtgctgggatcataagcatgaaccactgtgcccggccttcttgatagtcttaagagcttctctgtcatatgtcctatattcctggctttcagcttcctttctgcttacgtgttgcaggtgatgcatgtcctttgtaataatctggacacttttcagttgtgttttaaaaaacatcaaactggtttaggcatttagggaaattttattggtttttataactgaaaagtccagacttatctttccatctctcaattctgttttctagtgtatgttggcttggttttaggctaggccttttctaaatggtgtaaagatggcaactctatcttactggcttatcaactcaatcaggagaaaactcacttttccgtagattcagctgaagtcctgaagctggtattcattgactctgttaggcctccatagtgtcttgtgcccactcctggatcagttgctttggctggaaaatgctgtattctttttagcctggccagacttgtatgttcattcctggggctagtgggtgaggtcaaccccttctgaactggtcagcctcttctggattgagtggagtggatacccaaaggaaaaaaatgaatgtgatgttttagagagagaaataacaagagctcaatatactttttgcattcctctggaatttgtggtattttaggatggaagtagaatggtggtcagctaacaataagacaattcttggtgtttttacattaactacaggtaataattaaacttgtgcggtaattacatggggaaaatccctctcattaatttcaatactaaatatggtatctttccctttttttgcattattaagcttactgaaatatacatagcaaaaaataaaatacagaaggccaggcgcagtgactcatgcctataattccagcactttgggaggccgcggtgggaggatcacttgaggtcaggagttcgagaccagcctggccaacatggtgataccccgtctctactaaaaatccaaataacagttcaattccttgaagcagtaaagctttgagctgcactgagaggagactagactgcctaagtcattacagctaattagccgttagctcttgtgtggaaaaatggcagaggagctgaagcaagtgctgaagagcctcagaattgtcaagaaagttataaataatctctttctctggtaaataagggtaactttttcgacccattagcttttttttttttttttttttttgagacgaagtctcgctctgtcacccaggttgaagtgcagtggcacaatctcagctctctgcaacctctgcctcccgagtccaagcaattctcctgcctcagcctcctgcctcccaagtagctgggattacaggcacctgccgccatgcctggctaattttcgtgttttagtagagatggggtttcaccatgttggccaggctggtcttgaactcctgacctcaggtgatccacctgcctcagcctcccagggtgctgggattgcaggcatgagccactgcacctggcccacattagcttttgttgatatgatcctgtgaggagtcttgcctcartaaaccaaaggtagaccaaatgttctttttttcttcctttatacccctactcccgctatttctaaggtctctgtccttatagcagttcaagatccttatgaacaaaacattcataccctttgtctcttcccacccttttcagtgttgtatttaatatttctatgtcatggccttaaaatttcagaaaggggagaaagcctttcagggagccctgtttattctgttgtgccactgagttcacttggtcttgaatgaggaaatgtaatcagaagagtgtgaatgcaggctcagccagctctactaaacacctttgaggtatctatatttcatattacacagtagacctgaccgttggaattcgtgtttcttcagtattattttaagaaatcaggtaaacagtgaaggttagatatagcatgaagcaaagmccatttaatttttagtggaagaaatatcagtatttttaagcctagaaataaatagattgcttaatctatgttaaaaacccacaacatacagctgaactgcttccagtcctgatttgccagagtccaaatctaagatatgggcttttacttaatttatatgtagctgagaaatatccatccccagccctaagtcatagaagtcccttgtcctcaccccagtgaatgagaactagactgccagcttaattcttkggaaatccataattcttgtcttattatttttcagtgccacattgttattacaattagtaggtgagttctctctttgacttcaataattctttctacttaacctgttttcttaaaggtattgcaaataaaagyatatcaacagattaatgcattccagctgaacgttttagcctttttagtttcagctatccacaaatcaagccaccgagtccagctggtaggtttgtaaccattttgccaaaaatgtcttgagtttggggwcaggaattggaaaatcttaacccamagtattttaaaatgtatygtatttgagaaatgggaaaagaaacaaccacaggtatattacagctattgtgtcatctgccctcttgtgtctaatacctgtcctttgaacagcctctcccactaggtctggatggaggataccttaaagtgaaatgacagaccaggagaataacaacaacatctcaagtaacccctttgctgctctttttgsctccctggctgatgccaaacagtttgcggcaatccaaaaagagcagctgaagcaacaatctggtaagtggaggagccaatagcagcaaataagatgacctagaatggggtcttcccaaattaagtattctttgagtccttaattgcaattggaatttaagtttggaacaaaagttggtttttgtttgtttgttgagagcagaaattggggttttttgtttgtttgcttttattgttggttttgttgtgagtccctcccctccgctgtcctctccactgtacaaaaagagaccaggtaacaggtggttccatagtaacagatgccagtcgtgatcccaaagctgtcaggctgttttctttaaaagaaaaaaaaaatcacctagtaaaagctatttaaataaatgtttttaacatgggacacagaggtggtaagtgtaggtgtagaaagcaagtcatgtgcagctatagaaagcagatgtaaaaggaagaactataaaagctttttgacctgtaggcaaatgagacttgttcttaagctcagcacttcaaaggccctcccaagcaaagtgcttcttctgttccgatgagtggcatcatttgtagcttagtcctgttaggacagacttttttaaaaaatctgatccttagccttactatgaaaaacatcagaataacatctcagtaatcagaaaaaatggttttctttcaggcaccgaatttaagatcaagtccagcttcctcctataaggagacatatacactagaagaattaggatttttctcaaatatgttagtcttctgaagatattcacaatctttcaaaccagaaattgctccccttctcctctctccgaaaagaataatagtgtttttcttttgagagaaggagaagtgtttgcattttccctttattttgtttatttaaaaaaaaaaaaaacactcaggtgcatagctgacttttggcctttcagttagaaagggctgaagaaaaaagaggtaaaggcaagacagataagtgattgatgcaagggaaaaacaaaatcaatgttgattttttttaacatggtattttcagtctctgaaatctctcccagatttctatgatacggggccagaatgggaaactctggtttagaagattgtaggggaaaaagcagagtgaaaaataggaaaaataaggaatgagaaagtatgatttatgagtatgtggttgagggaaattttgctaaacagattcttagcttctgtcaccattggaggtcagagaaaaactcaacagtatagcagctgagcaacagaacgcttgtccttctggctataaacagacataaatctggctagagttgggagcattgcaggcacatgcccttctgttactattttggcacctcatcatcctagtttgtttacactgagtttatcatgccaccaggtccaacctgtttccactagcaattagtactttgccaaaacctttggcttcctatgttgagcttatactcaccacactgaaacaactcttactttgagagttttacctggactttcagactagccattctgtcaatagagaaaagtacatatagactcatatgtggcatatagtgaataacactacttttatgtagtcattcaacatgaatgatggggctgggcgcagtggctcgcgcctgtaatcccagctccttgggaggcctaggtgggcagatcaccggaggtcaggagttcgagaccagcctggccaacatgacaaaaccccgtctctactaaaaacacaaaaattagtcgggcatgatgacaggcgcctataatcccagcactctgggaggccaaggtgggcggatcacctgaggtcaggagtttgagaccagcctggccaacatggtgaaaccccatctctactaaaaatacaaaaattagccgggcgtggtggtgggcgcctgtagtcccagctacttggctgaggcaggagaatcacttgaacctgggaggtagaggttgcggtgagccgagatcacaccactgcactccagcctgggcgacagagtgagagtccatctcaaaaaaaaaaatcaaaggatgggagcagattttgaggacagaagtttaaaaaaaaaaaaatcgaaggaatttcatcaataaraaaaaaataacaagaaagaataaaaaggtacaaaagatgtgacatgcaacttataaccaaatgattaaaaaatttattctcatcaatcattagagaagtgccaattaaaacaaccattaaattgtttttttacctatgaaatttgtgaagattcaaacaggcactctctcatatactgttgggttkgcatgtaaatcagacagtctctttgagggtaacttggtagtaaatgttaacttttttttttttttttttttgagacgaagtcttgctctgtcaccgaggctggagtgcagtgcaacctctgcctcccgggtttaagcaattctcctgcctcagcctcccgagtagctgggactacaggtgtgtgccaccacgcctggctaattttttgtattagtagggatggggtttcaccatgttagccaggatggtctcaatctcctgacctcgtgatccgcctgcctcagcctcccaaagtgctgggattacaggtgtgagccaccgtgccaggcagtaaatgttaactttttaaatgttcaagctctttgatccagcagttctgctactgtgaatttatcctatagaaatactcatacaagtaaacaaaaagagttaagttgtattgtattcagtgcagtatttaaaatcatgaaatattagaaacaaccctattgttcatcagttgaaaagtagctacataaaccacagggcatgcaaaagatgtgatacaatacagctattaaaaatagtgaggtaggcctctaaatggcctaacagggaaaggtgttggtgctgattaaaaggcaagctgaaaagagctatgtatagtatcccattttttaaaaaaattaaaaagatagtaatgaatattagcaccagaaaagaaaaaaattcttgaacactgttaagtgtctttagggaattggttcaggagactttctatactatatttttctgtacagttaagaactattaaaacaaatgttatctcttaaaatcagggagaaaagccatacatttaaaataattaaaggcattttgatctattaggtaattctttgttcactaggattctgtagagaagataactttgctatttctggcagtgtggagtataattatggatagaaataaaacttttgctttgtaaaatgtggtaggatttatagccaggaatttcaaaaccctatatttaacttccctgacttgagatgttcactaattagatgattagcttgttttacatctgaaattatcatcttcttgrttacatttattatttttggtagcatgcttggttctctcttaaargggtgtaacatttaacagtatacattttctggcagatgaactcccagctagcccagatgactcggataatagcgtgtcagagagcctggatgaattcgattactctgtggctgagattagccgctcattccgatcacagcaggaaatatgtgagcaactcaacatcaatcacatgatccaaaggatcttccttattactctggacaacagtgagttacaaacttatagcattattctacccttcctatttgagcttgggctaggggcttgctctttgaaactggttacagctaatggttagatacaaacctactcactgcactccctggaactcagggtttatatttcagtgaaccttttggtatgacctaaaaacagtatttagatgcagatctaacttttgttcccatttcaatactgactgcactatatagctacttgcctttactaccttaaaaaggaaatgggaagggtagccaaacccattttcttctcagaggtaacctaaatattcagatggaagccttcagaggcatcagagagtgtttgccctctgtgccctgtctgtgtttaaaccccaaggttggtactaatgtctgggatttactctttaaatgtcatgatgctaggtttataacaaatcccattctctgtgactagagggggaaaaaaaaagatttgaatctttagatgttgctttgtgtatcaggatcattctggtattacttgagtcagatttgcagttcaagagtgatgctgtcaagatcagttgtctgtataaaacagaagcattatccttaacctatcatattaaaaccatttyccaggtgatcccagcttgaaaagcgggaatggcatccctagccgttgtgtgtatttggaagaaatggcagtagagctagaagatcaagactggcttgatatgagcaatgttgagcaggtaatattcttacgttcctaatgtgtgcccttagcaaaaattagctatgcggctgaattctgctcactgttctccaacttaygcttgtgtccatatgtccatccctctctctttttttttttttttttttaccagtaraaggccaagtaacctggatgtgcatctctaacattgtggtgttcctcttttggaatcttttcatctaccatggccacatgcccaaatctacccatcctctaagaaccagttaaaatgccttcttaattacaaagccttggccaggcacattgactcacgcctgtaatcccagcactttgggaggctgaggcaggtggatcacgaggtcaggagatcaagaccatctggctaacatggtgaaacgccgtctctactaaaaatacaaaaaattagctgggcatggtggtgggcgcctgtagtcccaactacttgggaggctgaggcagsagaatggtttaaacccaggaggcggaggttgcaatgagccgagatcataccactgcactccagcctggacaacagagcaagactccgtctcaaaaaaaaaaaagaaaaaattacaaagccttgccaaataaaagttgttactccctcctctgggtacctagaataatcagcctctgaatctcttgtgggaattgtcactttctgtctcatgttgcggctttcttatgtacctgtcttatctcccctattagacttaagttcttaagggcaaggcccatcgctttttcttctttatatcctttctatcttagtctgttttgtgttgctataaaagaatacctgtgactaggcacagtggctcacatctgtaatcccagcactttgggaggccaagttgggaggatctccaggccaggagttaccagccctggcaacataacaagaccatgtttctacaaaaaatacaaagaattaactgggtgtgatggcatgtacctgaagtcctagctactcaggaggctgaggtgggaggattgcttgagcctgggaggcagaggctgcagtgagccatagtcacacgactgcactccagcctgggcgacagagcaagaaagacccatctaaaaaaaaaaaaaagaacacccaagcagtaatttataaagaaaagtttatttagctcacagttctgcaggctgagaagattcagggtatgtccttggcctctggtgagggcttttgtgctgcctcacaatgtggtggaggaagtcaccaaaggacacataccatgaggacgcatgcaargaggagaaaacctgagaggtgtcctggcttaataagaacccgctctggagggaatttgtccattcctatgagaattaatccagtcttgtgagagcaagaactcattcagcaccttgagaaaagcaccaagcaattcaggagggatccgcctccatacccagacacctcccactagccccacctccaacagtgccacatggagatcaaatttcaacatgaattttgttggagacaaacatataaaccacagcactttaaaaatcaaaacagtgcgttgtaccttgcaggtgcctgagtaacattaaaagaataaaagtttggtaggaaagacagttgacagcttgcagtttaacttcacatttggagtatctttatataagtctgaatgagatcagcaatcacacagaatagtagatttcacatctaagtttaatcactgatctcagcaccattcaacaaatagtcttttaatgcctacyctatgctggggctatactagacacttgaggcttgatttaggataactttatatatgccataattttctaaaattttctaaagtaaaaatatacagggccctttttttctccttcactctacattcaaatctgtgattcttgctaataacctgtgtcagaattaccttttacatcttaatgttctcagattaattttgcaatagtttagtatttttgtttggttttctttataggccctcttcgctcgcttattacttcaagatccaggcaaccacttaattaacatgacttcttctacaacgctaaatctctctgctgatcgagatgcaggagagaggcacattttttgttacctttactcctgcttccagagagccaaggaagaggtaaaggaataatccccattgaatactgtattgtcctcttgggtatgacttcagcatgtgggccagagttggatcagtctttatttcaatttatatrtgtcatagtatgtctagaagtgaatatcagggacactaaagcttttatatcaatttatatatgtcatagtatgtttagaacactggatatcagatgcactaaagctttagtctcctttccgtatcttggggtccacccttctccccagttaaccaatgcctcctattctctctaaaacctctttagaaatcacatccttaaaaaaatctcatgaggctgggcacagtggctcactcctgtaatcccagcactttgggaggccgatgcaggcggatcacatgaggccaggagttcgagaccagcctggccaacatggcaaaacctttactgaaaatacaaaaattagccgggcatggtggcacacatttataatcccagctactcaggaggctgaggcaggagaatcacttgaacctgggaggtggaggttgcagtgagctgagatcacaccactgcactccagcctgggtgacagagcgagactctgtctcaaaaatcagaaaagggctcatgaattcatttccactgagatgtaaatattagagtaggctaagccggatatttccaggtttggaattttaaataggcagatagatgawtccttaagccaaggaaggaatctctaattaattttcaagcatccacaggagaccagtatgtctcttctattgtattcactatgtctactttcgttccagattacagagttagactattccctcttttcttcatgctgtttgcagattaccaaagttccagagaacctgctaccctttgcagtgcagtgcagaaacctcactgtgtccaatacccgaacagttcttctcaccccagagatctatgttgaccaaaacatccatgagcaactggtagatttgatgttagaagccatccagggagcccgtgagtacatgaacaagatctgtaagcttctacattttgattttcagatttaaaatttcactaattgcattagaaagtctcagagccattatggttctggtataaattaaggaggagggctcacatcttgatctttgaggttgagtaccaatagaataaagctgggcatggtagcacacccctgtagtcccatctactctggaggctgaggcagaaggatcccttgagcccaggagtttgaggctgtagtgtgctataatcacacctgtgaatagccactacactccaggctgagcaaaaaaacaagacccccagctctaaaaaaaaaaaaaaaagaattattgaaagtaaagagctagtgtgtaaaggcatataaaaattcttgtgccctcctttctctctcatttgtcttctgttagattttgaagatgtaactgagtttctggaagaggtcattgaagccttgatattggatgaggaagttagaacatttccasaagtcatgattccagtgtttgatattttattgggccgaataaaagatctagagctctgtcagatccttttgtatgcatatctggatattcttctctatttcactaggcaaaaagatatggcaaaggtaggtctgaaagatgatatgtattcagttgagctagatgtgtaatacatgatgcttccctatcctgaagacactataatactacctataaaataagaaaaagatagcttggttgttgtatcaacttaactgttttgaggccctcccaccccatcaccttatctcaccatgaagatgaataagcagaacttgtcttctcttacaggtttttgtagaatacattcagcccaaggaccctaccaatgggcaaatgtaccagaagaccttgctgggagtaattctgagtatctcctgcttattaaagactccgggtgttgtagaaaatcatggctactttttgaatccatctcgttccagcccccaggagatcaaagtacaggaggccaacatccatcaggtggaactgtttaccagggtatcccagccccctgatcttaaaagagttttctcagaaagcagatacagataaggctgctcaagcctctctgggaaagcaaattgatctagttggcttttacatcacataaataaattaaaactgggcatggtagctcaagcctgtaatcccggcactttgggaggccaaggtgggaggatcgcttgagcccaggagttcaatttgaaaccagcctaggcaacacagtgagacccccatgtctacaaaaaaatacaaaacttaggtgggcatggtggcaagcatctgtagtcccacctactcgggaggctgaggtgggaggatcacttgagcctgggaggtcaagacttcagtaagccatgattgcatcatcacgctccggcctggatgacagaagaagactctgtctcaaaaaaaaaaaatcccctctttgtagcatatgctaagaacagcacgtgtggggtaagaatgagctgctgctactcattaccctttgctgtagcactgctacagctacttctccccaaccctcatttttctcactgagctataactttagctctgaaaatcttttgactgaactctagcttataaacccagtttttcttccttttcgtgtctccacctatgccctctctttgggcttcttcacataaattatagtagaggtctggccaacatgaggcattgaatgattgaattggggatagtttaagtcccctaatcattaatcattacaactctctaaggcaaggcatggcaaactagcagtggccaaatctggcctgccacctgtttttgtaaataaaggtttattgaacatagccatgcgcattagtatatgtattgtttctggtttgaattcatactacagtgatagagttgaataattgctacagacactgtatggcaagtaatgccagaaatccttattgtctagccctttgcagaaaaaatttacagacctgtgctctaataccgtgtaatgccatctgcagttgggcagctgatcagaaaatctcttataagtgcccagaaatatattttaaaatcaaattaggggatgaggcacagagagtgaggggaaagattaggattagcatatttttggaaactgccagttgctaaggtttgggaataaaaactattaggattgtgaaacgttctgtggttgtgttttctggttgaacagttcatggctcagttccacgaaaagatctaccagatgctgaagaacttactccagctctctccagaaaccaaacactgtatcttgtcctggcttggaaactgtttgcatgcaaatgcaggccgcaccaagatttgggccaatcagatgccagaaatctttttccaaatgtatgcctcagatgctttctttctgaatctgggtgctgctctcctgaagctatgccagccattttgcaaacccagatcctctcggctcctcacctttaatcccacatactgtgccctcaaggagttgaatgatgaagaacgaaaaattaaaaatgtacacatgagaggtaggagagaaccaggcttctcaaaactgtgtgtgtgtgtgtgtgtaacgtgtaaagcattcactcccttatcctttttcacagagttcctttctcaaaaaaagatgaggcagaaacgagctatttcgatttttttttctttttttttgagatggagtcttactctgtcactcaggctgtagtgcagtgacgctatcttggctcaccgcaatctctgcctcccgtgttccagcgattctcctgcctcagcctcccgagtagctgggactacaggcacgcgccaccacgcccagctaattttgtgtatttttaatagagacggagtttcaccatgttggccaggatagtctcgatctcttgacctcatgatccatccgcctcagcctctcaaagtgctgggattacaggcgtgagccaccacgcccagccagaatttttaaaagacagatgtttgagagaaaaaaaaaaacacctggtagcttttaaatgttgtactttagtgagaccttctctctggattkggcagccttgcatattcattcattcatagtttataaaaatgaataaagcagagtcctcatcctttttgaactcaggctccagaaggcagatatattaactgataattataatatggtatagggctaagctatgggagcacagaggagggagtaaataatcaattctgcagaagttggaggtcttcatagctgagtcttgagagacaagttaggttttaccaggcaaagaagcaagagggtccctttatacagagagaaaagcaagtgtaaaggtacaaagctatggaaaatcttgactaaggaatggtgagaggctcaatgtggctagggcaaggggtagatggggttgagttggggaggaaatggatcaagggaggaagataggtggggctggattggagaaaacagtacagagaaatgaagagaaaataaatgactcacagtcctaccattcaaagtgaaatcactcttaattttggtatatttcattccagttttataattctaattgtaaacatgataactgctcaaaagcaaataatcaaattcagaaaagcacaaaataaatacaaatgatctattgcctatcacttgaaacaatctatagtagtattccttttaatttttggtgatttcatgaaaaagatttaactgtatttctgtagacggtgagaaaccmaaagatatattcagacmaagaactaatatgacaagatatgtttttaagaagatatcactgctaacagtatggaaattgaatgagtgtaagaggagactggagaccaagacatttaccctcttttttttttttaacttytttgaggtttggacaaagaaacctgtttgatcccagctgtgcaggagccgaagtttccacagaactacaaccttgtaacagagaaccttgctctgacagagtacaccttgtacttgggatttcacaggtaactcctctgatgtcattaggaaaaaacagtttagttgtgttgataactagaaggtagaaattgagtctttggccaggcacagtagctcacatctttaatctcaggattttgggaggccaaggcagaaggattgcttgaggccagaagtttaagaccmccmacctgggcaagaaagtgagacccccatctctaccmaaaaaaaaaaattagccaggcatggtggcatatgcttgtggtcttagctgcttcagaggctgaggcaggaggatkgctctagccgaagagttggaggccacagtgagctatgattgtgcaactgtactccatcctgggtgacagagtgataacctgtttcttaaaaaaaaaagagaggaagagtcttacagatataatctgagcttattctaaaggttcacattagaatctaatagaaaaggggcattgtatgaatttacttgtgtttcatgaatcagctttgtccagattccttaaatttgtttttaacttttatcgttgtcgttgttgttgaaatggattttcgctcttgtcaccttggctggagtacagtggcacattctctgctcactgcaacctccgcctcctgggttcaagcaattcttctgcctcatcctcccaagtagctgggattacaggcatgcaccaccatgcccagctgattttgtatttttttagtagagatggggtttcgctgtgttggccaggctggtctcgaactcctgacctcaggtgatccaccaccttggcctcccaaagtgctgggattacaggcatgagccactgtgcctggcctgttttttaacttttgacctgttaaactttaaaaattaaatcactgtcttcctattgtgatctgggaaagtggaattgttttcattttatattgcactttctgctcttaaattttcattactggccgggtgtggtggctcatgcctgtaatcctttgcactttgggaggccgaggcaggcagatcacttgagcccaggagtttgagaccagcctgggcaacatggcaaaaccccgtctctacaaaatatacaaaaattagctgggcatggtggcgtgtgcctgtagtgtcagctactcacgaggctgaggtgggaggatctcttgagcctgggatgttgagactgcagtgagccgagattgcgccactgcactccagcctgggcaacatagtgaaaccctgtctcaaaaaaaaaaaaaaaaatttcattactactcctggtgataaaagatgaagttcagccgggcgcagtggctcatgcctataatcccagcactttgggaggctgaggcaggcagatcacaaggtcaggagatcaagaccgtcctagctaacatggtgaaaccccgtctctactaaaaatacaaaaaattagcccagcttggtggtacgcgcctgtagtcccagctactcgggaggttgaagaaggagaatcgcttgaacctgggaggcggaggttgcagtgagccgagatggtgtcactgcactccagcctaggcgacagggcgagaatctgtctcaaaaaaaaaaattaattaaaaaaaagaaaaagaccaagttctactctacaratagagacaaaagtggcaaatattaaggaaatgtttataagggagctaatgagatcaataggaccacaaaagacattagataaagaagattctagaaatgttaagattttagaactagaatgtatgacttccaaaaacagttctggttctggctattcattattctgtaatttgttttcctctgatttagctgattatgacaggtataagtagaggragaaaacagcaactcagtcatagaaagggacactaagaatagcaatttttaatgccttctcaagatacctgaattgatgcagagcatttttcaaaactactcagtcaacacattgccggaagaaggaaattatgtctttagagagaaatctccatcatagacattttaaataagacagtagataaaagttcagcatgtgcttaagctgctcagctgcctagattcaaacaaaaaatgaatatcatctagtttcccaatattagctagctcaagacattatctacagggccaaaggaaatgattttggactattatccataactttgaattatgtgtcttcctttcagtagagaatattaggctgaccttttctgaagaataatttaatttaatattgaacaacagagagctggaagctgctcttagattgcatctcaggtggctactagtttatatgtggtcattactaatctagagtcccttttcaccagcttagttttctactaaccaaagaaagactatccatataaccccatcaaagtatgatcattgcatcaaagtatgatcattgcccttgtgtgatgtaaaactatcctgctggccttcttgtactttgcctaataattattttatgtaataacaacccattctacaccctactcaaccaagctgcctttctttggatagtgcatttcaactgaaggctgctatttgcaattagcttcaattatgttgaatacttggcagcattttcccattgctgtgcaccctgcctgtgtcctgtcaaaaacttttgtgagtgccttctgtgtcattgcaactgcaactccctactatccttaaagagaaggctagataaataattgaggatttgtttttttgtgactttctgttttccctgacccagtctcttctgctttcttgggggcaggttgcatgatcagatggtaaaaatcaaccaaaatctgcatcggctgcaggttgcctggcgggatgctcagcaaagttctagccctgctgctgacaatcttcgtgagcagtttgaacgactgatgaccatctatctttctaccaagactgccatgacagagccacaaatgctacaaaactgcctaaacttgcaggtgtccatggctgttctactggttcaactggccataggcaatgagggctcacagccaatagagctaacctttcctttgccagatggctacagctctttggcttatgtgccaggtaagcaggctctcccttgggaatgtcctgtttatagccttctgagtttaagtgggtcactttggaagtttaatcctcaaaataccctttcttcgttatcattcagttgtttttggagaaacaactcaaacttagataatatctactggtcaaagtattaggggactaacagtttgttccctcaaccttgtgtccccctgctatgcatatcagaaaatcatcttcaaaggattaagtgtaatcagagttttcagagctgttagtttctatcattaatatttgttcaacttacacattcatctaactttccctgtcctttttgtagaaaaaaaattagctcctgctggttaactcagaagggaaagagtgtgtgtgtgtgtgtgcgtgtgtgtgtgtgtgtgtgtgtgtgtgtgtgtgtgtgtgtgtcagtgagtcattgaggggtgggcaggtgttgtcaatctaatcaggttatgtgttcttaaccattgtattggccatatcatgctgagtaacagattaccccaaaacatagcagcttaaaactacagactgggtatgatggtgcacgcctgtaatcccagcactttgggaggccgaaacaggatgattacttgagcccaggagttcaagattggcctgggcaacatagagagaccctatctctacaaaaaataaaaaattagccaggcatggtggtgcacacttgtagttccagctactcaggaggctgaagtgagagaatcgcttgagcccaggaagttgaggccacagtgagccataattgcactactgtactccagcctgggtgacagcaggaccctgtctcagaaaataaattaattaattaataaaataacaacaacaactgcaaacagctcactcacctgcattgttctgactcagagttcctcaggaagttatatagccaagctgtcaatcagggccttaggaatctgaggactctgctagggctggaggatccacttacaagcccagtcatgtggttgttgacaggcctcagttgcttgtgctattggccagcagcttcttttctaggccatgtatgtgtcttctaaatactactcatgatatggcagctggcttcccccagagcaagtgaccaaaatggagactgtaagcttttataccctaatcttggaaatgacatactatcacatctgctgtatgcctcagagtttatcttctactctgaaagagtgaatgtgggaggggactgcataaggtcatgaataccaaaaggcaatgatcattggaggaccatcctggagtctggctaccacagtcacctaacatattaatctttattagagagtcctcacacatctgaagggtttaaaccacagttaaccttgagagtaaaaatgtatatattagtatactggtgtgttaacattttgtgtcattactgttcatatatttacttgaataaaaatttaaattgacttacatttaaaggagattttacatttattgacttaacgaccatctctwgtaccaacaaaacatttagggttttttttaaccttcattaagtagggtgaaaggaatttaaatgttgtttattagtacagatatacagatgtttggctaattccagtgaatattttctttttcagaattttttgcagataacctgggtgattttctcatttttctccgccgctttgccgatgacattttggagacatcagcagattccctggagcatgtccttcactttatcaccattttcactggaagcatagaaaggtgaagtgctgaaagcttggttctgtcactgtttaggctgtaaaacattcagaagacttctaaaccaagaaataaacaagcctgaatcataaggggttgccttcagaagttatggtaacattaaggaatcacctgaccatccatatgggtagccagaaatcccactgttgagaggtataataaacaaaggactttgtccacagagaatttaatcctgcatataagtatcttatgggaagtccactgccagtccctggttaaagtagttaacctaatgccagaaacttaacagtggcagccaggtgctaatgatcttctaataattatatgataataaagcttattcttgctattctgagttggatgagcagtaaacttaagtcaatgttatttctcatttcaagttttctcactcatagcttctagtcctcttttccaaaggaagatactgtgacttgtagaattgcttccctgatttttttgatgcataggctaaaggaagtggaaactctgtgtacaaaagtgaagatttgctgcacaatgaagagaatgacccacaattccctgagccgtatcagtgataagtagagagaagccatttcttcactgagctgagcatacctaatgagaagtcataagtcaacaagtattatgcatacactgtatgcgtcatgggtaatgtagcataattatattctagtctttaccctcagaaagcttgaaaaggcaagtttattccacatgaaactgtcagagaataggaagcagtaaataatgcattattacagagaagtaaacaatggctaagcattcaatagaaacttaagtgctcaccgtcatatttggtaagctgtcaactcaagagttaaatgatgtaccctgcatcaccaccccaccccccgcccagccgcaccaagaaactgacaaacttaaaactgcagaagtggatccttttttttcctgtaatatggtttagggtggattttgattcttatgtggagagaacagagtcataaatttggagttaagcttatctgctcatcttgctttttgcccattttgcagaatgaagaatccccacctgagggccaaactagcagaggtgttggaagcagtgatgccccacctggatcagaccccaaatcccttggtatccagtgtgttccaccggaaacgtgtgttctgcaactttcagtatgcaccccaacttgcagaggctctaatcaaggtttttgtggacatcgaatttacaggtaaagcagtcatgaagctgagcccagaactgggaagctgataccagtggagtttcatagtttgatccgtatttggatatcaaagaaatgtcaagccattacttattgaatacctactatatgccaggcttgatgataagtgctttttttttttttttaacattatcccattgtcaccattggaaaagtttcactctattatccctgttttatttattttttattttttaattattcttgttttacatatgaagacatgactgcccaaaagatcagtttgtccatgtcataacaaactaccaagtggtagaatcaggtctgtgtcacctaaagaaatctacatattcaacacccttattatgttgcatcatcaaatcagactcaaattagactatttgggtctttatatttctctgccttaaaattacagaatagtgcataaagaggcagtgtattggttgagagattcttttatcttaaccagactatctaactctccaacagtctaatggttcgattaaaaataccagcaggcggacaggcacagtggctcatgcttgtaatcccagcgttttgggaggccaaagtaggcagatcacttgagctcctgagtttgagaccagcctggccaacatggtgaaacccattctctacaaaaatacaaaaattacccaggcatggtggcaggtgcctgtaatcccagctacttaggaggcagaggcacgagaattgcttgaattcgggaggcagaggtggcagtgagctgagatcgcaccactccagcctggatgacagagcaagaaatccctctcaaaaaaaaaaaaaaaaaaaaaaaaccagcaggcaacattccctctctatctaaccctgagcccctgtgtttgtttaaacagtaccctgtctcaatcagtaaataagatatgttaagaagttgttgaagaccattttttaaagggatatctaccatccaatgataaatacaactaacatttaaagaggcatttaacattttactggccgcctttccatatttggattctggttttttttaattcgctcacctatcaaccttagtttcctcatctataaaatgggtcaaagtgatgattaagtgaaataatgcatgtaaatctttataatacataagaaattgtataataaatcattgcagttatctcgttatgtgaccatacaaccaaagtgttgtaatggagtacaatttctgttttatttctgaggaagtggaagctgaagaagattaagagacttagattaagcagagccagaatgaaaacgtaggtcttttgactccaaatcctacactcttcctttattatgacccagcctgtggagctctagtaatacctttggtatktsaaaagcagtataagcctcagatttttagctcctgacctgatttttcagagtaatcaagaacctgttggctacacagtttgggatattgtctgtgaagaatgtgggaattgcttagtgtcccgtcctgcacatggctttcactgccataatggccagccctgagccctcatttaaagcctgagaagtactcatgtttggatatggaaacatttgtttcccttaacttttattttacagcttggtacttgtctcttgcagagtaaggtatcctttatctctgtctcccccttacttcatcagtaaggaaatgagcaaacacttggcgataactctaggcctttagaaactccagggcagattttgttagtagccttaacacactcaaaagcaaatgactacaaagcaaatgrctacacataagcataaactcttcctcttatggcaccgcctttgctgatatttcgctcttgccttactccaggagacccccatcaatttgaacagaagtttaattaccgccgtcccatgtatcctatcctaagatacatgtgggggacagatacctatcgggagagcattaaggtgagagagtttttgatgaaacctgttgctttatataagccctaatgagttgtaattcagtactaaaatggttttcttgtgggctgggacttacaggatttggctgactatgcctctaagaatttagaagccatgaatcccccacttttcctccgctttcttaacctgctaatgaatgatgccatcttccttttggatgaagccatacaggtaaaaaaaaaaaaaaaaaaaaaratttaacttctccataccatcaaatcatcagcagtacatacattttaccttttaatcataatagagcagtccttatgcccctagtaccagacttgaacaccaaaaatttgtgattagtagtgtaccaccaagcttgtcattatagagctttctagttcattccattagagaccaagatcaagggtcattgaagcatcatgagatggacattttggcagagtcaaaaataccatatggtgaagccaaactaagttgtactggcaggagtaattcatcaggccagcactacagaaagaaatcagaggagcttgcttttggtcagtgactttcaacccttttaatcccaacatgtcagtaaaatatctcactaagacagtgatttttaacccactttcctaaaagattctgatttttgcaccactacttgaaagaaaatctctgatttgggttattttttcatataaaggctccaagttgtcaatacttctcatatttccactgccttctaaattcttagctatatggtgaaacaaaggtttcacaaagtataaaatgcagctgggtgcctctcagctccttcagtgtattatttccttaaccttccctggkggaactgcttacttctcccataaaaacttggctgtctgtagagcaaaacttcccttacctgtgatgggtataggatggacaaggcactgacctaaagggagatgaagcaggtaaatcctgagggtagcctttagacagtcatgagctcctccttatgatcagcaatcccctgagtagcttgtgtttaatttgtgagaaaggtttgatctgatttcttcataatcctacgctttaggatttaagataggttttcttcaaaagcgagaataggtcctgttacaaacaggcccttttaagcaagaggtgtgtgacacaaagcatgaagcagatggtattttcatgagactgtaagtttaacaagttgtttgctacaacaggaaggatgacgtgaggtagagagttttaaataattatggttcttccacgcatcttgcatatgtgatagagctttgatttttttgtaagcaatttggcaggggggatttgttttcatctttcaggaaggattcattgttttttcactatagtgtggggttttttagttttttgtttcttggcctgggtttcatatattaaactattcatccttctttgcatttcacaatgctatactatttctaggggaattacctgtgaatctacccaagctgaaacaaatctgtatgaagccacaatttctttttttcctgaaagttcttttgagcttcagccttatgctgagaaataaaggctcatgtcttttacatggtccctcgttttcccagcttagttgactggattttgaataggacctcttaaatgtcacgtcccttcaactgcacctttcttctctgatatatcccatctctggtttctgcagtatttgagcaagataaagattcagcaaattgagaaggatcgaggtgaatgggatagtctgactccagaagcccgccgagaaaaggaggctggcctacagatgtttggacagctggcacgtttccataacatcatgtccaatgaaacaatyggtacccttgcctttctcacatcaggtaaggacatgaagtactgcttccccccaaaaaagtaatggccaagatcagcttcacttgggggatcagcccagctgaaactaagaattcagaccctggtgacagtatcctccacatctggaagggaaacgaatcacttgagaagcttcaaaaagaatgatgatgcccattgttgacatggaagtgaggaaatggtcaccctcacacagctgccagagagcataaggtggtaaaatctttcttgaggacaagttagccatataaatatatgtgtgtctgtacacacacatatatacatatatgtttgttaatctgagaaatacgcttgaatcctggttaaatatggtggatctaacagaaatttatctctactccttctatagctccactgtccaattcagtagccacttgcaacgtgtggctttcaaggatttaaaatgtagctggtctgaattgagatgtgctataagtacaagacttagtgttaaaatgtgaaatctgtccatttttatactgattacatactgaaattatcatttttaatgtctcagctaaatgtgatatgacaatcagtaatcaccagacatttgaggaaatcctctaatgtgaaaaacaaataggtgaaaactttgtaaaaactttttaaaaaaactttttaatctcagagggataagagaagatacagcagccacaaaacaagaacaaagaggcaatgaaagagattatttraagaataagaaagagcccttggatattgaaatttttacctcggaaatgttaaatattcagtaaaggagttagaagatataaattcaaggaactcttctatgaacgtagaacagaaggaaaaagatggaaattagaagagaaaggataagaaaacaaaaggatggatctaggaagtctcaaaagcgaaaaatggaggggaggaagttatcaaagataccaaaaaatccccaagactcaaagacagcctctaaattgaaagggcttgccaaggcccctgcacagagaattttttaaaacccacagtgaggtatgacattgtgaaattttaggaaatcatggtaaaaacaagaccctaaaatagcccagagaagtcaggtaatgttaccatagtttaagtatcaaaatggctttgcacttccaacagtgtcatttgaagctgagacacatttctgagggaaagtaaacctaggaggaggaaggtggaattcaacacaagggagacgcaaaggagattcccaggatgacggtgaaaggagcttgtgtggccactacatagcaggcctgtagagcaagcagtccaggttggagcaaaggatggaaacatccagaaagaatgtttccaaaaattaatcagcagctggaaatgaccatgttgagagttttaaattccaatggagagtttggaaaggatttagtgataagaggctctgaaaataagcaaataagcaaaaagttatactaaaaaggaactatatactcattaggacagcacatggctctgctgtgaataatatttacataatcttaataacaaactaaattatttaagcaaaaatttgactatatattgagggcatctgtgataatgactaaaactgaaaaatcaagaactatcagtaccaaccaaacatagcattatgatactgtctgacttgttaaatttggcatgtataaattttttttaatttttggaattcatgccctataacatagcagttccttacagatttgttaagaagaagcgataggccaggcacggtggctcacgcctgtaatcccagcactttgggaggtcgaggcaagcagatcacaaggtcaggagttcgagaccagcctggccaacatagtgaaaccccgtctatactaaaattacagaaattagccaggtgtggtggcatgtgcctgtagtcccagctgcttgagagactgaggtaggagaatcacttgaacttaggaggcggaggttgcagtgagcagagatcacgccactgcgctccagcctaggcaacagaatgagactctatctcaaaaaaaaaaaaaagaagcgatgagtctacaagatgtatccacaatgaagttcattgataagtgtaggaaaaaactgaaaatagtaaaaatgtccaccagtaaagacattaaataaataacttatggtgcagttacaactggaaaagtcagccattaaaaatgatgtaaaacagactgggtacagtggctcacacctgtaatctcagcactttgggaggccaaggcaggaggatcacttgagcccaggaagttgagactgccttgaaccatgatcgtgccactgcactgcagcctaggcaccagcaagaccctgtctcaaaaaaataaaaaataatttttttaaaaaatgatgtaaaacagctgggcacagtggctcacgcctgtaatcctctaaccctttggaagccgaggcaggaggatcactttgagcccaggagtttgagaccagcctgggcaatatagtgagaccccatctcattttttaaaaagattatgtgaatcacccctattctatagaactttctgtgatggtgaaaatgtcctataaatctgggctgtccagaaccatacttaactagccacatgtggctagtgtgactgaggaatggattttttattttttattttaatagccacatatggccagtggctactatgttggatagcacagggacatacacttactaaaatgataaagtatttgcaatatagttactgaaaacagtaagtttcagaatatgtaaaatatgatcatttttgtttaaaaaatgtctgtgtgtgtgtaaataaggacagaaaagctagaaggacmaaatgttaaattagcaagatgttaacagtgtttatctctggatggtagtttttgtcttttctgttttktgtttggttttggttttttgcttgtctatattttctgcagtgaaaatgaattacttagttttttaaaaaagtagttccttcaaaatgtttagaaataaaataacagtagttcccagaggtctccaaataaactatacctaataaggaaaagagtgctaatggattgagttttcagagactttggattcttttccagagatcaagtcactctttgtgcatcccttcctggctgagcgcatcatctccatgttgaactacttcctgcaacacctggttggccccaagatgggtgccttaaaagtcaaggacttcagcgaatttgacttcaaaccccagcagcttgtatcagatatctgcactatctacttaaatcttgggtacctgagattgaaatctgtcaagccagaggggatgctgttttgatttagggttttgatagtagaatgactggttggtaattatgtgaaaatagaaaagaaatggttaattcctagttgcttgatgaaggaatcttctgtagttttaaataaggagattttatctgggcaaggtgtcgtgtgcctgtggtccaagctacttgggaggctgaagtgggaggattgcttaaggccaggagtttgagaccagcctgggcaacacagcaggactctgtctctaaaaactagtaagattttgtgtgacccatgggacattgagatttccagtattctgctttgatctgtgcaaagagaaactttactggttgtaccactgtttagaaaagtagcattcttttaaggtcacatgatacttgatagacttcctagaaagtctttctgtatcaaaaagtatatatattaaatatataatatatttaatatatattatttataatttattattatattttatataatataattttatataattataataaaatatatattatattttattattataaataataaataataaaataatatttatatattataaataatatatattgaaataagtctttctatatcaaaagaatgttcatggcttttaagtggtgagaatgcttgttctgcagcctacctattgtctcttccattgaccaaccctctggtgatcagtttttttctgatgctaatgttccagggatgaggagaatttctgtgccactgtgcccaaggatggacgttcctattccccaactctctttgcacagacagttcgagtcttgaagaaaataaataagcctgggaatatgattatggctttcagcaacttggcagagagaatcaaggtgaggaagaggaggaattgtttgctgatttcattaagaaccacgttgtcagccaggcatgatggctcaagcctgtagtcccagctacttaagagcctaaggctagaggatcacttaagcccaggagtttgaagctgcagtgtgctatgatcatgcctgtggatagccactacactccagccttggcaagatagcaagaccccatctcctaaaaatmcatgcaaaaaaaatcagattgtcacctcagctgtgctgatttttactctatttcagggagaaaaagagcattaccaagagaaaatataaacagatggttctttttggacagtcacttagaactacaatattcttagttttattcttgtcaacatgagagtgagaatagaaatttaagaaatcggctgggtacagtagtggctcatgcttgtaatcccagcattttgggaagccagggtgggcagatcacttgaggtcaggagttcaacaccagcctggccagcatggtgaaaccctgtctctactaaaaatacaaaaattagctgggtgtggtggcaggcgcctgtaatcccagctactcgggaggctgaggcaggagaatcgcttgaacctgggaggcggaggttgcagtgatcgcaaccactgcactccagcctgggcaacagagcgagattccatctcaaaaaaaaaaaaagaaaaaagaaatttaagggccaggcgcggtggctcacgcctgtaatcctagcactttgggaggtcgaggcgggcagatcacaaggtcaggagatagcgaccatcctggctaacacggtgaaaccccatctctactaaaaatacaaaaaattagccgggcgtggtggcaggcacctgtagtcccagctactcaggagactgaggcaggagaatggcgtgaacccaggaagcagagcttgcagtgagccaagatagtgccactgcactcccgcctgggcaaaagagcgagactccatctcaaaaaagaaaaaaaaaaaaatttaagaaacctcaactagaagagaagaatgtgcacatttatgtaagatgtttttatgaaaacgtttatgcacagtgttaccmatagattttaaaagctagggtgttaatgcagaataactttttagaaaaaaaaaaagatgagtagttttcagtcattaatttttatttggattgtctctatgtttgtagttggtagttggcttttattggaatatgcatacattttaaagattaaaatactatattgtatttagctaaatccctttggttagagtatgacagagctctattagcaggtaagaagaaggaagatcatggcacaaaagtctaatagaaaaccttccttattgctgtcagtcttccctctattgagtttcttttttattgagttggacttcatctttgtttagagcttagccaggtggatccctgaggaactcaagttgtgaaggaattaaatgtcaaaatgactttaaaattcctatacctgtttgtatcaaaaatcaaaaactgcttttcatacgcaggctgcatgagtgactctaattatgcaaataataccctcctccattctcccttctccatccacttttgaattatggcatttacaacagaactgttgccagatggatgttrtatctgatgtatttcttttcctcctaacatttaaacccatttccagtatgactgccagcagctgagccaacctaaaggtccagagttggggctcaatgcttaatttgttcttagaatatcttggcttgtttttgagaaaatgaagctcacgtgtgtcactgtcactgtcaagggttattaatgacctgtttttttatttttgagatggagtcttgctctgtsattgagcacgctgaattcagctacactgtgaattcactttaactaccagatgttgtatactcagtctcttgcagacctccaacaacaggaagaggaaacctatgcagatgcctgtgatgagttcctggatcccattatgagcacactgatgtgtgaccctgtggtgctgccatcttccagagtcactgtggatagatccaccattgcaagacatttgctcaggtaggccagtcccaaaaacagactcaagagcatatatatatattagtttgctatctttttctcccaggcacctaagacagtactttgcacccaacacataccacatattattgatttactgatatgttggaagacattttggtttcaattgctaggatataaacatttcaaaacaaaacattctgttgagaaatgctaactctaacctcacctcttcctgccttaagaaaataatttctggccgggtgcagtggctcatgcctgtaatcccagcactttgggaggccgaggcaggtggatcacttgaggtcaggagtttgagaccagcctggccaacatggtaaaaccccgtctctactaaaatacaaaaaattagaggggcatggtggtgcgcacatgtagtctgagctactcaggaggctgaggcagaagaattgcttgaacccaggaggcagaggttgcaatgagccgagatcgcaccactgcactccagcctgggctcaggtgatcctcctacctcagcctctggagtaactgggactacaggcatgcactaacacgcccaactaatttttgtattttttgtagagacagggtttcaccatgttgcccaggctggtcttgaactcctgggttcaagcgatccaaccgcctcagcctcccaaagtactgggattacgggtgtgagccactgtgcctggcctgtttttttatttttgcgacagagtctcgctctgtcaccaaggctagagtgcagtggcgcgatctcagctcactgcaagctccgcctcccaggatcaagtgattcttcagcctcagcctcccgaatagctgagactacaggtgagcaccaccacatctggctaatttttgtatttgtaatagagatgaggtttcaccatattggccaggctggtcttaaactcctgatttcaagtgatcctcccacctcagcctcccaaagtgctgggattataggcatgagccacctcacccagcctgctttttctaattcaggttttacactatattcaccatgtggattaactcacgttctgttgctgttgttgtatcagctgtggtaaccatgaactttccccagcctgcctattcttcggacagtctgccccattataactatagaaaagacaggaatgaagcaataaatggtagcttattagctgcttaatgggccccttaactttttttagtccggcattagaaagaaatgagtactgagagactctgcctatttatatatttatttatctatttttttgagacagggtcttgctctgtcaccaggctggagtgcagtggcatgatctcagcttactgtggcctcaccctcccaggctcaagcaaccctcccatctcagcctcaccaagtaactgggaccacaggccatgcaccactgttcctggcttatttatttttgtattttttgtagagaaggggtctctccatgttacccaggccagtctcaaactcctgggctcaagcagtccactcacatcagcctcccaaagtgctgggattacaggcatagccaccttgtttggcctctccatatttaaaattaagttatatcgagccaggcacagtggctcacgtctgtaatcccagcactttgggaggctgaagcaggtggatcacttgagatcaggagttcgagaccagcctggccaacatggtgaaaccccgtctctactaaaaatacaaaaattagccgggagtggtgacacatgcctgttgtaatcccagctatttgggaggctgaggcaggagaatcactggaacctgggaggcagaggttgcagtgagccaagatcacaccaccgcactccagtctgggtgacagagcgagactcgtctcaaaaaaaaaaaaaaaattaagttatatctctacaaaaaattatttttaattagccaagtataatggcacatgcctgtagtcctagctactcaggaggctgaggcagatcgcttgagcacaggaattcaaggctgcactgagttatgatggcagcactgcactcctgcctgggcagcagagcaagacaccgtctctaaataaacagatagatacatgtggtatactttgacccaaagttaaggaaatttttaaatattaaaaagatgaatttttggccaggtgcagtggcttacgcctgtaatcccagcactttgggaggccaaggcaggtggatcaccctgaggtcaggagtttaagaccagcctggtcaacatggtgaaaccccatctctactaaaaatacaaaaattagctgggcatgatagcacgtgcctgtagtcccagctactcgggaggctgaggcaggagaatcccttgatcctgggaggcaaaggttgcagtcagccaagatcacgccactgcaactccagccagggcaacagaacaagactccatctcagaaaaaaaaaaaaaaaagaattttctacctcttggtatttggtattaagcattcactatatcgctcgaaatgtggcccaacaaaaattcataacgtttcttaaaacattacaagaacttatgtataggccaagacagttcttccaatgtggcctgggaagccaaaagattgacatctgtcataaaccttcttatgtttcaagaaaccataatctgcatgtacttgcataacaatcagctgactaaatcaaatgttggtctacaaggctttattccttaacatctcatactgttctaagaatctgtcactataattacaaatagttctttacactgacatgaatgtatagtgtctctgccttagagaaatctaaaggtgacagaagcatagcattttttaagccactgtaattaaatatcatctgaacagcagtgttgagacaaagtttattaagaaatagaggccaggtgggtggctcacgcctgtaatcccagcgcactttgggaggccaaggctggtggatcacttgaggccaggagtttgagagcagcctggccaacatggtgaaactctgtttctactgaaaatacaaaaattagctgagtgtcatggtgcaggcctgtaatcccagctacttgggaggctgaggtcagagaatagctttcacccaggaggcagaggttgcagtgagcagagataacgccactgcactccatcctgggtgccactgcaccagcctgggcgacagggcaagactgtctccmaaaaaaaaaaaaaaagaaagaaagaaatagacaaagtagctacaaaaactcctgaatcatcttgttctcactctttctaaccccaactcggcatttgactcaaagttataatgcactctggcttcattcttaagatgcgacgcccaggtgttctgtktttggcttagaatgtkagaacttatggaaataaccctatttccctttctctctttgtcccagwgaccaaacagatccctttaaccgtagtcccctcaccatggaccagatccggccaaacacagaactaaaagaaaaaatccaacggtggcttgcagagaggaaacaacaaaaggagcaacttgaatagatactgtgaactaaccaaaccaaaaccaaccccrgagtgcagataaacaattgtttgtggtttctctctttctggttctgttccttttytttcttcttttytttttyttttttttttttttttttactaaattagagaactgctcttgctgaaattatgatagttaagattcctaagaacttgacaatgctcccctggcttgcaggaaattatacttattatagcatcaccaagtttagaaatcatcactaattttcaccctctgttgtctcttcatattcttcttccttttcctaaatgaaattatattatttcaactactaaaacttcccgccaccctgctatttctcttccaattactgttcaaacatttttggtgagtgctgcttttataaatatgtgatgtcacatatttcagtgacagctgatgttatcagaaaaatcctgttatcctgtgtatttactagtcctcatgatctagacttaaccccttttctgtgttacagagtaacttcacataaaagcagatacctttaagtttgtgtagacttctgaataagatgatagacgagaattttttttaaaaaaggaatttaaaggaatcttgtgcaacttctgttgatagctcttaattttgttatacagtctttttaatgaggattggtagggcaatcctaccaattgatgggggtgaggagactgttgggcccttattctcttatgaaaatctgtttctacaaggactaggcctaagtagatttaggcaacgggtatcatatccatgaaaaatgtcattttaagacactaatatcaacagtatatctcagtgtgtgagatatataaatacacatacaccccatgtgcttttttgttggtttagtgtaaactgagtaccactttatattttctcttccatagtgagatgtatgcagtatgtggccatgtttactaacatactcattcttcacaaaattctgagattataaaatgtatatagttaatatttgtttgagcttgtgacctgacttctaagagctacttctaacacagccttaggtcttcaattaacaaagtaggaagttgagcacaaccttgtccacagccattttaaatatccacttagccctgtgtagttggtaggtggacaccactttcataagtgaacttgagctcactactcaattgtgcagcttaatatgctgactagggacattcccctatggattatctttatatcactgtctttctaagcccagagatgtcataagtgacaagaaaagtgataggatcaagaaatgggtgtcactgcttcatttggaacatgttattaactatggtctctttcaaataaatagtagttttatatttcaacacaagttgctataagcagtccttgatgggtttttgattgcatcagctggaaagcctcaaatctaagagggcttcccatcctasatataaaataggtgttgcctattgctgtgcttataaaatgaaaaaggaaattgaggacacttttgcaaatgccagaatgtaagattcattcagtgtgctccctgggcctttatggcatgggttgacaggatttgtttattttctaaaattagcttcattcaatatttatcatcctcctttccctctctgagaatgaactatgtataaaataagcttctgcctatttgcatttatcttccaaacccaatctagtaggatgttctcattttaaaaacgaggggaaaagaccagagtttttcaggagaaaactggaggaaaatgggcacaaaaactcagaaggcagctattcccagcagcttcctagttaacaacccccatgctgcctccagtctttgtctgtattcttctgtatttaaccttcagattgtaagccttttctggcaagcttttcttctttttttaaactcttttcctgaaactttttatgaatggctatggcaccattaatgctgctgaatatctttaaactctgcacaagcaagtgtgtagcttaaggccactactggtaaggaaaccaagtgtcctctgtgccttttttctttctgtgaagtaatttaagaatatccaaaaaaattagactttaaaaagttatcttggtacaacaccgtgtgtatatacacttggaagcttaaaaaggtgttttgtctggaacttagaagcagctctaaatctagtagagcagactttctaacatacctagttttgtgtattggctttgctggagtatgatagcaaaatgaagactcttttactcagctctggtattgctcataacttaccaagaggctaatactaaacttggaaaattgtttaagtatgttttatcaagcagtctgggttttgttttttaatatactttttaatggatatgtgaaaactgaaggaaatgttaaaggttttttaatggtgcaagtgaaggtgccagttgctatttgatatcacactctacaaaagcttcattactttatttgatggtggttgctaagcagccattgcacagagcataagtctactgggtgcctttacatgccagaggctgatgctgcactgttgatgtcatgtgaggaaataatgcacatgctctaactgctcaacaggaaatgaacctagaaacagaaaatgaaaaggttgattgaaataaaacttgatcaacgcgactgtattttgaaacattccaggaaggttacttcttgtcaaacttgcctggcagtgtttgttcaaaacttgtatttaataaatgaacatctgacttacaacctttgttatcactttattccagtattaaaagctagtggcagtttcagaaatccccctgaaaacttagaggattctgacgtttcactttttttttaggtaagtaacatcaaatatgtgtgacctggctgacccagcctgccttaccaggcctctggaggggaccctggggttaccctcaggagatgaatctcacagtatggttttcctaaccagctctcttttggcttcactgtttttctttatctggcctgaaccccaggtctttgtaatcatttgctgttatcttcccctttcttgctccttgtttccatacccctgccatgcaagatgtcagcctagattaactcagccattcccctctgctgtaatatccaaactgcagaccattgttggaggaaaaacacaatttttagaatggtacaaccacaaacttatctctaacgttgcccaacaacccttctgtgtgtccttcagctattccaaactttggcctccttcctcaaattccttctcatacccccctcccattgacccctcacagtccgatgactttgccttcattttgctgggaagataaagacttcagagactttgaagactttcagacctctctcccataatcacatctgtggaaaaggccccatagatccctggctagttctcttttcctgcctcatcagggctcttgtcaatatccctttttatcaggcaggatggcctgtgcctgtaatcccagagctaagcaagaggctgaagtgggatgatctcttgaggccaggagtttcaggccagcctgggcaatgtggcaagaccccatctctaaataaataaatgactgcctcttctctgtcttcaatttctcccctgagttccacatccccctttggttttctgacttgtaatcctttacagccatatttcttcaccattcaccctggattctatcctaattttttgaaaaggcgctagttagttaaagattgccatattgctaaattaactttcccatccttaatttgacttttctgcagtatctagggcagcagaatcactccttcattgaaaagttcttagttccttgattacacttctaatttttctttccatctctctaaccattccaaaaatcggagatttacttctgctcagacttccccaggttacattacttatagttctgttcctctcatcaaatgccacttccctacatacatcttttcctcctcatattaaactatgaagtttcagccctctgtagtatacagctgttctcttacacatcggctcaaggatcttttctaggaagtatgctgaaatcagcaccatgcctaatctgatggaatgccccctctctgagtatacattgcaacttcagatctcaactctgccacttccaaactgtgtggccatttttcaagcccagtctcaatggggacaatgccttacaggctttctttaaattccaaaatgcctggcatagtgtgggcgttcaatacaggtgattttttcctcacatctgcacagctccttgtggttaactagggaattaggggaaatggattccaatcgtgatacagcactttggggagattgggattacaaaaaatcaactttaaaagggctatggggccaggcgcggtgattcacgcctgtaatcccagcaccaaggcgggtggatcacttgaagctaggagttcgagaccagcctggccaacatggtgaaacaccgtctctactaaaagtacaaaaattagccaggcgtggtggcgggcgcctgtagtcccatctactagggagactgaggcacaacaatcgctggaacccgggggacagaggttgcagtgagccgaagtcgtgccactgcacttcagcctgggcgacagagcgagactgtctcaaataaaaagggctatgggttgagcctggtgacagcctgtgtggtgattgctcggcccctaactttatatgtttggccttggaccctctctacctctgtacaacgatcgtgttggactagaagaatctcagcgaatccttctccagtactgacttcaaaggttctcagaatcgcggcgaaagcaccctacgcaaaatagcggaggtcggcgccaagaaaagcactgcaggttcagggcgcatgcgcatttccgctccttgccggttttccggacctctacgagtggctgccccacaaaatgcctgcttctctgcggaatcctactgttcttcacatgctctctaataccatcttttcatatccactttctcttccatgttgaaaaattaaattgacaggctggattctgcaaagatctttggacatttaagtatcttcgaccggcgcgaaaagaggcggcctgaccttggaagtgggacggggtcctgcagcgggtccttccggcgggtgacattcagccggcggttcggggcgacggactctccattccagaaccatggcccaatttgtccgtaaccttgtggagaagaccccggcgctggtgaacggtgagcgcgatgtgagaccgcsgaggcgggcacacgggcggcagggaggcctgcgatggcctgagaggaagaagcgggctgcgaasacccgaggggcctgcgggtgccggggcgggatggcctgcaggtggagggagcaggaagcaggttggcgactcttttctagccttccactcgtctgacctgcagattgggttctctacacaacctagaagttcctgaattctaaccacgactgggaagagaggtagtgtgaaggaagcccggcgttgcccggcagctgcaaccattacgccccctgagatcgctaagagcagggatctagaggggatggttctgttaggagagctaagaaaaggaagggcagaaacgtgaaagtaaatcaattcggcctcattacatgtgktgttgttctcagtggagtatttggaagtcaacagaaatgtttaaggatgggtgagcttttttgaacgttgactttgctttctgtcctagacggattctragatacttccgctttaatccgagggraattttaggtggaaatggacttcatggatgagtatccatgccccgagaagcataggacgggatccgtataaacaataatctttgttacgaagcttagcattcgtggaattttttcagcttgaagagcctcactggtagaccgctgtatttcacaacaaccctgaataatcacagcctctgagtactagtttatttggccagtaaatatttcagttgtcttctcagtggcaagctattcattttattcctgaagtgagataagctaaattgacgtaagtttttcctagatgtgctgtattccagtaagtgactgaaggtcggatctcttaacttttgcctacgtttatgaaatgtgaatagaaagcagaacttcaaaaaaaatgtaatactttctagcctattttgctgtgtttgagtttggtttgggtattttytttttctttctttctttttttttttttttttycctagaagacagggactcactctgtcgcccaggctggagtgcagtgcagatcacagctcactgcagcctccacctcctaggctcaagcgatcctcccacctcagcctcctgagtagctgggatcacaggcacgcaccaccacacccagctaatttttgtatgttttaagagacgggatttcaccatgttgcccaggctagtctcttaactcctgggctcaagggatcctcccgcctcggtctcctaaagtgccagagttacaggtgtgagccacagcgccagccgggtaatttatccattctctcctcccttccctccatcaccagccaaactatgagttattgaaggctgtcctgcagaacctcacagcctactagtgaaacattttacacattttcccaaataatttcataagcttgcaagaaaatcttttactttactaagattgttaagatacctgtcatagagctctacaattttatataaatcaaaagagatggccctgcggcggtagcttacgcctgtaatctcagcactttgggaggccaaggcgggcagatcacttgagggcaggagttcgagaccagcctggccaacatagtgaaaccccatctctacaaaaaatacaaaaattaggcaggcttggtggtgcatgtctgtaatcgcagctacttgggaggctgaggcaggagaatcgcttgaaccccggaggcggaggttgcagtgagtcaggattgcaccactgcattccagcctgggcgacgaagcgaggctaggtctcaaaaaaaaaaaataataatgctggacactgtggctcacgcctgtaatcccagcacttkgggaggccaaggcaggtggattacctgaggtcaggagttagacaccagcctcactaatatggtgaaacctcgtctctactaaaacagaaattagccgggcatggtggcaggcgcctataatcccagctactcgggragctgaggcaggaaaatctytttaacccaggaggcggaggttgcagtgagccaagattgcgccactgcactccagcctggcgacagagcgagactccgtctaaaaaaaaaaaaaaaaaaaactaaagagaaaaaaggattagaggcttcactctggactttgtgggtgatttaaggcacaattcttaatatttcaagtggattttttttctggtgtggctttcacattttttaggtggcgcatattaaggaattgcaaactaatttttgtgatctaaaaagaaaagtaacaccaaggtaatttttttgttatgaaatatataatatgaacccttccctccgttgtaaataattgaaagataacttgttattcttccaaaagtacttagaaaggaggactcaactgggctggaatgttaacgtggaaatacattttgctttataacatacataggctagtgtattaaatgtgaatgttaaatatttaataaaaattactgactatatctgttaattcccctgggggtcaaaaaagcttatggaaataagtaaatttatcatcaggtttgcctaggaagatcatagaatctgatttttttttcccttaactgtagactttatttgtatttcaatagtttttccaataatctttcagttccgggatccaatccagtgtaccacattgcatttagtttctatgtcttcccaatctcctctggtctgggacagtttcccagtcttccctcatctttcctgaccttgacagttttaaggtatctaggtatcttgtctgtctaggtatctgtcttgtcaaagtatctgtctaggtatcctgaagaatttcctcaatctggatttgtctggtgtttttctcatgcttagtttggcactatggattttgaggaaataccacagtgaagagatgccctaatcacatgtcaggaggtatatgatattcctgtgacatctctggtgatacaagctttcatcacttggttataggttcctctactgtaaagttactgtttttctctccgtgttctattctatagaagcaaataactaagcctatcccataaaggcaaggtgtgattacagtggggggattccatcccctgtaggagggaatatctacataaatagaatttttctgtgagaaagatttgtctcttctccatttatttatccagtcacttattgtatggacttgtacattgatttcatactttctgtatcaaatactgtattattgctcaaattatttcagccttggctatttgggagctctttcaggttagcacctctgtccctttgacataccgcctccctttctgatactacaagatgcttcagatttatattgtattttccctgtcccagccctagaatcagccatttctccaaggaaccttagttccttttattggacaatagaattgagaaactaaggtctgggtgctgtttatgttccttgctaccagaatatcactacttctaggtcctctcatttgacaggaatatagatatgtatcagtatagatgtgtgtatgtgtawatacawgcatactaagccatgtawatacatgcatatatrtatawataattatttctgtgtctgtcagtctgtgtatatattaagctaaacctgagtccaactctaacccagtactgtgggatttattcttgctgcttttcttgtttacctgtaacatsactcaacctccactgagaaatctagctcccattatctaccattcattatgttttatctcttgtatacatgtaaagcagtttcaaactctaacctgtatcccctaagaaacaaatttaccacctaaaataytgtttatgtacagtatactgattcattttttttttaaggatgaaatgtctgtgtgttggagataatattgacaattgattgacttatacaagattgtgctttttttttattgtcccatctttcaggcattggcagttctgtttggaactatctcttagagctttgtgtctgcttaaaggtatgcccatatccccaaacacagaagatgagggagatagtaattcagaaatactcaaatggaggccrttaatatgaggaaaacaccaagagccttgggtaatctgtctttgaacagtagacactttatgggctttcatgctatttttattacgtttctcttgtaatttttgaaacagagtctcattctgtcccccagactggaatgtcatggtgagatcttggctcactgcaacctctggctcccgtgttcaagcaattcttgtgcctcggcctcccgagtagctgggactaccggcacacaccaccatgcccagctaatttttgtagttttagtagagacagggtttcaccatgctgggcaggctggtctcaaattcctggccacaagtgatctgcccgcctcagcctcccaaagtgctgggtttacaggcatgaccactgcacttagcctctcttataattttttaaataaaaaatgtcttcctctttctgaaatcactactgcagtctcacaactaccctggttgttaatgatctcttctcttgaaatagtaaataccttgaggaattccagcttggtaatagattctagttttggctcttcttaactatacatgtagattttacttttattatttgtggtgcctttaaaagaggagcagctgtgcttttgtcagagaaacatttaatccagcacatattgatgaggataccaaaatgggtaccagttgttttaattccatctggatttgtggataatattatgataacttttcatcttgttcttaagagtgccattctaaatccttcatccctttcttcacctctttcttcaaatttgctggtctctctccaagaaaatatgaataaattgactgttctcttgtttttaaatccaattcctagcatctttacagttagctagatttgccattcataaatgaagtacagtactagctggccactagtgaagtactggcataattgaatgtgcttatagcatcctgcctgattgaacatccctgtggcacaggtgttctgcatctttaaaagcctcttgttaccagggagcagctttgacttttcacaccgggtgcacatttggtacaagcagtgaatgaaggtgatgcatgaataaatatttgtgtccagcccacacatctgcttctttcggtctctagtgagttcatcctggttttttgttttgttktgttttgttttccagctgctgtgacttactcgaagcctcgattggccacattttggtactacgccaaggttgagctggttcctcccacccctgctgagatccctagagctattcagagcctgaaaaaaatagtcaatagtgctcaractggtagcttcaaacagctcacagttaaggtaaccacgggctaaatgaaaacggatgtgcataacagaaaatgtcttcccttgggatttttctgattgttttgattaatatatatgtttccaatgaggctgaatccagcataatgaggaaaaaaattttgactgctgaggaagatacttacttttctaattttgtcacctgggtagaaataattagcccattttatgtcttagtttcctaagagtcttaaacctagcaaaaaagtgaccatttttattgggaawttttttttcctttcctatattagatagtatactaaaatatgatggcttgctttgctgagtctgtacttttttcatctggagtcctgagattgtccccaattcagccaaaacatctcttgaactatgtcacagtcaggaagctaacacttcttatatataagataaaaataccaaactgggttattgaattgtgtgaagataaaatctaaaaactgtaagaattagaacttgcagccatacgcagtcacttcctgcctgtaatcccagtactttgggaggccaaagtaggaggatcgcttgaggccagaagttcaagaccagcctggacaacatagcaaggccctatctctatccaaaaaagtgaaaaaaaattgccaggtgtggtggcatgtacctgtagtcccaactacttgggaggctgaggcgagaggatcgcttgagcccaggagttagaggaggcagtgagctctgattgtgtcactgcctgggtgacagagtaagaccctatctcttaaaaaaaggaaaaaaggctgggcgcagtggctcacgcctgtaatcccagcactttgggaggccgaggcgggcagatcacgaggtcaggagatcaagaccatcctggctaacacggtgaaaccccatctctactaaaaatacaaaaacttagccgggcgtggtggcggaagcctgtagtcccagctacttgggaggctgaggcaggagaatggcaagaacctgggaggcggagcttgcagtgagccgagatcgcgccactgcactccagcctgggtgacagagcgagactccatctcaaaaaaaagaaaaaggaaagaaaagaactggaacttggattttatttgcatgatccaagcacagagtacaaaaagcctaaacaattgctagttttagagcctacatcctgggaagtgtggttgtttttcagaagacttccataaatttctggtctaatttgatggggaaaattcacttccagaagtgctaaaaggaaaaggtccagttttgttatggaaagttattttttcaactagaatttcaagatccatattattgctccatgtattaataacagtgctttcctgagccatatgtgcatatttctctttgggacaacaaaatgttgatatgaataccagatacttagtcagagttaagtcaaatactgaatgaataaaaatgaggtctaaaggggaagacagcacttcatctttcagcagattttcttttgccagacaaaaatgtctattcagagactcggccttcctatagccatcctatctaaatgcgccagctatatccaggatgtggattgttttagggctcataaagtgtctcataaacttataatgaaagggttaagtcagttcaggtctttaaagaatgctttgaaagaatttatataagctttgactacttaccttacaaaattgaaagttcaagggttctcagcagttgaagagaagtaatgttagtaattctcaactttgactaaaactgccttctagtttgaatagcatcttttatgttctttgtctccttaattctggaaaagaatagtttcaaatatatatatatatatataattatatatatatataaaaggtaccttaaaatgtatgcttcttttttcaggaagctgtgctgaatggtttggtggccactgaggtgttgatgtggttttatgtcggagagattataggcaagcggggcatcattggctatgatgtttgaagaccaatctttaacatctgattatatttgatttattatytgagtgttgttggaccatgtgtgatcagactgctatctgaataaaataagatttgtcaaaactcagtgttttctccatcagayactccatgaaaggtcacaatttctcttgatattaagctgggttgtctttaaacaaccctaaatacacgtctgtttagcccgcaattggaaaggatatatgtggcaatattaacctggtacatgaatatatggggataacattttaatttgaaggtttggaatatatatatttaagctttatttccagaacagtgagggttaggtcttgggaaaactataacttgccaaagtagaagaaatagtagtaccatatgccaaagtgatagagatgaatcatgtcagtagttagaataacatttcaactgttttctttgctaaaatcacagaaagaccctattgacaacatctatgtctgtaaaaatgttagagtacttgtcatcttgaatatagcctccccaagagagaacagggtggtattctaagtatgtttytttgtaacatctttagcagtaggacagagccatacatgtgaaatctgatttttatgtgtgttattcgtttgtctggttttactacctttgcaaaaacaaaataccccaaagatatttaaacaaggttataatttagcatcttccctggatctaaatagtatattatatcctgaaataaatgaaatgattgctatagtctgtcttctggagcgattttattgggtatataggagagattgatcattccttagcttttccccgggatcttagaatccttaattgactcattggtactttcctaaatccactgttattcttgcagccacagcaaaacatgcaataccaactgatgataaccaaaaggtggttgcatatttattacaaaagcattatggctcacaatacagtattaatcctttaatagtgttgaacctttatccggtcaatcccaaatttacccactgcatttagaacactgctattttagcctaataaacgtcacagcttatctaagtgataggcaagaaagtctccatagagactgccacgctgctaaaatgtgaagtaatgcctaacttactcctgcaataaacaggtggtcaaaactgaaatgacctcttttcaaaaagtactcaaaaagactgatatgagaaaggcaatcagtttctttttcatacagtgcatgattattcaaattaaccagaaaaaaacaaggtaggagatcagctagtactagttaaaacctacagacacctagttgattaatgatatgtaatgtgattgtttttaacgccacggtcacaccagaaggtcctcaaaataaacatttactactcacttcactgcaacttcctcctgctttgccatacacaacacctctggtctcccctgtggctaatagtgcatgtacggaattttcttaggttaaaatagcagtgagctccttgaagtggccacttgacttcaccaggcttgtttctctttttttttttttttttttttgtcctcatcaaccccaaatatcttctaacagaactgttgaggctttcaatgaatgtgtgctgccaagtgtttggcattggcaaactcggtgtttattgtgcacctcctaagttctaggcacaattaaaatggcagaaacattcatgaacaagactgttacctgtttcacagagtttgatctggtaagacaggtaattaggcatgcaattactgtaataagatgtgagaagtactataatgagggaaggggaaggtatacttgaaaggctaacccagggcagggtgcagtggctcacacctgtaatcccagcactttgggaggccaaggcgggcagatcatgaggtcaggagtttgagaccagcctggccaatatagtgaaaccctgtctctactaaaaacacaaaaattagccaggcgtggtggcacacacctgtagtcccagctactcgggaggctgaggcagtagaatcacttgaacctgggaggtggaggttgcagtgagccgagatcacaccactgcactccagcctgggcgacagagggagactctgtctcaaaaaaaaaaaaaagaaaaaagaaaagctaacccagacgagaaggacgttcaagggaggttgtcagagaaaatagtagctatataaacaaggaaagtacattagccaagaagaatggagcaaggtatgctggccaagtgaaacaacctgtgcaaaagctactgtcagaaaaagtgtagtacattgagggtctgagagtgtaagtgtggccaaattgccaggcagaggagagcactgagaggtaaagccagagatggtggggaccagattgtattttatgcctgttaaggcttggacttctttaaggacattgaatagaaagccattgaaagattttgacaaggcacagtcctgccctgaagtaacttgggtagtctaacatcagcaggtaatttcaattccatgtaacaaaagccagaatagaaacctgcaaacttgcatagggttcatataacagtgcatgtggtcctacaattttctcagtatgtaaaagtagaagtactcatttagtagtaggcatcacgaggagagagaacataatggttaagtcaaagccagttatgcaaatatttgtcactgtggtccaaaggtttattcctaaggaaactgctatctatatataagtaaatgaggctttttgttgaggctttcatcatttcaaaactaatgtggccaagtgcggtggctcacgcctataatcccagcactttgggaggccgaggtgggcggatcacgaggtcaagagatcaagaccatcctggccaacatggtgaaaccccatctctaataagaatacaaaaattagctgggcgtggtggcacatgcctgtagtcccagctacttgggaggctgaggcaggagaatcgcttgaatccaggaggcagaggttgcagtgagccgagatggcaccactgcactccagcctggcacagagcgagactccgtctcaaaaaaaaaaaaaagctaatgtgaggccgggtgcggtggctcacacctgtaatcccagcactttgagaggccaaggctggcggatcacctgaggtcaggagttggagaccagcctgaccaacatagtgaaaccccatctcttctaaaaatacaaaattagtcgggcgtcgtggcacatgcctgtaatcccagctacttgggaagctgaggcaggagaatctcttgaacctgggaggcggaggttgcagtgagccaagatcatgccattgcactccagcctgggcaacaagagcgaaacttggtctcaaaaaaaaaaaaaaaaaaaaaaactaatgtgaaactgtccacattgcatattccatccttttttttttttttttttgagacggagtctcactctgtcgccaggctggagtgcagtggtgccatctcggctcactgtaacctctacctcctgggttcaagagattctcttgcctcagcctcccaagtagctgggactacaggcgcgcaccagcatgtccagctcattttttgtatttttagtagagtcagggtttcaccatgttggccaggatggtctcgatctcttgacctcgtgatctgcccgcctcagcctcccgaagtgctggaattacaggagtgagccaccacgcccggcctcatcctttgttttatacatctcagcattgttcttagattaacagtttctcctcttttccattcatctcttacatacctaagtattctaccctgatttctaaggatagctcaatactttctttttaaatatttcatatttgtataacactttaccttttcaaagcacttgcaccaactatctcatttagccctcaactttcctctgaagcacgtgccataaatgatataccatttaacaagagaggaactgagcagaaaacataaaacaatttggctaggatcccaagagcaataagtggtggcagcataagctgggcccaggtcatgatcctgtgttgtagtctgtgccctgactctacctgtgaccagcttgtggatcctgctttgtatttccacagttccattctgtattatatattcttggtcctgctttgccctactattaagttatttaagatttcttgtctcattagatatcaacctccctaatcttatgtaaagtgataggtagtttagtaggacttactatttcctaattagtgtggtttttgtttctactaggacataagattgtgatcacccttgtgatgaattcagtaacagttccaccagaggtaatcccttagcagggaacttacactagacctgtttaccaaacaaaaggccctgatataataaaatactaacatgcaaagcccttggcaatctcccttctgcctcatcttaatctcacttagctgccaaccattgtttcagccaccatttctaaccaatccccataaaacctagctttaaatatcatgttattagagtgtgtatccactgtccctgattgttgcaattttccactaatcagttcattcccctttctttctttttgtcttttgagacagggtctcgctctgtcgcctgggctggagtatagtggcatgatcacagcttactgcagtctcaacctcccaggctcaatcaagatcctcccatctcagcttcccaaatagctggaactacaggcgcatgccaccacacacggctatttttttgtagagacagggtagccacattgcccaagctggtctcaaactcctaggctgaaagaatcccccaccttggcctcccaaagtgctgggattacaagcgtgagccaccgcagctggtcccctttatttcttgccaattttgtgtcctggctcactgtcactttataacactacttctatcttaattcttgacaattgcaatttcaacatacacatgggtcagtagtttccaaagtacagtccctggaccacagcagcatcagcatcaccagggaatttagaaatgaaaattaccaggctctaccccagaaactaggagtgagatcttgcaatctgtattttttttgttgtgttgttttgcatttttttagagatggtctcactgtgttacctggactggtctcaaacccctgagctcaagcaatcttcttccctcagcctcccaagtagctaggactacaggcatacgtcattgcacctagcacaatctgtgttttaattatctttccatatataagtctaatgcatgctaaagtttgagaactattaacataaatgatccttcaaccaacctggccttttgattccctaaaaacttaacagttaatacctttcaccttccttaaatactgattcccatctttttaccaaaaacatcaaccatcttagtttcaatttcatgcatccctctctctgaccacctatgaccttcctagcccattctgtcaaataactacacaaattcagagttttcatgaccatcaataaattgatcctaccatctccctcacccccttgatttcagcttttctctcctgttacaacttaggttccatgatcaatcataagcattctcttgaatacaccttcaacttccttgcctctcactcacttcgttgtactcacttaccaaaaccacctccttggcttaattcagctgtctacctgctctgcacctatgcagccaaatgaagttggagaaaacaaagtaactagtctggccaggtgcagtggctcacgcctgtaatcccaacactttgggtggatcccttgaggccaggagtttgagaccagcctggccaacatggtgaaacccgctctctactaaaaatacaaaatttagctgagcatggtggcacgcacctgtagtcccagctacttgggaggctgaggcataagaatcgcttgaacctgggaggcagaggttgcaattagccgagattgcaccactacactccttcctgttttggcgacacagcgagactctgtctcaaaaaaaaaaaaaaaaaaagtagtctcactttatattcatgatggtcagaaccttaagagagcacttaatactaccagccaatcatattatgtttcttcagaccgcaattacatccttcaacagacgaccttacttcctacttgactgagaaaatttaagcaattggagaacttccagttactcccacaacatcattatctcatcttaccatatctccacctatatatatacaccaccttgcctgtactatatggttcgtatcacatgctgcaagcacacagaagtcactcaatgcaaatgtgatgaataaagtgaatgtatccattaattaatctatataaatgttttcccctctgccttcattcctggcactttctacctagcacatccactttcaaaaccacttcatcaccttttcagagaagtttttttctgattttcccgaattgcttccctttaccctcctgtcgatgcttcttgtagcacacatcattgcactctaatgctatatttacatttatttccttactaaactgtaagcttcttaagggagatactgtatctaatacactgttgtaatactatcccatcatgtaatctggcttctgtgtttttgggtttgttgaaaacagtgaaacagcagactcatcctactgtgtttggtactgggttgataaacagcagagtttagtggcaatttgccacagagggagatgc

SEQ ID NO: 94780 - DNA, 13668 bp, Homo sapiens
tgaaacccagtttcacactctaaaggaaacctcagttcactccttgagctgtctcaccagttatctcatatttctaaacaaatgtgcttcttttaatatttcctattttgtcaaaattagatgtcatctattatatttctgtgataatccatgcctttagcattcttacacaatctcccatcccccacctgccccatatcatttgttaaatttaattggaaattagggtttatattataatgactatgtaaatatagttattcaattttgctcagactgctcatcagatctgccatctacctatgctttgattattgttttccaaaactctcatatcagactctatttgtctcattaccttctctttttgtttcaacatggagacatctctccaggagctctgtccacctgctatagactaggcaggctgctctctatgcctattgcacagatgccatttggggaattctctttattaccctcctgggtagcatcctctattgcctggatttcatgtctttttctttccctagttttgctggagtataccctttaaaaagaagatgggactgtgtgttagtcctttttcatactgctgataaatacatccccaagactgggaagacaaagaggtttaattggacttacagttccacatggctggggaggcctcagaatcatggcaggaggcaacaggcacttcttacatggtggtggcaagagaaaatgagaaggatgcaaaagtggaaacccctgataaaaaccatcagatctcgtgagacttattcactaccacgagaatagtatggagtaaaccaccatcaggatttaaattatctcccactgggtccctcccacaacacatgggaattatgggagtacaatttaagatgagatttgggtggggacacagagccaaaccatatcactccacccctggcccctccaaatctcatgtcctcacatttcaaaaccaatcataccttccaaacagtcccccaaagtcttaactcattttagcattaacccacaagtccacagtccaaagcctcatctgagacaaggcaagtcccttctgcctatgagcctgtaaaatcaaaagcaagctagttacttcctagatacaatggggtacaggtattgggtaaatacagccattccaaaggggagaaattggccaaaacaaaggggttatagggcccatgcaagtccgaaattcagaggagcagtcaaattttaatgctccaaaatgatctcctttgattccatgtctcacatccaggtcacgctgatgcaagaggtaggttcccatagtcttggggcagttccacccttgtggctttgcagggtatagcccccttctgtctgctttcatgggctggcattgagtgtctgtggctttcccaggtgcayggtgcaagctgttggtggatctacctttctggggtctggaggacggtgatcctcttctcacaagtctactaggcagtgccccagtagggactctgtgtggggctctgaccccatatttcccttcagcactgccctagcagattttctccatgagggcctcacccctgcagcaaacttttgcctgggcatccaggcatttccacacatcttctgaaatctaggcagaggttcccaaacctcaattgttgacttctgtgcactctcaggctcaacaccatgtggaagctgccaaggtttgtggcttgcactctctgaagtcatagcctgagctgtacatttgcccctttcagccatggctggagcatctgggacacagtgcaccaagcccttagactgcacacagcagggggaccctgggcctggcccacaaaaccactttttcctcctgggcctccagacctgtgatgggaggggctgccgtgaaggtctctgacatggcctggtgacattttccccatggtcttggggattaacattaggctccttgctacttatgcaagtttctgtagctgacttgtatttctccccagagaatggggttttcttttctattgcatagtcaggctgcaaattttccaaacttttatgctctgcttcccttataaaactagatgcctttaacagcacccaagtcacctcttgaatgatttgatgcttagaaatttcttccaccagatactctaaatcatctctctcaagttcaaagttccacaaatctctagggcaggggcaaaatgccgccagtctctttactaaaacataacaagagtcaccttcccaactggttcctcatctctatctgagaccacctcagcctggaccttcttattcatattgctatcagcattttgggtaaagccactcaacaagtctctaggaagttccaaactttcccacactttcctgtcttcttctgagtccttcaaactgttctaatctctgcctgttacccagttccaaaatcacttccacatttttgggtatcttttcagcaatgccccactctaccagtaccaatttactgtattagtccattttcatgctgctgataaagacatgcccgagactgggaagataaagaggtttaattggacttacagttccacgtggctggggaggcctcagaatcatggcaggaggcaaaaggcacttcttacatggtgaaggcaagagaaaatgagaaggatgcaaaagcggaaactcttgataaaaccatcagatcttgtgagaattattcactaccaggagaacagtatgggggaaactgcccccatgattcaaattatctcccaccggtccctcacacaacacatgggaattatgggagtacaattccagatgagacttgggtggggacacagagccaaaccatatcattgtgtgtgtgtgtgtgtgtgtgtgtgtgtgtgtgtgtgtgtgtgtgtgttttctgtttgaattatcctctggatttcatatatgtttgcaattggccaatagcaacattgctttcttcttggtaatgtacttcacactcctgaagtcaaacagttataaccaaagtgttacatagtaatttatttatttatcaaatatgattggaaccaaggccctgtacaagattctgaaataaataagggagagtctctgttctcaaaatttttattgttgctgggaaaaaaatatgtaaacaggaattgatataatgtggtcaatgttatagtgaaaactttataagataatgaaagagcaccaaaaaaaggacttaactcagcttgaggagctcatagaagacttcctagaattgtgacggcctaagttgggcctaaagaatgaaactgcttatttatttatatattatcttgttacaacatgaatctaagatatgttgcaaaatgcttatcacataagaaaatcttttcagggccagcaactgtgcctagatcttcctaatcttctgagtgtcaatactttctccagtgacttgaaccgagcctggcatatagttggctctttaatacatagttattgaatgaatgaaggtcagatgtggtattataaatcagtgggggaaaacattaataaatggtcctaggacagtgtattattcatacacatacaagtaaataaacaaaattaattctctactttacctcatttgtaaaaataaattacaaatagagtaaagaaaataacctataaaactttttgaagacaatatatttatgagattagagtaggaaaagattactaaaataggacataatgcataaatcataaagattgataaaataaaactatcaaatgcaaaatttggtacaagacaccaaagatacttgtcttagtccattttttgttactataacagaatacctgacactgggtaatttttaatgaacaaaaatttatttagctcacagtttgggagsctgggaagtccaggagcatagtgccagcatctggcaagggtcatcccatggtagaagggcagaaggtacaagtgagcacaaaggacagagagagaggcaccaggggccagactcgctttataacaacccagtctcatgataactaacctggtcccacgatgacaacattaaaccatttatgaccaaatcacctcttattaggtcctacctcccagcactgtggcattatggattttttctaacatattaacttttaggggatacatgaaaccatagcattccacccctcccccccaacacaaatttatattctcagaatgaaaaatacatttattccatcctcatgatctcaaaagccttagctcattccagcatcaactcaaaagtccaaagtctcatctaaatcagatatgggtgaaactcaaggcatgattcaccctgaggttaattccttctagctgtttgcctgtgaaattaaacaaattatctgtttccaaactataatgatgggacaggcatagaacagatattcccattctaaaagggtaaaataggcaagaacaaaraagygaaagtccccaagtaagtccaaaacccaacctgaaataacattaaggcttaaagatggagaataatctcctttgacttcgtgtcctgcatcctaggcacactagaataggggttaaacccccaagacctatggcaaccccagccccatggcatttctgggcttacactggtagctctacagttctcaggtagtcctgcacccatggcttcactaggcattatcctagtggtgactgtgtggtggctttgcttccatggctccatttggcttgtcctagtgggggctcttctatagtagctccatcactgtgacaagtccctgcctgggcccccagttctctgtgatatactttaaaatcttggtataggaagccatgcccccaccactcttgcattctgcatgcctgcagacctagcagtatgtggacattgccaagatttgccacttctaccttccagagcagtgggtcaagccacacctgtagttgtttgagccatagttggggcagccaagagcactgcccaagcaagatgcaggatgcagagacccaaggcagccatgggcagtaagcccgtgaagggaaccctaggcccatcccccagaaccattctgccgtcctagaactcttggcttgtgataggagaggaacccttgaagatttctaaaatgccttctgggtctttctaccattgtcttgatgaacagagctgtcttccttctatccatgctaatctctttagcaaaaggttgtttgatttcacccttgcatactttttttgttctttacatgaccaggctgcaaattttccaaatctttctgctctccttcccttttaatgataaattctgtctttaaaccattcctttcttgtagtatcttactataagtggttaaaagtagctgggcagtagcctgagtgctttgctgtttagatacttcttctgccaaatgatctaattcattgttcttaaatgccatcttccataaagcccttgcgcatggacacagttcaggcaagttctttgctattctataacaaggatgccctttgatctatcttccaataccttgttcctcagttccattgaagacctcatcagaatggcctttactgtccatagttgcatcaacattttggtcacaactacttaagtaatctctaagaagattcagactttcccaagtcagctcttctgagccctcaccagaatcacccttaatgctctgtttatagcaatacaagcttttactaacctactcttccaaattcttccagcctctaccaattacccagtaccaagctgctttcacaatttcagatatttttatagcaacaatccccccttcttggtacacattgcctctcttgattcattgtgtgttgctacaaaaggacaactgagactgagtaatttataatgaacagaaatttatttagtgcatggttcttgaggctgggaagtccaagagcatggcgccaacatttggcaagggtcatcccatggtgagaaggacaaaggtggaagtgagaacataagaccaaaagagagggacctgtgaggtgtgcgaactggtggcagtgagagacttcggcggacatggctcccagcgtgccagcggcagaacccragtgtcctaaaggctgtgctgctggggcctcccagggccggtaaaggcacccaggcacccakattggctgaaaacttctgtgtctgccatttagctactggggacatgctgagggccatggtggcttctggctcagagctaggaaaaaagctgaaggcaactatggatgctgggaaactggtgagtgatgaaatggtagtggagctcattgagaagaatttggagacccccttgtgcaaaaatggttttcttctggatggcttccctcggactktgaggcaggcagaaatgctcgatgacctcatggagaagaggaaagagaagcttgattctgtgattgaattcagcatcccagactctctgctgatccgaagaatcacaggaaggctgatcaccccaagagtggccgttcctaccacgaggagttcaaccctccaaaagagcccatgaaagatgacatcaccggggaacccttgatccgttgatcagatgataatgaaaaggccttgaaaatctgccggcaagcctaccacactcaaaccaccccactcatagagtactacaggaaacgggggatccactctgccatcaatgcatcccagacccctgatgtcgtgttcgcaagcatcctagcagccttctccaaagccacatcctagtatcagaaggccaggcgaaactgcaacactgctcatcacccggtggcgtgatccctgctcttaggtgctgggcagagggaaagggtggtcagggtgaggatggtgagggagggctggtgaggggctgagaggaatacttgaaacaacagcagtgttattgtaatgtggcagtttattttatacataggtgagagtttttaaagtgtaagggaaaaattaattttttaaaaaacaccatgcttggagggtgggggtagaaatagagagacacaatattatttctaaggaatcgggttttcatttactctggactggtgaaaatattttttaaagccagtgctctaagacctcagcttttatctcagaaccccatgggttccagaccaagagtacaggaaatcaaattgttgtcctgtctgtctatagcttggaacagggaggctttgattactgaccccggttccacacactgtaagatcaaaaaaccatytccacatctgaaagagatgtaaggtgtattcatagggatggtggctcaacaaatcaaacaaactggaatcaaggggagggagaagggaatgaaatggaaagggaggctgattcccttcccctgacttaccactaatttactaggctacstamtytcatgagtaacctctcacagctacccagcacatgccacaatcctatgctcttgccttcttttatctgcawtgtgtgaagggactcttttaaataaatgagcaagtgtcctaagctatgtcatccaaagattgtcctttccattctcaaatcctgtgactgggatcactcaacagcactgtgatgtattattttcaatgaggtgcctttcttaactgaccaaatgctgccttgtttggcccctaaatcaataaaatatgttaaaatttgaagaaraaaaaaaaaagaccgtaagagaggcacaagggttaggacttgctttataacaacttgcttatgataactaagccactcccacagtaacaaaattaatccactcaagaaggctctgccctcatgacccaatcaccttttagtagtgcccccaccccgccaccccagcacacatgcacacaccactattgctttagggattaagtttccaacagatgaaccttcgagggaacacattcaaaccatggcaacacttacctatcataggatgttgtctaaaatttctcatccactggaatttgaaagccatatttgtcaatctgatagattttgattctaaatgtaaccttcccatttactaaatatgtgaccttggtcaaagaatttaacatctctgaatttaggtttcctcttctgtaaaatgagaataatataattttggagcactacattatgtgataaatgtaaagcttttaacagtgtgcatgattcatttagatgcccagtgtgttaggtgctgtggttttcaggataattgagttacactcttatccttcacctttgaaggacttacaacctattgagcaattaagacaaataagcagatacctaactgcagggtgacaagtgctcttctctttacagtgacctcctatagatcaagaaataatgcaccccaatctgaggagccacttattgaccttatgcatcagtcccattcctcagggctctctcatagtgctcctgttatcaacatgcactctctcctcaaggaatctcatccacttctgtggctatgctgaaaattccaaaaattttatctccagccaagatctgacacatctacttgaatgtctaatggacatctcaaagttagtatgtcagcaactaaactcttaatctttttatgtccctaaataagttccttctccacactgactcagatcaacaaatgtctcttatttcactcaggtactgcaattacttacgacagaaactcagggccatttttgagaattcctcatttcttgcccaaaccacattcattctcccatcaaaatacttcttaattttatccacttccttctacctccactttaaccacactggtctaaaccatcatctctcacctcgatttgtgctataaccacctaagaagcctccctgaatcccctattactcttcatccatttctggttcttcatccaaatctttaaaaaaatgcaaatcttgttgacttttctttttctttcatgaaagaggattccggttgtacttaaaatctaaatctcttaccacggtccataggccccagatcaccgggccaccacccgtcataattgccttgttttatcctctttgctcatcagccttcagtgacatgggccttcctcaatttctggaacacactaagttcttcctacctcaggccatgggtgcatgctcttctctctgccttgaacaaccccagcctcccccttggtctagctaacccatctcattctttcaggtctctgcttaagtttccctgttgcccttatctaaatcagatattttaaatttcaagtcatcccctcttactccttctctgtttatctatttcaaaatatctatttatttgtatgatcattgtatgtgtttatctcacctaagagactaaaatttctataaggatagaaactatgtcaatttttttgaatgataaaataaaaactattattttgtcctttgttagagcttttatattgagcatattttgctaagcatagcaggagcttagttaacatcctggctgctcaggagatttttatagtgcattttataaatatatagatctgggggcttcaaaacctattgaatcagaatcttttgggggtggagcccagaaatctgcatttttaacaaactgcaagtgatttattccaatttagttagcccatctctgatgcctaaaaccagctaacctctagaaaaattccgaagattggaaaccaaaagacatgggcttgaattctactttgtaaattactaagtatggaattttagaaagtcatttaatatctctgatagtttctatttttggaaatttggagtaataaaaatatctgcttcaaagtatagccgtgaagctccaatgcacaatacatcttaaaacatttcataaacttcatagtaaagaaatgttagaatttttattcgttaatgatctcttccatatagggcttgcctcatcatttctgacaatctaactggtgcagcccacacttctccaatgcgataggatccctttctctgtacttctgaagaaggactaataataataattcactgagctttttgcttttttaaagttccgggccatcattacttagatctgcatcataccatacccacagcctcactagcccattggctgctagggaggaaacagctcaggcagcagcagcaaaccctgagggagaaggggtggcctcacttccagcaggatgacaaagattgagtctgtgaacagtaacaatgaaaggccacaaccaggaattgcagggaacctctgggcagtttcttaactctgattttcccatgctgaatcattataaaactccctcaattattattggctatcgcaaaatcaagaaaactggactccctatcagagatgtaataataacaataataaaaagaactctcaaaccaaagaaacttgttgtgcaatctatgaaaatcctgtaatctccctggcttttaggaaccttacatgtggagcaggtacttggacccgatgaatatataaacaagtaaatgaatgaacacaattgcttgcaagaccattgctggggatacttgttttttgtcttggtgtatggcacccacaagttcttggtctctcaagcctaggagagactaagataattaagataccttaatttgatgattcctccaaacgaacaaatgaattaacccagctgcttgcaagattattgctggggttacctgttttttgccttttctgtgttggtgcatggcttccacaggttcccagtctcccaagccaaatgccttaatttgatgattcctcccaggtcttcttaatttcccatatcttatttcacttctccatcccatctacctggcctagtgtactagttggggttctctagacatacaaaaccaataggatgtgtatatacagagagatttatttaaggaattgattcatgattatagtggctggcaagcccaaaatctacagagtgggccagtatgctggagacacagagaaatgctaatatatcagttcaagtccaaaggctacatgctggagaattctcccttgctcagggaaggtcagtctttggttctactcaggccttcaactgatcaaatgaggctcacccaaattatggaggtgaatctccttactcaaagtctaccaatgtaaatgtcagtctcatccaacagtcctgttacagaaacatctagagtaatgtttaaccaaatgtctgggcactgtggcctagccaagttgacacattaaattaaccatgacatctagttcagtctttcattatttctcacctggactatttcttcagctcctaagaggtctacctccttttattcattaatatattcatgcattcattcattcatcaatttgaaattcatttaataaagcatcctctgcgccaggcatatttctagtgactggggatgtggcggtgaacaagacaacacccctgcttttacaaaacttacattgtagttgggggagatgactaaaaaactggccaacaaacacataggaaatataatctgaggcagtagaaagtgctattcaaagaaatgaagttgggtaaaggaatagagagtggcctgagggacagctccatttttttaagtggggtcaggcaagaagcctttgaggggtactattctagtaggaattgatgaaataagggggaagaccaggcagaataccattttaacagagaaaaaagcagacgccaaggtcctgacaaccttggtgtgttctacgaataacaaacaaagacaaatgtgactaaaacaggttgagcaagggaaagaatcccaggagaggagtttaaaatgtaggcctgtaacaagattatatgagaaaaagaagatattaaggatgactacatgcgttttggactgagcaattaacaaaacggtggtgccgtctattgggtggggaagattcaggaagaatgggaacaggatgcacatttttaagagttctacttccaccaattttgatgggtttattagataacctagtacaggcatcaagtaggatgttggataagtaagctgaagctcaaggaagaagctgcaggctgaagatgtgaatttggagttatcaaatgttatttaaagccatgaggctggagagggtatggtgagaagacatgagaggattgagacataggggagctacaatccttaggagaggatgtgcgtcttcctctgctaatgactgtagttcctcctggaagaagaaatgcatcctcttctaatgcttgtagctcctcctggaagaggagacacatccacagaaggagattgaggagtagcggccagtgaggtaggagaaaaccaggagagggtagggagcgagaaccaagaaaagaaagtattttataatactgtgccaagtgctactccttttaacagagtatttaaatctattacatttcttgtgaatactgaggtatttggacttctttctaacatcttattttatatttctatttaccaatcttttttctttgcttctttatttctcatctcatagaaactccatgtgtaactgttttagggggagtccagttagtcgggcataaacatgaatttttttttttttttcctaggagttgcttccaaactatgctgttatgatgttcttctcccactgggtagtggctcccttaacggcatcttggctagattacttaattttcaacaacttttagttaatagtataatctaattatttttaaaaccttaattttgtttatttaaaagaatatttttcctgccgggcacagtggcttacgcctgtaatcccagtgtgtccggaattggtgggttcttggtctcactgacttcaagaatgaagctgcggaccctcgcggtgagtgctacagctcttaaggtggcgcgtctggagtttgttccttttgatgttcggatgtgttcggagtttctttcttccggtgggttcgtggtctcgctggctcaggagtgaagctgcagaccttcgcggtgagtgttacagctcttaatgcactgcgtctggagttgttcgttcctcccggtgggctcatggtctcgctggcttcaggagtgaagctgcagatcttcacggtgagtgttacagctcataaaagcagtgtggacccaaagagtgagcagtagcaagatttattgcaaagagcaaaagaacaaagctcccacgatgaggaaggggaccccagcgggttgccactgctggctgaggcaggctgcttttattctcttatctggcaccacccacatcctgctgattggtagagccgagtggtctgttttgacagggcgcagattggtgcatttacaatccctgagctagacacaaaggttctcctcgtccccaccagattagctagatacagagtgtggacacaaaggttctccaaggccccaccagagtagctagatacagagtgtcgattggtgcattcacaaaccctgagctagacacagggtgctgattggtgtgtttacaaaccttgagctagatacagagtgcygattggtgtatttacaatccctgagctagacataaaggttctccaaggtcccaccagagtagctagatacagtgtcgattggtgcattcacaaaccctgagctagacacagggtgctgattggtgtgtttacaaactttgagctagatacagagtgccgattggtgtatttacaatccctgagctagacataaaggttc

SEQ ID NO: 94781 - DNA, 15576 bp, Homo sapiens
tgggtcaagacagtcctgcacagttgttcaggttgtggccaaggttgcgtttgcagatttgccatgtaaaaatacaggatgctcagttacatttgaatttcagattaatagcaaaaaaaactttttggtataattctgaaatatttcatgggacatatttatactaaaacgtcatgcactgttgatttgaaattcaaatgtaattgggcctcctctatttcgtctggcaagcgtagacaaaagaatccagtccaggccaggcgcagtggctcaagcctgtaatcccagcactttgggaggccgaggcgggcggatcacgaggtcaggagatcgagaccatcctggctaacacggtgaaaccccgtctctactaaaaatacaaaaaattagctgggcgtggtggcgggtgcctgtagtcccagctactcgggaggctgaggcaggagaatggcgtgaacctgggaggcggagcttgcagtgagccgagatcgcgccacagcactccagcctgggcgacagagccagactctgtctcaaaaaaaaaaaaaagaatccagtccatagtcccctgagccatgtgccctggggtgcagctgggtccttcaggagaaaaatgctctatttctggcactgggaccgagcctgatgtgggttttttgttggtttttgttgttgttattgtttttgagacaaggtctcgctccaccacacccggctaatttttgtatttttagtagagacggggtttcactacgttggccaggctggtcttgaactcctgacctcaagtgagccgcctgcctcggcctcccaaagtgctgggattacaggtgggagccaccgccctggccctgggcctgatgttgatgacctcctactatgtgcacctgcagctctcctgcataggcctcagccgtcctgcatgaggacactgggaggcaggtgctccctatcaaccccgtgttacagttgaacaaactgagccccagaaaagaaaacgtatttgcccaggtcacacggtgaagaagtgagggattcgaagcccaggtccatctgaagccagagtcacccagaggagaaagagttggaattgagaactcaaggaatgcttggaagtgatcgggctcgagcccacctaggaagaaacagaggctggagacatgagactgtgttgctatttcctctcatcaacccttgggccctattgaggccctaccacaagcctggccctgcagcccagtgactaggagaaattagacacaagataataataacagcaatgatcttttttttttttctgagacggagtcttgctctttcgcccaggctggactgcagtggcgcgatctcggctcaatgcaagctccacctcccaggttcacgccattctcctgcctcagcctcccgagtagctaggactacaggcgcctgccaccacgcctggctaatttttcatatttttagtagagatggggtttcaccgtgttagccaagatggtctcaatctcctgacctcgtgatccgcctgcctcggcctcccaaagtgttggggttacaggcatgagccaccgcgcctggccaacagcaatgatctttgagcacctatattgccagtctccacggtaagagctttcttcattttttgttttgttttgtttcaagacagagtcttgctctgtcacccaggctggagtgcagtggtgtgatcgcggctcactgcagccttcacttcccgggttcaagccattctcctgcctcagcctcccaagtagctgggattacaggcacgcatcactacttctggctaatttttgtatttttagtagggacagggtttttcaccatgttggccaggttggtctcaaactcctggcctcatatgatctgcccacctcggcctcccaaagtgctgggattacaggcgtgagccactgcgcctttctttgtatttgttcaagtaatatactgaaatatgtactgtgcctcccactttatggaggaggaaactgaggccagcaaatgaggctgtcatgggaggtggagacaggatttgaacctgcctcagtgcaggaggctcaagagcctctgtcttctctcagggcactgtgtgggagggtgagaaggagggaggcccacagaggcatgacctctgattgccactgtcacctgggccctgctctctgaagtctctgccaagcggggaggtggccgggggagggccctgctctgtgcagcctcccctcccccggcccgcagagttgagcacagagggacagaggcacggaacccccagaaatgtccctcctcagaaacaggctccaggccctgcctgccctgtgcctctgcgtgctggtcctggcctgcattgggggtgagaagaagtgggtggagggatgtggggcccacacctggtgggtgtgagtgtggctgtgtgtcctgtggctctgtagccacgtgagacatgagtacggagtgtgtgcgtttcatggcgtgcgtatgcatgtgcgtgtcggggagtgtgtgtgtcggtggctgagagtgaagtgtgaatgtcacattggtacaaactgggatcatctgtgtgtgtgcacgtgcgtgcgtggaagtgggagtatgcagtcgtggtaaaaaagtgcatgtctgtgtgcatatgtgtatttgtgtgcacctgtctctctgtggggtatgtgtgtgcaaaatatttgagtgtgtggacatgtgtgagggggtgagtgtgtgctggtgtgtacgtctgtgttttgcatatgcatttttttttttttttttgagacggagtctcactctgtcacccaggctggagtgcagtggtagcagtggtgcgatcttggctcactgcatcatccgcctacccgtttcaagggattctcctgcctcagtcttcagagtatttgggactacagacacacgccaccatgcctggctaattttttttttttgagacggagtctcgctctgttacccaggctggagtgcagtggcgtgatcttggctcactgcaagctccgcctcccgggttcacgccattctcctgcctcagcctcccgagtagctgggactacaggagcccaccaccacgcctggctaattttttgtatttttactagagacggggtttcgccgtgttagccaggatggtctccatatcctgacctcgtgatccgcctgcctcggccttccaaagtgctaggattataggcgtgagccactgcgcctggccaatgcctggctaatttttttatatttttggtagagacagggttttgccatgttgcccaggctggtcttgaaatcctgacctcaggtgatccgcccgccttggcctcccaaagtgctgggattacaggcatgagccaccrcgcccggccatgtactttatgttaaaatgggatcatattctagatcagcattatccagtagaaatttaaatttttaatacagggccaggcacggtggctcatgcctgtaatcccagcactttcggaggccgaggcgggtggatcgcaaggtcaggagatttgagatcatcctggctaacagatgggtaaaaacccatctctactaaaaatacaaaaaattagccatgcatggtggcatgcgcctgtagtcccagctactcgggaggctgaggccggagaatcacttgaacccgggaggcagaggttgcagtgagccgagatcgcgccactgcattccaacctgggtgacagagcgagactccgtctgaaaaaaaaaaaaaatttaacacgtatgtagacaatgtgcaaggcaccattccatgtgcatcgtatgtagtaactcttaattctcacgataaccctgaggtagatattattaccccgttctacaaaaggagaaacagtcctggggagacaggataagtcaccggccaaggcacacagctagctacatgtggccccygcgtgacggctggtctctgtaggcgaggctttgtccagatgcgtgggtagaaggtctggcccggaaagaggaactgacagcaaggctaagccaatgtctgcccctgggggcagaaagtcacctcctgctctccctccactgtccacagaggtagctcagacagggtgggggtcacaggagaacgaagggagaagggggtagttcctgggcagcaaaatcaggtggtgaagggaggcatcagaggatggcaattagagaggccattagaggggaaccacaggcagacagggtgacaggagggactactgacacaaggtgaagagatggcccagccggacggggtggctcacatctgtaatcccagcattttgggagcccgaggtgggtggatcacttgaggycaggagttcgaggccccaacatggcaaaaccccatctcttctaaaaatacaaaaattagccgggcatgatggcagatgcctgtaatccctgctactcgggaggctgaggcaggaaaattgcctgaatccaggaggtggaggttgcaatgagacgagatcatgacactgcactccaccctgggcaacagagcaagagactgactctgtctcataaaaaaaaagaaaaaagaaaaaaaaaaagagatggctgatggttaaagaggggttagcggtcaggggacacataagggtaaaggcaggaggcaagaggactggcagggggctgcccctgggccaccgggagcgacacaggatgagcatggagggaaagggagaaggggattctagggtcccagcctacccaagttgccctctggttccacctagcatgccagccagaggcccaggaaggaacccygagccccccaccaaagctaaagatgagtcgctgragcctggtgaggggcaggatgaaggagctgctggagacagtggtgaacaggaccagagacgggtggcaatggttctggtgagggtgtgctgggctgggtggtgggaggggactcctgggtctgagggaggaggggctggggcctggacccctgagtctcagggaggaggaaagggtgggagtggggctgtgacccctaggtctgggaggagtggagggttagagctgagagcaggaactcctaggtcacagagaggagcggataaatggggcagagaacacctggggagagctggggcctccactgtgatgtcctctctcctgtaggagcccgagcaccttccggggcttcatgcagacctactatgacgaccacctgagggacctgggtccgckcaccaaggcctggttcctcgaatccaaagacagcctcttgaagaagacccacagcctgtgccccaggcttgtctgtggggacaaggaccagggttaaaatgttcataaaagccaggtgtggttgtggcgggtgcctgtagtcccagctactcaggaggctgaggtaggatgatggcttgagcccaggagttcgagaccagcctgggcaacacagcgagatctcttgggggtaaaacaaaaagaaaaaaaaaagttcatacttctccaataaataaagtctcacctgtgtccctgtctggatccttccccagtgtggccagaaaaaaacccaccccactgcctcccaggaatcaatgagtagaagaggtgacacctgatggggaaggaagagtagggaggtcgggaagggtatcaaggaataacaccctattgtgggcttgcggagaatgggggacttcaaggcgtgtcagtttcaggagggtgagggcaggagcgtgggtggagtcagcaggtccccatgatggccctcactgagagcttcgcccttgtctcctacaagctctgactccattcccagtgggcacccagcacctccaacccctccacagcccccaacccagcctctgtcggaggcgaattctcagagtgagggttccctgtcacttgagagaaggttccctgtgacgtgaccttgggggacgtcattgccctttctgtccccacccaccccctccgcagttctgttggccaggactttggcctagacaaaggatgggggttgtggctgtggagcggaagtgggtctcaaccactataaakcctctctgtgcccgtccggagctggtgaggacagcctgccagagtctggtaagaaagggactcagggtgcggggacaggggggcgtcagcagggagagggcaaagatcgataaagcaggaattttaagaggcacaatattagaagcccgtgttggaaccatgactgtgtgtgtgtgtgtgtgtgtgtgtgtgtgtgtgwgagagagagagagagggagatggagtctcgctatgtagcccaggctagactcaaactcctgggctcaagcaatcctcctgcctcagcctccccagtagctgggactacaggtgcaccaccacactccacaaatcacagaatttagaactgtagactatttgagcttctgcttagagttagggtggctgaggtggggaggatcccttgagcccaggagtttgaggatgcagtgagctgtgatcttgccaccgtgttccagcctgggtgacagagaaaccccatttctaaaaaagagaaagaaaaagggataggtacaatggctcatgcctgtaatcccagcactctgggaggccgaggcgggtggatcacttgaggtcaggagttcgacaccagccttaccagcatggtgaaaccgcatctatactaaaaatacaaaaattggccgggtgtggtagcatatgcctgtaatcccagctattccagaggctgagacaggagaattgcttgaacccaggaagcggaggttgcagtgagcccagatcgtgccactgtactctagcctgggtgacagagcaagactcagtcttggcggaaaaaaagaatgaaaaaatttaaaaaactaaaaaagaactgtaggctgggcgtggtggcttacacttgtaatccaaacgctttgggaggccaaggcaaacggatcacttgatgtcaggagttggagaccagcctggccaacatggtgaaaccccgtctctactaaaaatacaaaaattagacaggcatggtggtgcatgcttgtatttccagttactcaggaggctgaggcaggagaatcgctcgaacccggaagacagaggttgcggtgagccaaaattgcgccatcgcactccagcctgggcgagagaacaagaccttgtcttggaaaaaaaaaaagaattgtagaccatttgcttgtgttctttctccggggatcagatctcaccctctttctgccgtacttcctcatctcctacgtgtggatgatgatattgtgccctgtgcatgttcttcgtcaccaaaagtgcctctctcatagagcaggtgagaactcagtgaggagatgcagggacatgaggtctgacttagggcagagccctaaggtaacacatttgatctactgtaggtccttaatggtgtctgcagagcacctccctgcactgactcagccttagcaaagggcagaggctttgctgtgttccctgctgggcccagaactgtttaggtgctcaagaaagccttctaggctgggctcagtggctcacacctgtactcccagcaccctggggaggccgagatgggaggatcgcttgagcccaggagttccrgaccagcctgggcaacaaarcaagtctcccatctctacaaaagaataaaaattagcagctgggcatggtggctcaygcctgtaattccagcactttgggaggccaaggcaggcaaatcacttgaggttaggagttcaagaccagcctggccaacatggtgaaaccccatctctactaaaaatacaaaaatcaggtggggcacagtggctcaagcctgtaatcctagcactttgggaggccaaggtgggcggatcacgaggtcagaagttcgagaccagcctggccagcatggtgaaaccccatctctactaaaaatacaaaatattagccgggcatggtggcaggtgcttgtgattccagctccttgggaggctgaggcagaagaattgctagaaccctggaggcagaggttgcagtgagccgagaacacgccactgcactccagcctgggtgacagagcgagactccatctcaaaaaatacgaaaacaaaaatcagccgggtggtggcgggtgcctgtaatcccagctactggggaggctgaggcaggagaattgcttgaacctgggaggtgggggttgcagtgagccaagattgcaccactgcactccagcctgggcaacagagtgagattccatctcaaaaaagaaaaaaataataattaaaatgttaaaatcaggagtagaatcacagaatgttggaaagtgaggcccaagaagggggctgtgtccaagtccatgcatgggaaacttgactgggacaccgagcwcacacagagcaggatctcagtcccccccaccagagtggggcgtgaccacaggaacagccgcctccagtcagcctgccacatgacaccccctcaatgttccaggtctctggacaytatgggcacaygactcctcccagctctgtttcttgtcctcctggtattgggatttggtgagtgtgggcttccggggagggaagccttggggaggggaatgagctccaagcatcttcccagcccaggcccttcttacctctgcctctgccctctcctcttcttccttcctcctttccccctgctgcagccccacgggctctcctgacacactctccccctscagaggtccaggggacccaacagccccagcaagatgagatgcctagcccgaccttcctcacccaggtgamggaatctctctccagttacygggagtcagcaaagacagccgcccagaacctgtacragaagacatacctgcccgctgtagatgagaaactcaggtagcacctgcccctggagaaatggggtctggcccataccaccractgcatccaggacccagaagttcaggccccagcccctcctccctcagacccaggagtccaggcctcagcccctcctccctcagacccaggagtccaggcccccagcccbtcctccctcagacccaggagtccaggcccccagcccctcctccctcagacccaggagtccaggyccccagaccctcctccctcagacccaggagtccaggcccccagcccctcctccctctaaccatctgtgctttctccccwgggacttgtacagcmaaagcacagcagccatgagcacttacacaggcatttttactgaccaagttctttctgtgctgaagggagaggagtaacagccagaccccccatcagtggacaaggggagagtcccctactcccctgatcccccaggttcagactgagctcccccttcccagtagctcttgcatcctcctcccaactctagcctgaattcttttcaataaaaaatacaattcaagttgcttctcatggatggcactgcttttctgaggactcaagkgccaagatggaggggctgactcagtccagccaacatttaatgagcacctactttatgtatggagctctaacccatgggtccatgggaataaagcagtgaatagtaacaataaataatygtaacagcaattagagactaatctttattgaagtccggctttctctcttttatttttttattttttgagacagggtttcactctgtcacccaggctggacagcagtggtgcaatctcggctcactgcaccctccgcctcccaggttccagcgattctgtgtgcctcagcctctggagtagctgggattatgggcatgtgccactgtgcacggctaatgtttgtatttttagtagggttttgccagttggctaggctggtctcaaacttctgacctcaagtgatccacccgcctcagcctcccaaagtactggggtgacaggcatgagccaccgcgccatgccaaaatccagccttctcatttgtaaaataacaaatcatagacacagctagtccacagtggcctctgacagtctccagttgttaacggtgaatggtgtccaggtttttggcgtcctgaacaaagaactggacaaaacgcacaaacaaagcaaggaaggaatgaagggatttattgaaaacgaacatacactaaacagtgtgggagcgggcccaagcatatgggttcaaaagccctgttacagaatttttgggagtttaaattccccctagaggattccccttccactggttacttctggtacaccctatgtaaatggagaggatgaagaaaagttacaaagtcatttatggcctaccggagaggatgtttcctgttatagctgaagtgaattggccttatgttccctgcctccctattttcctgccttacagttgctggactgacacattttttattttatttattttgttttgagataaggtcttgctctgtcgcccaggctgaagtgcagtggtgagatcttggcttactgtagccttgaccttttgggctcaagagatcctcccatctcagcctcccaagtagttgggactagggatgcccactgccacacctggctaattttttgtatttttagtagagacggggtttcgtcaagttgcctaggctagtctccaattcctgggctcaagcgatctgcccaccttgcccttccaaagtgttgggattacgggtgtgaaccaccgcaccaggcctgggctgacactttaaacgtgccattgcaatcagtgtataatggtcccgtggcagagggagaatggtgcccaagtcagtacttcttggctgggacccaagaagacaaacctctagggccggcgtggtggctcacgcctgtaatcccagcactttggttggctgaggtgggcagatcatctgaggtcaggagttcaagaccagcctggccaacatggtgaaaccttgtctctaataaaaacacaaaaattagctaggggtggcccgcgcctgtaatcccagttacctggaggctgaggcaggagaattgcttgtaccctggaggcggagatagtgccactgcactccagcctgggcagcagagtgagactccgtctctaaaaaaaaaaagaaaaacttattaaaaaaaaattgcaagcaaaaagcacagaaggcagaaggtgcaaataagcagaggctccatggtctgaaggaggccagtgctgggaccatgaatgaagggggctgggggccaagattcctgtatcctgagggagtccagggtggtactgctccccaagtcccatgggtggggctattggtctctggggatccactgcttgtatttctcctaatctgcttggcattaacctcctgccaggctttcaacacccttggggcagttttcccaggtcctgaggctgggcagctgagtccagtaaaaaacaggggccctggagagggactgtgggcaatgcccccgagtccccggggcctgggaagaacagaggctgccaagygcagggggtggtggggaggggaagaccctggagtaacaatccctgctgtgtccacttggttcccacggactcragccaarccaaagcactgcccggaccagttcggcttccaaccaatcctggtgctggcctcagactcctcctttctttctcagaaccccattcccctcagggcccccagagtccaggcccctagattcttcttcccctagaactcaggagtctgggaccccccagtcccttctcctcaggacctagaaggttggatccccagccccctttctcccttagaacctgaaatcacagcccttgatcagtattttgcgccccctagtggagagaagagtgggtctgtcctgtgacttacatacagcaggaatggcagaattttttacttattatgatttttaatttctttagagacagggtctcactctgtcacccaggctggagtgcagtaatgtgatcacagctaattgcaacctcgaacgaactcctgggctccggcatccctcccacctcagcctcagagtagctggaccacaggtggatgccaccacaccacctaattttgttaatttttagtagagctaggatctcgctatgtcaccaaggctggtcttaaactcctaggctcaagcgatccttctgcctcagcctcccagagtgctaggattacaggcatgagccacgaagcctggacggaatggcagaatttatttggtcactccacagagcataggaaggctctgcagggaacctgcctccacaggagccctgtccaaggtcacacttctcatgagaagcttagacctcatcatgctccaacacattggcccttgcagtgtatgagacttggagagcagattgcagcagtttgtatttatagctgagagcgcagttggggttgcagtgaggctggagaaagtttcaaagcccctcacttgcctgggctttccatggtcctctacctaaatttgtacaagtcattttgtactttttttttttcaagacagagtctcccttttcttgcccaggctggagtgcgatggcatgatctcggctcaccacaacctccgcttcccaggttcaagcgattctcctgccttggcctcccaagtagctgggattacaggcatgtaccaccatgcccagctaattttgtacttttagtagagatggggtttctccattttggtcaggctggtctcgaactcccgacctcaggtgatccaccagcctctgcctcccaaagtgctgggattacagtgtgagccaccacacccagccaattttgtactttttaaaagaggccaggccaggcgcggtggctcatgcctgtactcccagcactttgggagacagaggcaggcggatcacgaggtcaggagatcaagaccatcctggctaacacggtgaaaccccgtctctactaaaaatacaaaaaattagctgggcgtggtggtgggcgcctgtagtcccagctactccggaggctgagacaggagaatggtgtgaacccaggaggcggagcttgcattgagctgagatcatgccactgcactccagcctgggtgacagagcaagactccatctcaaaaaaaaaaaaaaaaagaggcccacaaaacacataagcttcagaccccacaaagtctctcctcaatccctgtcttagtctattcacttcatccctggacttaaaagactgggcctacacattcaaagaatcgttattaacaccattattgtctgtaacagtgaggatgaggcactgagttttctttttcttttctttcttcttttttggaggtggagtcttgctctgttgcccaggccggaattcagtggcatgatcttggctcactgcaacctctgcctcccgggttcaagcaattctcctgcctcagcctcccgagtagctggagttacagacgtccgccaccatgcccggctaatttttgtatttttagtagagacggggtttcacaatgttggccaggctggtcttgaactcccgacctcaggtgatccgcctgcctcggcctcccaaagtgctgggattacaggcgtgagccaccgcgcctggctgaggagcgaagttttctaaggttccttcttgtcctgtgttagccctcagagaggtaactcactcaccttctgcacctagagagcctcatccccagggcaatcatccccagggcagtgctggagatacagcagtgaccacaacagtcccaggtcagcctgcccagttggggagacacacccatccctgacagtgatgacacaaagtgagcagggatggggtggaggagctgagggggcaagggaggataggaaaagggctcagagagagtttcctagagcgagagctactgttacagggctgagacctagaggaaagtggaggaaaccgataataaaatgataattatatattcagaatatcccaatgcaaagcttactctttttccaggtaatatataaggttcataatcacagcgctccaaatattgaccacttaagcatgaggcccagggcctgatgttttccattcgccatctaactacgtcttcccaataacacagcggggcaaaacgggaagacgaagaacgagtacgattatatccctggtttataaaaggggagaaactgaggctcaaacatagatgtcacttgtcaccagcctggccaacacggtgaaactccgtctctacttacaaaaaaaaaaaaaaaatgggaggctgacgcaggagaattgcttgaatccgggaggcagaggttgcagtgagccgagatcgcgccactgcactccagcctgggtgacagagcgagactccgtctcaaaaaaaaaaaaaaaattagccaggagtggtggcgygctcctgtaatcccagctactcgggaggccgaggatgcagtgagccgaggttgcagtgagccgagatcgcgccattgcactccagcctgggggagagtgaggctccgtctaaaaaagaaaaaaaaagagagagagagacgtcacttgtccaggatatcttatccagtcagtagcaccacaagggttagaaccctggccagacatccacccaatttcacgggtgaacagttaacagcctctgagagtcttgtcctctctgggcctccgtaacaccctctccaaactaagggtctctcagcagatggccgggtttagagctgtacgaagacacacagctaatgaaaaattgtggaattctcagagcccgtgaagcctagcccacggatgcgaggtttggaccactgagggaacgcgcatgcgtgctaggcagggcagtccgaaggcttgggggtgtatcatagggtctcatcggaggtttgttggccgtaagacccctggaattggaactctaaaaacacagaaaggatatgagctcaggagacttgaacgaaagagttgtcttaggaagaggggtcagaagacaagggtgctgggcaaaaggctagttcttcgaatcagaatacggtggccagaaaggttcctctgacgaaagaggggcgtggttcgaagccgtacagtggccggtaaagctcaagaaacatggaacgaaaaggacgcgaagaatcggcagggagaagcggacaggatgtcccgaaaggctcatataaccgaaaaggcgggttaatgtgaagggacggaagggacagaacttgcgggaggcacatgctggccgagaaagtcctggagttcggagcatacagtgtttttattaggtggaaacaaacgggctgggagaaagacgagtacggtggccaggttggtccttccatagccggaagtggccttcctgagaggcgtggctgcggcactcttgccggatagggtggcccggcggggctaggaaagcgtgaaatctcgcgcgattgcgctgcgaagtcggggacggggcggggctggcggcgggggcggggacccggagcgggaagatggcggcggcgcaggaggcggacggggcccgcagcgccgtggtggcggccgggggaggcagctccggtcaggtacggaggccgagaggggactgagggggttcttccccagccggggggcctcccacggggcgtgtcctacctcttgtcacggaatcccgtgcactggggg

SEQ ID NO: 94782 - DNA, 50410 bp, Homo sapiens
gcagctggaggcaattatcctaagcaaattaacacagggacagaaaaccaaatattgcatgttctcacttatacataggagctaaacattgggtactcatggacataaagatggcaataatagacactgggggctcctagatgggggaaggaaaaaggagggaaatggttgaaaaactgttgggtatcatgctcacttcctaggtgagaggttcaatcatatcccaaacctcagcatcacataatatactatgtaacaaccctgcatgtgtaccctaccctggaatctaaaacaaaagttgaaatttttaaaaataaagaaataggccaggtgcagtggctcacaccagtaatcccagcactttgggaggccaaggagggtggatcacctgaggtcaggagttcaagatgagctgaccaacatggtgaaaccccatctctactaaaaatgcaaaaaattagcctggtgtggtggcgcatgcttgtaataccagctacctgggaggctgaggtaggagaatcacttgaacccgggaggtggaggttgcagtgagccgagatcacgccattgcactccagcctgggcaaaaagaacaaaactccatctcaaagaaaacaaaaagaaagaaagaaagaaaatagaaaaaaaaattgacccctaaaaaaatttttttaaatagcctatagtgggagattatgaaaaattatattatgtagaagaaaaagtatcaacatgaatgtacaaatcaaatttttattatttattaatttttttttgatggagtcttgctctgtcacccaagctaaagtacagcagcgtgatctcagctcactgcaacctctgcctcccgggctcaagtgattcccttgcctcagcctcctgagtagctgggattacaggcgtgtgccagcacgcccagctaatttttttgtatttttagtagagatgaggtttcaccatgttggccaggctgctctcgaactcctgatctcaggtgatccacctgcctcagcctcccaaagtgctggaattacaggcgtgagccaccatgctcggctgaattttttattatctccaacataagagtctcacttccagttttatgaatgttcaggagcccttagggagctgcctgcttcaaaactacacctgggataggacacattttctgaggtttcattggtctcacaagggtaggatagctctccacagattagacaaaaaaaaacaaacaaacgaacaacaacaaaaaataaaccatgaatttagcccagaccaggaagacactggaactgaaatggaaaggatctggagcttaagccatctgaagatttgagaagaaactggaaacgtgggacagaatcgctggaaaataaggtcagggagacaaagcatggcctgagtaggagggagctaaatcaacagagagcctgcttaaacaatctggctgccagaaggtgtgagattgctctgagattggattcctaaagcaacattgctgtagggacactgagccttgaaacttcagtgaggtaggggatctgacactctctctcattgtgagccaaaactgtgactgaagtggtactagattaagaatatgccttgactaccagagagatgcaaactttctagaggaaagccttcccaaggtaggcccacagaactcccacaaaatctgttcaagctgccaactcatatatactagaagacaaaccactatgagtaagagtcagtggaaacaagaaaaacgtcttccgtcacttaaaaattgtcagatacacaacatagaatatctgagtataaaaatgtttaaagatatagaggaatccacttttgtagtgttgtagtaagaaatttgaaccaacccttttactgaggtcagcaaaggacaaaatgttcaacatagcatctgctctgattcctttgcctttcaataattccatctcttgtttgataaatttgaaaaggttttttagaactacgtttttgggcagaagggtgagaatagaggatgagaactatgatctttttattgatcatgatttgttgtttttaaatgcaaagaaagcatttccaatttgattttttctatattaattttaatttttgtaatcattatcaatagatattcttatgcagaattccctgtgacaattttgataatatcatattcacattctaagtatcagaaggtatttgaactggaaatgaaagtatttctttaatcatttgaggattacagtgatataggagaatcatttttagacccatacaatgtataattgtagcatataattatgtggatacattacaagatataaatgattcatatttcatattttaaatggtatataatacattaggaaaaatatcaatgtttatatattttaaaagagcctagtcaattaagtaggaagaaaatctcacatgtacttttaaggcaaataatctgtggaagatttctttttaattatttaaccaaaaggagagaggtaaacagaataacaataagaaaacctctaggtcaaaaaagaaaattagatctggcctataaacctaagattaaatgcagtttggcatgacaagtaatttagcaaggattggaggttgatggttatgttctgaaggagaacacacacacacagacacacacacaaacacacacgtctgacagaagcagaaagcaaaaaagaaataagtttaagaattattgttcttccagactggcccacatgttgaaaccctgtctttactaaaaatacaaaaattagccgggtggtagtggcatgcacctgtaatcccagctacttgggaggctgaggcaggagaatcgcttgagcctgggaggtggaggttgcagtgagccaagatcgtaccactgtgctccagtctgggtggcagagtgagaccctatctcaaaaaaaaaaaaaaaaagaattattgttcttatttataattaagagaccgtcacaaccaaaatagcaaaaactgatattgtaagtcatcaagccccttggccaatctaccattcttgggctttccatgttcccatccacactgcagggaccatagaacataaagcatggagtagaactcatatgtgagtgttaatctgtaccccaccagtactatctgtgtgacttgaacatgtatttaaacctctacctgtctttcttttcatctgtaatatggaaagtataataacaccagcctcatgaggttactggagcattaaatgagaagctacatgtaaaaacattagtatataggaactactcaaagaaagtattcttctttgttctacatcactacttgactaaacttcttagaagtactattttcacaaacacctactcacctctaagaatattctctcacattcatttcaaacacatttgcttctatttcaaggacctccctccctaactaccatccacagttcccacttgccctcagggtatattttgttttcagtccatcttctctaggaaccctgaacatattctcattctcacttttgttccgagctttccaagcttagccgaaaatcagcttccttttttatgtatgtattgagacaggatctcacttgttgcccaggctggagttayggtggtgcaatcttggctcactgcaacttccgcctcctgggctcaaatgatcctcccacctcagcctcctgagtagctgggactacaggcatgcgccaccatgcccggctaattttccgtagagacagggtttcaccatattgcccaggctggtcttgaactcctgagctcaagtgatcctcccacctcagcctcctaagggctaggattacaggtgtgagccactgcacctggcccagcctcctttaaagccttatagactaacctcctcagagaatgtaatatctattgcaatgatatctcaccagtattgtttcatcaccttttgtgttttgttcaactggtttgctgctatttacaagctgttgagagcaggagctcttccagccttatttccaacaatataatctatttctgttgctaggagaatttatagctttccaaacagacaatgaatggtctttcactcatttgtctactggcacacgcacaaaaaaattccttagaccttctttcctcttctccaggcaacttcaagcttttgccttgagagaaggttgaaaattcagttcaattaccgcttttctaaagctttctgtaattgttccctaggaggggtaaggcaactaacatatcgctcccataccgtactattgggcaggcacttttaaaacttaatcttcacaaaggtaggccttttattgattttaacagatgaagaatttgaggcttacggaggtttgatgattgcccaaggacatagctagggggttagcaaacacaagaacccttgctttctgatacaggatgttaccttccacttgggttcagccgcagtagtatgtacctttaatagacacagtatgatcatttagcacatgctattcaaggtatctggcagctagcagctgctcatgttacctaactgaatttaggtcctccctcaagtacggcaaagccaaacactgacattggggtttgtagtgaaagtgaggcatttattgcattgcaccaagcaagaagaatcaggcagctcatgcttaagaccccaactccctgatggtttacaggtaaggggttttttgtgtgcttttttttttttttttgaaacagagtttcactcttgtcacccaygctggagtgcaatggcgagatttcggctcactgcaacctccacctcccgatttcaagtgattcatctgcctcagcctcccaagtagccgggattacaggcgcccaccaccatgcccagctagtttttgtatttttagtagagaaggggtttcaccatgttggcaggctggtctccaactcctggcctcggcctcccaaagtgctgggattacaggcatgagccactgcgcccagcccaggtaaggatttttaaaggcagggaggcagaggttacaggcaaagtcataaatcaatacatggaggctatacgtgggtttgatctaaaaagccaggatatctgaagcagggacccacaggtcatagatggattcaaagattttctgatttgcaattggttaaggaggcaaagctttgtgaattcttccaggctcctcaggaagaaatttagaacaaagataggtagtttgagatctccatgccagtggacaccattttccatttggtgaggtccaggtttctgaaaaacaactcagggacatatgtcgtctttagtttctatagggaagcaaacattttgtgaatctaacgtccttggctactgtcttaagctattattaccttcttgcttatcaggttgctcattgacttattgaggaagttaggtgcctggaatgtcccttcagggaactcaagattttcctttatttccatgcttggggaggggggtgcctagatggcccctaagaggggtccctgttctgtctctcaataaatatttgttgaatgaacaaatcattacaactcagtacacattgcagaaaatatagccaagagctctggagctggaagggccacagattatcctacagaacaatcatttcacttttctaatgtcgaaagggaggattcgagatgttaggggctacaggtgaggctggaaataattaatttactccatcaatattgaatgcctgctattgagtgctagactctggggagacaatgttaagggaagcccaagttttccaactccctgtccagagcgctgcaaagtactgcaggaagctaaagtgaggacaaagttcccagagatcaggatatttaaagggagaaccagcagagcttggtctggggcagggtggggaaaagagggaccctggcctcctcggaccgtttctccgccaagccacgcgagggcgctgttctgctcctagggcgccgtgtcccggcggcgccgcctgctcgccttttmccggcggaaatgcccgagcgatgacggaaacccggagggaggggagagaaagagcgagagaaggggaaagacaagtcgggagaggccggtaggcgtgaggcgggcctgaagcggcagcgggcggccttcgtccggcgagagctaggccgaggacccgcgccgcgctccccggcacctcaccgcgtccttcaccgactcccgcggcgcgcggccgggcggggaagggmgggcgggggtctcctccaggctgcgcgctcggagccgcctgctgggcttgggcggggcgcggggcccgcggccgccctacccggctcagtcctccccctgtgggacctggcgacggcggcggagggagaggggagcggcgcccgggccggggccgggggcgggtggggaggggggagggcggcggccgggctggggctcgggatccgcatcgggatcgggccgccatggacgacaaggcgttcaccaaggagctggaccagtgggtcgagcagctgaacgagtgtaagcagctgaacgagaaccaagtgcggacgctgtgcgagaaggtgagggcgccgcgggggcgagtgcgggagcgcggggctgggacgggccgccgctttcctgcccgccccggtcccgtccgcccctggcccggcgcggcccaccgggggcctgcggggctgtgggtccggctccggcgtccacctaggcggccggcccatcggttcagggcccggggcgttgggctgccctcgcctgccccttccacctccgcctcacgcccccggccggctgcccagatcccgggcgtggggggctcgggtgcggacgggcggggaaacgtagccccctgagccaagcaggaggttggtcggggtcgcctgcgctccactggggagttcctgccactctagcatttcccgagtggactagcgagagcgacgtccgaaaaggaccattttcagaccagtttctgaaaatgcaactaaaattaaccagaatgtcgtgcgtattaatgaacttgttaataaatgcagaatttttgtcaggtgaacggggcacctcagaaatcactaactcaagccgggcgtggtggctcacgcctgtggccacagctactcgggaggctgaagcgggaggattgcttgagcccaggagttagagaccagcctgggcaacatagtgaggccccgtctccacacacaaaaaattttttttaattagcagggtgtgacggcgggtgcctgtaatcccagctattcgggaggctgaggcgggaggatcgcttgagcccaggaggtggaggctggttgcagtgagtcgagatcgcgccactgcactccagcctgggcgacagcaaaaaaaaaaaaaaaaaaatcgctgattcttgaatgtgccaagcgtttgtttgcggagaggtaggcgtgatggccaactgtgatttttaaaatagaggttgactttggtggaaacagatggtgactggtctttgtgttgagtggctcttggaagtaaagtgttgattttcagaaacgagagccgatcttaagtttgggaacagtgtttgctggaaatgataagtgggatgtgtgttttcatgcacgatagcactttgcagaaagttatttttgtttttaatatatataaagtttttttccaaagaataataaaacatgcgggtgatcagttcgttcttgtacatcgtgagtgtgtgatcttcactttgtaaattctgtatccattgttttcttaacccctgaaattatttcgatctctccatctttgaagtctagagttgtccacattcatcctttacaaggtggactaaataattttcatgtatttttaggttaaaaattctcacttgaagtgcatgaagaagtaacgatgttattttaaaacgtaatctataaaattttcttaaccgtaatgtttagaagtcatgatgtggcagaagtgcactggagaaggaaagattttgttagtctgattttagggtactcttaagatcatgaaatttacttagaaaaggagcactaatagatggtgttaagttacaatatttttaacgggtgtaatgttggtcggggcctttgtgtattaagtaactatttgttaacacaggaggatttatttttgtaaatagaagtgccaagcaagtggtatttttctctttctgaaacaaactgcttacttgtggcttcagttgacattcatttttattgtgataacctgtaatttcatgagtcttaaaatttatgccttaaacatctctctccagctctaatgcgaagtgaaatgtacaggtttgaaatgatctgagtcagttaacctgactatgagcatcagaatacagacttgaagttatgggtaaagtgttagttgaatcagtttttcccattgacttcctttttttgttttatttttgttttgagacagaggctcagtctgtcgcccagactggagcgcagtggtgccgtctctgttcactgcaacctccacctccggggttcgagggatcctcctgcctcagcctcccgagtaactgggattacaggtgcatgcagccatgcactgctaatttttgtatttctagtagagatggggttttgccatgctggccaggctggtctagaactcctrgcctgaagtgatccctcagccttccaaagtgctgggattacaggcgcgagcctcgtgcacagcccctattgactttctaataattttaagatgaacttctagagaagaatattgtaccactgctgtactttgaaataatcacaccggagtgtcaacgatcacttgaggaagctttctgtatttgtcaaaagagattatttttacttcggctcctaaataaatcagactaacagttcctaggacttcacaggtatatttaagattatctcttgtatcttactagccttttttgggggcgggggggggacgcagtcttggtgtgtcagtcaggctggagtgcagtggggcaatcaccgctcactgcaacctcaacttctggggcataagggaccctcccacttcagcctctcaagtagctgggaccacaggcatgtgtcaccacaccgggataatttttttattttttttatggggtctcaccgtgttgcccaggctggtctcgaactctcgggctcaagtgatcctcccgccttggcctcccaaagtgcagggattgcgggagtgagccaccactcctagcccatttttttttctttgaatatttgtccttacccacaaagcatgaatttgttagtgaaattcattcatctttgttctctacccccattgatggagttgccaatgggttggaaaagtgtgataatactcatttctctctactctttttgagccgtgcttagttttgcagccctcttctggcagctatgacctagctttgtggtttgtgtatgtatgagtatatatacatatatatgttttctgaccttagtttctagttccgttttatatccctaccccatcctccttgttgatacataacaagtgtagcattcatcctgtctgagttccagtcctgcttcacagcttgctagctgtcagtctttctgcacctctgattccttatgacagagataatatgtaccaatcctcccgggttggttgtgagtgctaagatatatattcattggccgggcacagtggctcacgcctgtaatcccagcattttgggaggccgatgcaggtagatcacttgaggccaggagttcaagaccagcctggccaacatggcaaaactctgcctctactaaaaaaaaaaaaaaaaattagctgggcgtagtgttgcactcccagctacttgggaggctgagacacaagaatccctaggaggcagaggttacagtgagcagtgatcataccgctgcaytccagcctgggtgacagaatgcagttttctcaaaaaaaaaaaaaaaaaaaaaaggccatgtaaagtcctaatgagaagtaagcacgcagtgaatgttaactaaaggaaggctgaaagttttaatcataagtgtcacccattttcttttgtaagaaatgcaaaatgaatagatgtgccaatatgccttttctttggtaaatatacttcaaaggagttttttttatatagtggytatagaaccctgaaaagtagtggtgcctgttatgtgaaccacacagtactggaattaatagcagttgtgtgaagtatctttactcctgacttggtctacttaatacttgccctacctttctagggcaagagtagcaggcatgtagaaagaaaatatgagaaaaataaagagtcaaacctaattatataaactatctttaatccttgtgattcaatttttgggttttttaaaaatacctttttttattctattggaaatactattctataggaagttacatcgtatgatggtggtttttccttaaatttctattctaattcagattgcctaaaaactgaaggagtcggctggtcatggtggctcacccctgtaatcctagcactttgggaggtcgaggtgggcggattgtctgagctcaggagttcgagaccagcacgggcaacatggtaaaaccctatctctactaaaatacaaaaaattagccgggcatggcggtgtgtgcctgtagtcccagctactcgggaggctgaggcaggagaattgcttgaacccaggaggcagaagttgcagtgagccgagatcgccactgcattccagcctgggcgacagagtgagactcygtctccaaaaaaagaaagctgaaggagtccactgaaatcaagaccagagtagtactagtaaaggcctattttgaggtagttgcaaaaataaaatctatcctagtgccagtgggtgaatgactacaaaaaataaagagtatgaatggtatggtgtgtctggcttccaaggttaatttctgcctagtgaaaaattgtttgcataaaatagcaaggcatgtcttctgagaagactagctcttaacactagcttaaattagcaatccagcttttgaagctaattgtgaatttgactcctcttgtgtgtgcagagaaattgcttctgtgattcattcctgcatcagcagtatgcagttattttagargattgtgtgccaagagagccaggctggcactgctcaggacactctgtgactagaactatatttaactgttgtctcagaaagagtaaaaattttaagctctttgacctgttaaattttataactgaagaaccttggtgatgattctttaggtggggagggaaattcagccaatgtgtgtgctggcagatctttattctgatgattataaagtacgtattgagaaaaatgtcgaggcttgtgtagaagtataaatatgtaaattttatattgaactgatggaaatgtttctaagtcctggcgttagccttgaaataagcagaaataactttaggatatgacttcattcctaatgtgaaatagtatgcttgttcctgaatacccaaaaccatcttaatgaagattagattctggtaaaaatgagtgatttttgtgaattgagaaaatttttttagattactttctgtgattgattacagcttaaaaaataaaaatagtggtcttgacaggcaaaatgcctaactggtacttccatttttaatttccctcgaacaaaaattagtgccagctttggtggtccattgataaaatctaaaatgcagtgataaaatagctcctttcttastataatgaagaatggcatgattacagtgaaatagagggtcaagacccaattctagtgactgaacaaatcattgttttccttgctaagccagcctcttagtggacaggtaaagaaattaaaccaaactagactagcatgaactattgctaatggcgggaaagtggactttgttacatttctctactttatatatgacgtgtcaaatatatatgactaggtaaatatatttaatacttaatactgccctttaacaataatatacccttgccataagatatttacctaagtagataaagtgaagatatttgcaatgtaaaatttcttttcattgcctgcttttattgccgtgtgtgccttttattcttatttgaagatcttgcagaaattttttcttcacagtcttttctcttcagtacgaatgttataaaagacttggtgaatgaagcccttccttggtaaaaggaaatgaaaatgccagaaattgaagatggaattaatgcttaattaattttcctagattgttttctgaatgtagttttttctaagaagaatgatattaaagttacagaagtaatctgtataagaaatctgagtctgtgttaaatagaaattttttattgttttgaactgatttccttcaagtaaatgtaatgaaatgtaaacctaatccagattgtttaaagaaacttgtatgaagacatcttttcttccttaatgaccaaatgtgatctaatagttcctgtacgttacttttcaactctaaatttcattaataatcatattaacggccgggcatggtggttcgcgcctgtaatcccagcactttgggaggccaaggcaggcggatcatgaggtcaggagatccagaccatcctggctaacatggtgaaaccccgtctccactaaaaatacaaaaaaaaaaaaatcagccaggcgtggtggcaggcgcctgtaggcccagctactcgggaggctgaggcaagaggatggcgtgaacccaggaggcagagcttgcagtgagccgagatcgcgccactgcattccagcctgggtgacagagggagactccatctcaaaaaaaaaaaaaaaaaaatcatattaaccctgggaaggagttctgtgtattacagattccgtttcctttccagagaatgggagagctcaagcactcaagcttagaactggtttgctgttgtgtcctttgtaatttagaaatatttatcatcattccttgtaaactgttttttgactgagatacttttgtgatcaaatgaattaaaagacaatcctgaggtgcaacctgagattcctgacttgcgttataatagcatcatgttacaccaaaaatgtggaagactccattggagatctattaagtgaatattttatacaaagacaatcgtttttatgttgagactgggatacagtggtgaatttaagtgttctcacctattcaatcttagaaaaaagcttatttgaattaactttttagcatagttggattttttttaatatgcaggatacggtgtgtaggctgtagtttaattttgctcaaaatctcttttttkttgtttttttgtgatggagtctctctstctgtcatccaggctggagtgcagtggtgccatctcggttcactgcaagctccgcctaccgggttcatgccattcacctgccccagcctcccgagtagctgggactacaggtgcctgccaccactcccggctaattttttgtgtttttaatagagatggagtttcaccatgtgagccaggatggtctcggatctcctgaccttgtgacctgcctgcctcagcctcccaaagtgctgggattgcaggcgtgagccactgcgcccagctcaaaatcccatcttatagagagggaaataattttcatcttcgtttaaaagagttccgcatgatatttatgtcctggatgatgagagctcagaattggttcagtgtattctcgacttggcttgagtagcaaaagaggcgcttgttcctgtgggcagtgaagaagaaaggagaggattggttgacagaatgctgccactgtgtagttatcccgtacattcaacagattttagttgaaccactatgtaccagactgttcaaagtgctagagattcagctgtgaagaggggacacgattaatgaacaccaggcattgattcttgctggcaagaaaaagcagaagatggggacagtgatgggcttgaattcaagagactcttttttttttaatagggtggtcatagaaaaccttccaaattctttataatgtggtttacttttgtaattaaaaaggattttgcgagagttagaaggcacagtccctaacactgttctcacctctgacaccatcttcaaaagtttagtcatgatgtaccttcagaacagcagacaaaaaataaagttcagtgaactataaattacagggaacactgcccaggactgcctcagttttggcaccaatatactagttcagtgggttccgaaaaccactcttaggttcagtgattcacaggaatgactcacagaactcactttaagctgttacactgatgattatggtttattacagggaatgaatacaatttaaagtaagccaagggaaaagactcataagggcagagtacaagaggggctgacatctgtagtgtccagtcctccagagaccaaactgatagtgggatcatccaaagtccgcatcgtgagtcacattgttaatggtccgcaggtcagagcccccaggcagagatctctttaccaagcaggaaattccaggggcaaaggccagacctctcctcgggtgaggttaattcttcactatacagatttttattccatagcaaattctgagggacgagaaccttaataataataaatggcaataccaaaatacatgaagaaaacaaggctagatttatcagaattgtggagtgtgtgcaatgtgagggatttttccagttgagttggcatattctttttttgttttaagtttgtattttgtcaactgggcacagtggcttatgcctgtaatctcagcactttaggaggccgaggcgggcggatcacgaggtcaggggtttgagaccagtctggccaacgtggtgaaaccccatctctactaaaaatacagaaattagctgggtgtggtggcacgygcctgtaatcccagctacttgggaggctaaggcaggagaatcacttgaatccaggaggcggaggttgcagtgagctgagatggagatcrcgccactgcactccagcctggacgacagagcaggactccgtctcaaaaaaaaaaaaaaattgtattttgtcttttcttggttgtataaattctsmaaaagttagccatttaaaaatgtttaaggtcttattttctactttgtgatatgtgtgtataatttttactgtgcaagttttagcatttttgtatagtctgattgtccatcttttccataaactttaagcgcacatgagaatcacttgggaaagaaataggaaattcatgttccttgactccattccagagactgattgacatgtcttgggcaggtccaggaagctgctttttttttttttaaaggcaggatcttactgtcgcctaggctggagtacagtaacatgatcatagttcactgcagccttgtactcctggactcaagccatcttcacgcctcagtctcctgagtagctgagactacaggaatacacaaccacacctggctttttttactcatttttttgtagagacagggtctcctcatgttgtccaaggtgatcttgaactcctggactcaagtgatccttctgcctcggcctccaaaagtgctgggattacaggtgtgagccactgcccccggcctcctttgtgctttcagtgtcatgaaatacctgtatttgtcaagaagattaagaccatgtcttaaaaaaaaacaaaagctagtgagatacaagagataatcttaaatatacctataaagtcctaggaactgttcgtctgatttatttaggagccgaagtaaaagtgatctttcctgacaaatacagaaagagatttttgctagcatcacttcttccaaaacaattttcctcatttatgcaataagtttggattttcacttctttatgtcactaagtttctgcgtgttgctaagttcctggctgcatatttggagtctctccaacagcagcattgtcagcattcccacagtcggttcttccgtgtacttttgatttgaatttcatttccagggttatgtcttgtgtgtttggcttctctcttttagcataatatatccaagattcctccatattgtagcatgtatctggacttcgttcctttttatggctgaataaaattccattgtgtggatattttataattactgccatctggaatttgttttgaagtttaagaagccaggttttttccgtttgaaaaagtaatacagaatttgttttttaaaatttcgagcattggccagtcacggtggctcagacctgcaatctcagcactttaggaggctgagtgggaggactgcttgagcccaggagtttgaggctgcagtgagctacgttcacaccactgcactccagcctgggcaacagagcgagaccctgtctcaaagaaaatttgtgcaagcacctcagaaaggtagcaaggaaagcaaatgcactctacccaccattcctgtcccctgccctcctacctcccagacaaccattatgtttctgtatataatctcctcagccatgttcttcatatgcaaaaaatatgtggtgtgcagaatgtttgtggtgtattgggagctgttttgtggaataaacttggcttctggtaaaattattgtttaatttgtgatctcaggaaaagaaactgaagggtataaaggccttaagattacacaattagattaaaactgaagagaacccatgttttctggaagacttcattgcatataatctcattctaattaattacaagcaaggagaagaaagtatgggctacattgtccataactcttgggaatcctaccaggctataagcagaaaaggcatttgtagaagaatacatggtagcctagaatcaaaagaaaagctggagaaccaagcatgagcattttgcagaaattaagggaggttagaggtgcagtcagaatcataccttagaaatgatttagaacactagagagaacacttctgttggaatagaacttgccattgtccctgctctttagagttgcttcaaattaagagtctgggctgggcgcatctagttggcataaagtaatctggggctagagtaactttgtgattcctacagtgtgtgtacaaactattgtgtgttttgaaaatcgctacaggttgagtatccctcaactagtgttaaagtctgttgacaaaaatgcagagtagcaggaaatacagtgaaactcaaaatccatgttttaaatactcttcagattatcaaatcactgaagaggcagagaactgtctgtccctaaaattgtgctctctcccccaccagtctaagctgtcatctgcttttactttaagcttcatcctgtttgactttttttttttttttctgtgactgagttttgctctgtcgcccaggctggagtgcagtggcacgatcttggctcactgcaagctccgcctcccaggttcatgtcatattctcctgcctcagcctcctgagtagctggggctacaggcgcccgccaccatgccgggctaattttttgtatttttagtagagatggggtttcactgtgttagccaggatggtctcaatctcctgacctcgtgatccacctgcctcagcctcccaaagtgctgggattacaggcatgagccaccgtgcccggccctgtttgactttcactgtgctgtgttgttgccttttttttcttttgtctcactctcacccggggttaactgcaaagtggtgcgaccatggctcactgcagccttgaactccccagctcaagctgtcttcccaccccaccccaccctcctaagtagctgggactataggcacacaccaccatgcccagctattttttaaattttttatagagaccagaggtctcactatgttgcccagcctggtctcaaactcctggattcaagctatcctcccccctcggcctcccaaagtgctggaattacaggcatgagccaccgcgccaggctgccctgtgttttagctatgctagccatccggttgtttcttcctctcggtttgcattctgtattagtcccagttctcatctcttagctttcgtggttttctgtttctaatttctcatggacctggaaactcggtaaatagcttgttggaattttgtagataacagtaggcccagaataaggcctgagagtctcttctggtgggttagatacatttttatgatgtctgttttgttacttcagaggcttttaaatttttcttcctgattctgggatcttttgctattaggcagagaggccagatcgatgagccattagtgaacttcgatttagtcagaacatttcatttgccagtgtttaagcataaattctgtacttcagggccacctaatggtattttctaacttaattctataaatataaaataattggaataaagaaattcaaggttggcctatgaattggtgtaagaatgtttgttcacacaagaatttgcataatttgtgacttttttctttcattgacctttttaaacttgtgaataataagattattctttttaaaacacagaccttctgccttgaagatttgcctattctggacatttcatgtaaatggaattgtacattatgtgatcatttgtgactgacttcttgcacttaccataatgtcttcaaagttgtagcatgtatcagtacttcatttcttcatagctgagtgactattccattgtatgaatatgttatgtccattcatcggttgatcaatatctggtggtttctactttttggctgttattaataatgctgccatgaacatgtataaactggatttcatttctcttgagtrtatacctaggagtggaactgctggattacatggtaattttaggtttaactttggaggaactgccagacagttttccacagcagctgcaccattttgcatttccaccagcagtgtatgagggttccagtttatccacatgtttgcaacacttattaactgtcttttttattatagcctttctaatgaaagtgttatctcgtggtttggttttcacatacgcttttataaggcacttttcaagtgtttttttccccaaattttcttttaatagataagaaatgatagttttaactttgtaattgttgatttcacttttctaacaggcaaaggaaattttaacaaaagaatcaaatgtgcaagaggttcgttgccctgttactgtctgtggagatgtgcatggtcaatttcatgatcttatggaactctttagaattggtggaaaatcaccggatacaaactacttattcatgggtgactatgtagacagaggatattattcagtggagactgtgactcttcttgtagcattaaaggtatgattattgaaattcaatttttttttcaagatttaaaccaggcaaaaggcaagaatgacagtattgcatatcatctgttttatggtctgttcagtttatagccccttaaaataataattggttttacatctttttaaaggagaggtgaaaaggataacttctgtgtattcccgataaatgtatcattctctcgagtagtccatagctgaagtcttggaatcatatttgactttatcacttatccgttatattgagtcagtagacaagtctttttaaatccttgctttgaaaagtctgttgttcctgtctctttctattttcacacagtttatcacttcacaattcgattgttacaatagcttagtaactaatatttctgcctccaagatctgatcccccccaaatccacctggcatacgctggccgatgaaatctcttatttaacccttttatattgttacttcctgttgattgcctgttgcctatagaatcaaattcaaactccttgcctggccttctatagtctagtctgaatttttgcctgccagcggttggtagcataaactctggctcaaatcaaagtttcttcttattcagtgctctggactctgtttatttccatagtcgatttcccccacgaggttatcctgtccctgatttcttacctttctgccaagactcagctcaggtctcacttcctccatgtaaccttcaaccattttagccttattccttctgctctaaattactatgaggaaacttattctcccagcccttatttatgctgcaaaagtggcttattgccttctattacttattattttacatatgtccttagtgaggttagtccctcaacagcagaagccatatattacatggtcatgggtcacttaactgcaggcatacattctgagaaatgtgccattaggtgattttgtcatctttggaacttacacaaacctaggtggtatagcctactgcacacaaaggctgtaatggtatagtctcttgctccagccaacatcgtacatgtaatctgttaacaaaaatgctgcccagcacatgactgtacttgtgtagatctggcatctggctttatagcaccaaacttacgttagacacataacggatgcttagtaaaatatgtatgaattgaagtacatacttgcagcttttagcttaatttgcagaatccagtgctttttcgtatttcttatcagatgcattcctaactaaatagtcgcttatgttttttaatagaaaggaaactattaatacatttgaaatcttgcccagttttgtcaagggcctgtttttgtgttattattggcaaatccaatcttcctgtgggaaataaaaattgaaaagggaagaagttaatctgtagagtttgtctcagcttcaaacctgtgattttcactactcattcagcagtaagaagtcatagtgttctagaaagatttaggaaagtagtaataatttgatgatgaagataatagaagcaaagtatcagatacaagtttattatagtaatataagtattagttaaaggttctgatgagggttgtcgaaacctgatgaaaaaggatgattataataaacacgtcaaatgttaaccagtaagacctggttatgaataagcaagttttttattttgaaactgaaattaacatttaatatactggtggccaaaagygccgtgtttaaaaatgggtcagagactggtgtacttcacatgacactagtaaaaatgtgattttactrtgggttttactccttttcttccaggtgcgttatccagaacgcattacaatattgagaggaaatcacgaaagccgacaaattacccaagtatatggcttttatgatgaatgtctgcgaaagtatgggaatgccaacgtttggaaatattttacagatctctttgattatcttccacttacagctttagtagatggacaggtatgtatatgtgtgcttacatcttgggaggaggtaaatggaagcagagattgactattggtaagctggggtctagattcatatgacctgtgtttctgcatctcctcggccttttcctcctccttcccttatacttaaaatttcaaagcagggaagtggataagtttcacatacatttggaccagcaaattttcctgttgttctcagatatgtatgtaaatcttttaaccaaagaatatgctgtgctttttaagatatcgataaacattataaataaatgtttaagacactgatgtatagtactagcaaagcaagatgttatttaaaactatctctgcatatacatgcagtgtctgctggttaccatgaataacttttcatttctattttcatggtaactgcaaatgttatattgtgtattacaccttccctgagaagtgaatgcttggctgggcacagtggctagtactttgggaggccaaggcaagaggaccgcttgagttcaggggttcaagaccagcctgggcaatgtagtaagaccctgtctctacaaaaaaaaaaatttaaaaattagctaggcatagtggcgcgtgcttgtggtctagctactcaggaagctagaggtgagaggatctcttcagcccaggaagttaaggctgcagtgagccgtgatccagcctgggcttcagcctgggcaacagcaaaaccccatctcaaagaacaaaaaaagaaaatagaagcaaatgctatttctgcatttgctgtaacaagtagtgcagacatgtcatgaaacattcaaaagtataagaagaaattatgcaaatttcctatttcaatttctagagataatcactgtaagcatgaactgatttaaatttaaatataaaacaaaagccgggcaagttggctcctacctgtaatcccagcactttaggaggccaaggtgggtggatcacctgaggtagggagttcgagaccagcctggccaacatggtgaaaccccatctctactaaaaatacaaaaattagccggggatggcattgcatgcctgtagtcccagtcccagctacttgagaggctgaggcaggagaatcacttgaacctgagagagacagaggttgcagtgagccaagatygtatcacggcactccagcttgggtgacaaagtgagactccatctcaaaaaataaaataaataaatataaaacatataataaaactccataattcttaaattatgaaagcccagagttgtcaagaatgtaataaattctctcttagactgctcgtgggaatataatttggttataactttccctgtgtaatcctgacagtcttttttctcagccatgattttggacactgccgtgattaatttgaaaggacgatactttgcctggacttgttaaaagaaaatgtgaatttaaaagatgttaaattttaattaaggttgtttttaattgttttgaagcaacatagtcttcattaataataaaattgctggacagaatgatttttaaaagacagcctatcagttttaatgaagtatctagtttttaaaatgggtgcgttagtagagcttttatatatttttcccttcctccttccttcctttctttctgaaaagttactagaaaagaaataatagtgaacaaaactgatctagaagaaaagatggaaggcacataaaacactaggaatgaaataaggcataattataactatgcaggagctcgtgtatcacaagaacaggtgcagctttagtgcactaagtttgaaaagctgaatgaagcttactatagtaaaataccagttattaaaattggcttgcagaaattcgtccaatataagtaaacaaccaatagcaaccaggtgtaaatagttttataggctaattctaccaaacctttaaggaacatataatttctgtgttctagaacttgggaaaagatggagagttcaaaactcacaccgtatgcctagtataacctcaatgccaaaccagacgtggcacgcacagaaaaataaaatcagaccaaagtcatttggaaaaaaaattcctatatttatgattcaaaactcagttattttataaaataataatattaagtggataaagaaacgccagttgtactatcagctaaacattagaaaccttctcatcaggccrggtgaggtggctcatgcctgtaatcccagcactttgggaggccaaggcgrgcggatcacctgaggttgggagttcaagaccagcctggccaacatggagaaaccctgtctctactaaaaatacaaaattagccaggcatggtggcacatgtctgtaaacccagctactcaggaggctcaggcaggagaattgcttgaacccggaaggcggaggttgcggtgagccgagatcacgccattgcactgggcaacaagagcgaaactccgtctcaaaaaaaaaaaaaaaaaaaatcaaaatcagaaagaaaatgcttgttaaaacttacgttattctctctgattcagaatacctagagcatggacttgaaactaggtagtttacaaaaaacaaaacagaaaacatttgtattattccattttattttagaagtcctggccaatgcactaagcaataaaaagaattaaaacgtataaacattgagaagaaaaaacaaaaatagttttgcaaatgacttgattatgtacttagaaaatatgaaggaactgaaaatttattgtagccagtaacaggaatcagagtgtttgctgtaagagaaacaaaaaattgtatatatcagcaataaccaacagaagctgtaatgacagctgggtacagtggcatgcacctgtaatcctagcttcccaggaggctgaggcaggaggattgcttgggcccaggagttcatggctgcattgcgcagtgatcaaggctgtgaatagctactgctctccatcctcagcagcacagcaagactccatctctacagaaagaaaagaaaggagggaagtggggagggagaaaaaaaagaaagaaagaaatttaatggtaggtaccaaggatggggataccattgaccagagaaaaggaagggagggagggaggggaaaaaaaaaaaaagaaatttaatggtgggtccccaaggatggggataccattgaccagagaaggggtaaagaagaaaaaatgatggacaaaatatgtttaaatgttggcactatttggactgacacttttaaccattatttactctttgttaactgtttggagttagtaaaacaaatacattctcttttgttaattcatacatagatattctgcctccatggtggcctctctccatccatagacacactggatcatataagagccctggatcgtttacaggaagttccacatgaggtaaacttaatttaaaaaagaagaagaaaggaaaagaaaatataaccacattttgaggatgataaagtatgactgataataatttgtaacatgtacttatttttcttggccagggcccaatgtgtgatctgttatggtcagatccagatgatcgtggtggatggggtatttcaccacgtggtgctggctacacatttggacaagacatttctgaaacctttaaccatgccaatggtctcacactggtttctcgtgcccaccagcttgtaatggaggtatgtactttcctgacagaatgatctttatttcagattagtatatacttctgtaataaggcattatgacttaactaagaaacattcctcaccatttattacctaggtgaaaagaggaaaaacttgctggttttagcaagtagggaaagcactagtagaccagagcagaattataactcatttttgaaattgagacttagaaaaaagttacaaaaatagtaccccataattccctgtatgcttcattcagattcctgactgtaaatattttactatatttgctttatcattttgtgtctctcttcctcttcacccctcacactttcttctgaaccatttgaatatctgttgcagacagatactcctttactaccaactttctatgtgtattttgtaaaattaaggacacactgtcacataaccaccgtatagttatcacagttgggaaatttgtgttcatatagtactgttatttaatatgaacactttattcaaattttgctaattgtctcactaatgtctttaatagcaaaatttaattttttgtgcatactgtatgtgcatagtcgaatccaaagattaggttgtattcattctactttgatgtggaaatcctccgattttcattgttttccacattcttgacattttggaagagtaggagcattttatcttacagaaatatccctcagttggggtttgcctgatgttttccttgcagttagggattcaatgtatgcatttttggcagtcatgacatagaaagatggtgtgtcctcctccgtgcattgtatcaagtggtcctaaaatctgcttgtctcaatgctggtggtggcaactttaattgcttagttaagatgatgtctgccagatttctccactataatattaactgttatacaactactaagggaacataaacaacataatccctgcagaccagtagggagtggcttcaagatgtttagagaaaacttcgccagcccagtagaaacaagggagcatgataaaaaaaacacaaatttacatagtaaaaataaatttaattatatcagtgattataagaaagagactaaaattttagcctgaaagagactcttagattggataaataatcaaaatttagctgttatttgggatgtacctaaaacataaatgattggctggacaaagtggctcatgcctataatcccagcactttgggaggccgaggtgggaggatctcttgagtcttggagtttcagaccagcctgggcaacatagtgagacctcatctctatataaaaaaaaaaaaaaagtcaaaaagttagctgggcatggtggcatatgtctattgtcccagctactcaggaggctgaggtgagagggtcacttgaggccaggaggttgaggctgcagtgagctatgatcgtaccgctgcactccagcctgggcaaaagggtgagaccttgtctcaaaaaaacgaggaaaaagaaaaagacaccacaaactagaggtaagagttggaaaatggtatattggtatatcaagtaattaatcaaaatatcaaaaatatagctaatgagctggcgtggtggctcgtgcctctattcccagcactttgggaggctgaggcaagcggattgctggagctcaggagttcgagaccagcctgggcaacatggtgagatcctgtctctactaaaatacaaaaaattaacctggtgtggtggcacgcacctgtagtcccaactactcggggctgaggcaggagaattgcttgaacccaggagttggaggttgcagtgagtctagatcgcaccactgcactccagcctgggcaacacaggatgtgtgtgtgtgtgtatatacacacatacatacactaatgtatgtatatatatgtatacatatatacacacatgtatgtgtgtatacatatatgcacacgtatatatacacatatacacacgtatacatatatgcgcacacatacatgtatacatacatatatacgtgtatgtatatacacatgtatatacacatgtatacatatatgcacacacatatatacatatatacacgtatatatacatatgtatatacacatacattaattagcatgtatgtatacacactatatataatactatagctaataatatgaatgagataggctctaataaaaggtattattagaaataaagagattattgatgaaaactggcccagttctctaggaagaaagtattctaaatttgtatttacctagtaatagcttcaaaatatataaagaaaaaattggcataattcatgagggaaaattgagaaattaattatgattgtgggagaaattcagtacacatccttgccaagatttcaagcatagatacggcaaaacaacaattagcgagctgcatttaacagactcctaggcccacgaattgcacagtattctttacaggtacacaaactattaaagatggagaccttatatagtaatatagacgactacatttccacagagagtacctgtagtttttgagtttagttttttttaaatgtgtctgtgtcaaaatcataatattataatgaaataatgaatttgtttttatcctgcagggatacaattggtgtcatgatcggaatgtggttaccattttcagtgcacccaattactgttatcgttgtgggaaccaggctgctatcatggaattagatgacactttaaaatattccttgtgagtaactgtaaattttaattgtatatactttcagaaggaaaattttaaatgttaaaaatagaagatttctgtttctgaaattggatgaggagtatagcaaagcccctctccagcaaaaataaccattagctggagaacattatttttaaaaaataatttttcaaagcttttggaaattgtcctaagggcatacagcaggtggagaaacagttaattcaagaaaacctactaaatctcagtaataatagccgtagtctgtggcatttgagctatgacttgccccctccaactcctcccagatccctctcacagaaacgactacaggcgctctacgctgggttggtatagtcaggaggctaagggattccccctcttcatcagctcccagggctggggctgtgggttcactcccagagatcagatgccagcatatctcacctctcctagtctggagttacaaaagctctactcctggtagacacagtcaagcaggctgaggcccccttccctgccccagctcctggggcagaagctctgctccaggcatgcatggcagatgagaatgctgggtttcccaatgctgttaccccagcacctgcttataaaccaggtggtatcactgagcctgcactggcacagaagttctgctcaggaggaaaggcaggtcacagaagttcctcagctctgcctcagaggacttatcttacttaggtgatggagaattccaaatctgagtgctttgtggaaagcagtagatgtcatggtggagaccaattaagagggctgtaatagctcccatgatactaggagcaacatacaaaagagcagagcaacatgttgttcaacaaatagcaccagggaaaaagccaagaagagcccttctgggatcacagtcagccctgggggacaagaaggctgtgcacatgcactagccatacccactcaggagcagtcaagagtaggatgtggggtattcatataatattttcaagccacacatagattgtactgagttgaataatgtccccccaaaaaaattcatgtccacccagaacctcaaaatgtgatgttatttggaaataggatctttacagatataattattaaagatgagattgtactggattagggtgggcctaaatccaattcgaatgggattttagtaagaggaaaagaaacacacacaggggagaatgctgtgtgaagccagagattcaagtgatgcatctaccagctaaggattgccagagccatcagaagctagggagaggctaggaaggatttttcctagagccttcagagagagcgtggtcctcccagcatcttgctttcagacttgtagcctccagaactgtgagaggataaatccccgttgtataagctatacagttcggtaatttgttacggcagccccaggaaatggataagtagattgatcaacaaatggtgtaaccatcactagtatgtgaggcttaaacacaacctctcatcattgactgaacgacattcagttactctgatccaggagcacctcctaggtagtcaggctttaaaataaaatcacactcatccctgacagtctggcagaatatgtgcatgcccaaggttataccctctctggactgagtgcagtatgaagatccaactattagtccctggctgaatgggaagccaaaatataaactccttcagctttgatagcaatctgcaagtcacataacatttccggtggccattagggtgagctttaagatctaactggccaagggggcttaagtacaatctttgatcagtaagtggcttatgcctacccagagacagcccctcagtagccaggctgtgaaagattaaaagaagtaaaaacggtcaggcacggtggctcatgcctgtaatcccagcactttgggaagccgaggtgggcggatcacctgaggtcgggagttcaagaccagcctgaccaacatggagaaacccagtctctattaaaaatacaaaattagttgggtgtggtggcgcatgcctgtaatcccagctactcaggaggctgaggcaggagaatcgcttgaacctgggaggcggcggcgatcacgccattgcagtccagcctgggcaacaaaagtgaaactcaaaaaaaaaaaaaaaaagtaaaaacatccgagcagggccacaggggctgcacactatgggggaagtagactttacagttagttcagctaagtcactaaacaaaaataataaaccaccaaaaagacaagatcagtccccaaggacatgaattccagagctactgcaatatgttatctataatgtccaatttttcaaccacagattataagacatggaaagaacaaggaagtgtgacctctacacaggaaaaaactaagcaacagaaactgtttctcttggatagaacaactaggcaggagatgaaggcaggagaagacttgagcaacactgtaaactgactgtatacctcatgtctgtaaaacaacacccaacaacagcagaatactttcctctcaagtaaacatgaaacatagtcatatgctagactgtaaaacatgcctcaggcaatttaagaagattagattcttaaaaggatattctccaaacacaaggaaatgaaattagaaatcattaacatggctggatgctgtggctcacacaagtaatcccaacactttgggaagccaaagtaggaggatcacttgaggccagcctgggcaacatagggagaccccgtctctacaaaaaaatttaaaaattagccaggtatggtgccaagcacctgtagtctcagctgtatgggaggctgagatggaggatcacttgagcccagttgatcaaggctgcaatgagctatgatcacagcactacactacagcctaggcaacagagcaaagaccctgtctcagaaagaaaaaaacaaaaaaaaaaacaagaagatttgaaatcagtaacctatctttatacttgaggacctagaaaaagcagagtaaactaaacctgatgtaagcttatgaaacgaggtttagagtagaaataaacaaacagtagaaaatcattacagaaaaatcaacaaaacccaaagttgatgctttgaaaagccttaactagactggccaagaaaaaaaggagtaaagactcacattaccaaatcactagagaccttactgaaataaaaaggattataagggaatacaataaataactatatgccagcaaattcagtaactttgataaaacgtactaattcctaaaaagaaactactgaaactgactcaagaaatatgaaatctgaatgacctttcaaatgtgaaaatattgagccagcatggtggctcacacctataaatcccagctttgggaggccaagctgagaggattgcttgagactaggagtttgagaccagcctggacaacatagcaggaccttgtccctatttaatttaaaagaatataaataaatgagtgaaaaagttaaaactccccacaaataaaaggccaagcccaattggcttcattgatgaagtccaccaaatgtttaaagaaaggaattggccaggtgcggtggctctaaccagtaatcctagcactttgggaagccaaggcaggcagattgagcccaggattcaagatcagcctgggtaacatggtaaaaccctgtatctacaaagaatacaaaaattaacctggtgtggtggctcagcctatagtctcagctactcaggaagctgaagtgggaggatcacctgagcccagggaggttgaggctacagtgagccatgatcacaccactgcactccagcttgggcaacagagtgagaccctgtctcaaaaataaaaacgagttaatgccaatccttcacaaacacttccaaaaaacagaagaggaggactactgcattcattctgtcacacctgcactattatccttgataccaaaagtagacaaaggcaaaaacagaccagcatttgttacgaatacagatataaaattttccaacatacgtaccagcaacctggatctagcaatatgtaaaaagattatacaccatgagcaagtgggatttatcccaggaatgctaggttggttcaaaacatgaaaatcaatataataaaccatattaatattaagggattaaaaaacacatgatcatctcaatagaggcacaaaaataattggaaaaatccactagccagaaacactcaagaaaatagtgatattaggcctggcgcggtggctcacgcctgtaatcccagcactttgggaggccgaagcgggtggatcatgaggtcaggagatgagaccatcctggctaacacggtgaaaccccgtctctactaaaaaaaaataagaaaattagccgggcatggtaatgggttcctgtagtcccagctactcaggaggctgaggcaggagaatggtatgaacccaggaggcggagcttgcaataagccgagatcgtgccagtgcactccagcctgggcgacagagcaagactctgcctcaaaaaaaaaaaaaaaaaaagtgatattattattaaataatattaaacaattattgtttaattatttaaacttgatattatttaatctttaattatttaagcttttaaataataataacatttagaaattgttatgccaggcaccaaaccagacattctgtcttcttaaattttcaccatagccctatgaagcagttagttggaatgggagcatctgcagtgatttgcccatggccattccagccgtaagtgatgtagtcatggtgggaaagcaggactgctgtttctactacagtgtcttgttctttattcatttgttttctttgcaaagtcagatcctttatttgcttccttttttgccatttacagccttcaatttgacccagcgcctcgtcgtggtgagcctcatgttacacggcgcaccccagactacttcctataaatttctcctgggamacctgcctttgtatgtggaagtatacctggcttwttaaaatatatgtatttaaaaacaaaaagcaacagtaatctatgtgtttctgtaacaaattgggatctgtcttggcrttaaaccacatcatggaccaaatgtgccatactaatgaygagcatttagyacaatttgagactgaaatttagtacactatgttctaggtcagtctaacagtttgcctgctgtatttatagtaaccattttcctttggactgttcaagcaaaaaaggtaactaactgcttcatctccttttgcgcttatttggaaattttagttatagtgtttaactggcatggattaatagagttggagttttatttttaagaaaaattcacaagctaacttccactaatccattatcctttattttattgaaatgtataattaacttaactgaagaaaaggttcttcttgggagtatgttgtcataacatttaaagagatttcccttcatttaaactaaattactgttttatgttgatctgcatatttctgtatatttgtcatgacagtgcttgcatcctatttggtgtactcagcaaataaacttttcrttttaaacaaaaacattcatttattgtgttgtgcattaaatgaaaactttattttttctagaccaggtcttgctctgtcatctgggctggagtgcagtggcacagtcatagctcacttcaaccttgaactcctgagcccaagccattctcctccctcagcctcctgagtagctgggactacactcaacataccaccacacccagctaatttgtaaaatattttgtagagacgggatcttgttatgttgcccaggctggtcttgaactcctggcctcaagtggccctgccaaattcttgagattatagatgtgtgccatcacacctggcctgctatcttgaaacgacataaaatctttcaaagcagggcaatgggacatggctatagtcccagctactcaggaggctgaggtggargatggcttgaacccaagagcttgagggcagcctgggcaacatagcaagatgtcatctctaaaaaataaaaaataggctgggcatggtggctcatgcctgtaatcccattgctttgggaggctgagaaaagaggattgcttgagctcaggaggttgagacctgcctgggcaacacagtgagactccatctctgtattttttttaaaaaaatttttaatctctaaacttgaaataaacatttgtgttgaggaaattttattgtaatattctttgttacaggacttactttcagaagaaattcaaatagctgataacttttagaccataaaaaaaagccagtcgaaaaattttagtaggtaatttatattaatgtcacatttttaagtacagctatggattatatactaaaactagaatataactgggaagaaactttcaaaaacatatgtaatatatacatacatatatatgtatacgtatatatgtatatatatgtgtatatatatgtatatatatatgtgtgtgtgtatatatatatatatatatatawwtwttttttttttttttttttggggggacagggtctcactttgggttgccccaggctggagtgcaatggcccaatcacaactcactgcagccttgacaataaatcagttttagaatattttcatgatttcagtctctctcttgacctgtgttgattttcattgccaccaaccagccccaggcaaccactaatctacttctgtctacagatttactacttctggacagctcmtatcagtrgaatcacataaattgtttttgtgcaggtttttcactagcgtgtcctgaagttcctccatgtcgtatttaacagttcattcttttattcctaagcagcttgccatggtgtgaatataacacatttctctctatgcattcatcagttgatgtgtccatttgaaacatttaggctatttccaatttttagttattaaagtaattattgtcatggttgctcaatttggtaaatttaccaagaatctttaaattgaacccttgaaatgggaaaattttatgatttgtaaaatatacctcaatgaagctgtctttaaaaagaaagagatgggctgggcacgctggcttctgcctgtaatcccagcactttgggaggccaaggcaagaggatcacttgaccccaggagtttgagaccagcatgggccacatagcaagaccccgtctcaaaaaaaataataataaaattagttgggtgtggtggcacacacctgtggtcccagctactagggatttgaggctacaatgatctatgatcatgccactgcactccagcctgggcaacagagcaagaccctcaaaaaagacttgtgcaataccaccagagcagtctttagaggaaaatttataactaaatgcttgtaacagaacaaaagctgaaaagtaattagctaggtgtttatcatgtaaaagttaacagattaagcgcaaaaatcaaaagatcaacagaaccacaaacttacttgaaaagactaataaaacaaatattacaaaaaaaccacaaacatacagaaggcacaaataaaagcatgaatttgcaaaataaaaggtaacaaaagtgataaaaaattgaggataggctgggcacagtgggtcatgtttgtaatcccagcgcttcgggaggctgaggtaagaggatgacttgagtcccaaagttcaaggccagcctggggcaacatggtaaaacctaacctcaaaaaataccaaaaaattagccaggcgtggtggcagatacctgtagtcccagctactcgggaggttaagaggggagaatcacctaagcctgtggaggtcaaggctgccttgagccatgatcttgccactgcactccagccgagatgagagtgagaccctgtctcaaaaacaacaaaaaagttgaggatactatgaatagcatttgccagtacatttgaaaacaagaagttacagaagtaaattactagaaaatttatcaaactgactcaaatatagtctaattctgtcactaatattaaaccaattgaatcacrcatttacgtcttataaagaatacactaggtaccaaagtttatagcagtattccatagccaaaaaaggtggaaacaagccaaattccatcaacagattaatggataaacaaagtgtgggccaggtgcggtggctcacacttgtaattccagcactttgggagaccagtgggtggatcacttgaggtcaggagttcgagactagcctggccaacatggcgaaaccccatctctactaaaaagacaaaaattagccaggtgtggtggcacacgcctgtaatcccagctactcaggaggctgagataggagaatcacttgaacccaggaggtggaggttgcagtgagcggagatcactgtactccagcctgagtaacaaagtgaaactctgtctcaaaaaaaaaaaaaaaaaaaatgtggtatatccatacaatggaatattgttcagccattggaaaggaatcaaattctgacacatgctgcaacacggagcaccttcagaacatgcttagtgaaatgagcaagacacaaaaacacaattgtatgttttcacttatatgagggtacctagaatataggcaaattcatagacacaaaaagtagaatagagattgccaggggctggaaggagaaaggattgaggagttactttaatggctgtagagtttcagatgattagaaagttatggaaatgaatggtggtgaagatcacacaacatgagtatacttaatggcactgaattgtgtattttaaaatgattaaattttatgtcatatatatagtaccacaataaacaatttagggctgggtgcagtggttcatgcctgtaatcccagcacttttggaggccgaggcgggtggatcacctgaggtcaggagttcgagaccagcccggccaacatggtgaaaccctgtctctactaaaaatacaaaaattggccgggcatagtggcacatgcctgtaatcccagctacttgggaggctgagacaggagaatagcttgaacccgggaggcggaggttgcagtgagccaagatcgcgccattgcactccagcctgggcgacagaggaaaactctgtctccaaaaaaaaacacaatttagaatcggcttgttatatttacacacatagggatacaataaattctgctgggatttggggattatactgaacctctatcagtttaggaagaataggtcattttacattattgagccttctagtccatggagatggtataaaatacctctttcatcaagtcctcaatttctctcaacaatataatatttggtataaatgtcttgccatctaaccgtaacatttgatttttttttttttttttttttgagacggagtcttgctgtgtcgcccaggctggagtgcagtggcatgacctcagctcactgcaagctccgcctcccgggttcatgccattctcctgcctcagcctcccaagtagctgggactacaggtgcccgccaccacgcccggctaattttttttgttgttgttgtatttttagtagagacggggtttcaccgtgttagccaggatggtctcgatctcctgacctcgtgatccacccgcctcggcctcccaaagtgctgggattacaggcgtgagccactgcacctggcaacatttgattttaaaatgctgtcgtgggtaatacctttctattttgtgattgtttaatgatgataaattgaaataaaagcgatcttttaaaatatcttctttttttttttttttttttttgagatggagtctcactctgtcgcccagactggagtgcaatggcgcgatctctgctcaatgcaacctcttttttttgagacggagtcttactgttgcccatgctagagggcaatggcgcaatctctgctcactgcaacccccacttcccaggttcaagcgattctcctctggagtagccgggattacaagcacctaccaccacgcccagctaatttttgtatttttagtagagatggggtttcaccatcttggtcgggctggtctcgaattcctgacctaaggtggtccacccacctctgcctcccaaagtgctgggattacaggcgtgagccaccacacctgcccaaaatattttcttcagtagctatactaaatgcacttagttcttatataagttgagtatcccttattcaaaatgcatgggaccagamgtgtttcagatttaggattttttctgattttagaatatttgcatatagatatctggttgaacatccctattccacaaatctgaaatgctccaatgaacatttcctttgagcatcaagtacctgctcaaaaagttttggattttggagcatattgtatttcagatttttggattagggatgctcaacctgtatttatcagcaattactttggatttttttaaattacaaagtcacatagtcagtgaatacaaagcttttttcttcttttctaatctctatgactttttgtatatgtttcatattgctttgattaggacaactagtatttcatgttcgtgggtaggggtttttggaggtatttattccttaccactgtttcttgtaggcagcattttttgttgttgttttaattctaatctaatattctctactttttgttgttgttgtttttgagacatgctttgtcacacaggctggagtgcagtgggggcgatctcggctcactgtaaccaacctccgcctcccaggctcaagtgactgtcatgcctcagcctcctgcgtagctgggattacagttgtgcactaccaagcccggctaatttttatttctttgttttgttttgttttttgtagagacggggtttcgccatgttggccaggctggtcttgaactcctgacctcaagtgatctgcccacctcccaaagtgctgggattataggtgtgagccactgcacccggctaatactctctacttttcatttggggatatttagattgtttatatttaatacgattattggtattgttaggtttaagtctgtcatcgtgctatttgttttctatttgtcccatttatttcctctttttctgaattcttttggattaattgaatattttttattctatgtatctcttttgtgtggcttattagctatacctttttgttttgttcctttagtggttgctttaggatttgtggtatacatctttaactttgttccatctgccatcaagtggcattacaccacttcacatagagtatcagaatcttgtaatatatatccctaactgtgctattgtcataaattttggttttatatgtattataagccccatgcaacattgctattatattatcatcactaaaatatcacttaaagggatttagtaacaagaaaaaagtttatttactcatataaatctgtgttatttctagtgttcttcattgctttgtgtagttttgtatttccatctggtatagtttttcttctgccttaagactaacattttttgtagtgcaagtttgatggtgatgaattttttcagcttttgtatgtctttaaaagtatttctttcatgttcatgtgggaaagatcattttactaggtataggccgagcgcaatggcttatacctgtaatccaaacatcttgggaggcagaggcaggctgatcacttgaggccaggagttcaagaccagctgggccaacatggtgaaaacctgtctctactaaaaatataaaaattagccgggcatggtggcctgctaaacccagctactgggaggctgaggcacaagaatcacttgaacccaggaggcagaggttgcaatgagctgagatcacaccactgcaccccagcctgggcaactctgactcaaaaaaaaaaaattttttttaaagatcattttactaggtatagaattctatcattacccatggaatcacagcccattagcctgcaattccactaatttaagcttgactgctgtcaccttgtgcttaggtgctgggtttttctcgggcgctcctgctccccattcagcaatcctttcacgcctgcataygagggaggtccttctccatgccctcaccccttccccagttggagactgctgctgtgtatcactcagtgctgggctcatggtaggagcaggtgaggttctctgttgtcccaattcagcctcaatcttgggctggctctttgtgctatgtttttgtttttctcttttgagatggagtcttgctctgtcacccaggctggaatgcagtggcgcaatctcggctcactgcaacctccgcatgaaacctccgggttcaagcaattctcctgcctcagcctcccgagttgctgggattacaggcgcgcgccaccatgcctagctaatttttgtgtttttagtagagactgggtttcaccgtgttggccaggctggtcacaaactcctgacctcaggtgatccacccgcctcaacctcccaaagtgccatgattacaggcatgagccaccgcacccagcctgtgctttggttttcaaggtgaggtttttctaagcattcttgctccttctacctgtggctgccaaacttctccttgtgtccatggttggcgtagggtgggagttttcggccccattcctagcaagactagacatctgtttgatatctgtatccacccttccctccaaggtagagaatttttgcctcgaccttctgccagcagcaataatctttgcctgagtcctgggagaagcagatgggttttgttttggttttgttttgttttgtctgcctctgttccttctccagagacaatagatctgccagttcctggcaggccatagtacttgctgtactttccccagcaggttaagaccttggcttggtaggagaggagggtctggggaagccagtggagctttgcgcttgttcccctacagccgccagtcactcattgtttgctctgaggttggctttctctggtctcctgccctgtctcagtcctcctgaacacctagtgaagggtgaggaggaagaactttytagagaatgggcactccctttgtgtctgaagcccccagccaggactggsttcatggcatggtacctgtgcaggrccccacacttagaagggmttcatgtttggtttactgcattgctgtcgcctatcgccatcttgaacttcttcacttttgagtaagggttcccacattttcattttgcactaaggcccacaaattaaatagcccgtctggttccaaactgatgcagtagcccatgcgtgacctttacgaacatcaaaatcttagcttgtatagcagctgccttttctcccgtgttttgccaaagggaagacagtttctgtgtcccgtctctccttggagagggttatctctttttggaattcagtttacataattgctttgcagcctcagctcactgtgggctcaaaaatgttatgattttgtgtatcatccagctgtttcttttccttttctttttttttcttgagacaaggtctcagtatattgccgaggctagtcttgaactcctaggctcagtgatccccccacctcagcctcccaagtagctgggaccacaggcatgcaggcaccatgcacccagctagatccagctgtttcttgttgctagggtgagagcagcattctttacagatctctgtgtcctaagtggaagtctaaataagccatatgatttagagcttgttatttttagaatctcaatttcagctagcagagcaattacctgactaaagctttttccctccctttaaagggaaatttcacactttttaatttaaatatttccttcagaaaaatgtcactttattttcttttatccccacaacaacaaaaccccttagtgtcacggtcacagtagaacaacctagaatgactttatattgtcttttgataatagctactgtataattaagctcaaatgagcagagctcccatatcaatccatgatagtgaggaagagcgtttacaaagtgaaatacagagatgaagagtaataaaatgagggcaaattctctaaataagaccatgtaggaccaagtgtggtatctcacgcctgttatctcagcacttttggaggccgaggcggtaggatcacctgagtccaggagttagagaccagcctgggcaacatagtgagacccgatctctacaaaaataaaaaataattagctgggcatggtagcacgcacctgtggtcagtcctcagctactcaggaggctgaagcaggaggatcaattgagcccaggaggtcgaggctccaatgagctgagatcgggccactgtattccagcctgggcaacatagtgagaccctgtctctacaaaaatatttaaaaattagtcaggcattggtactttgaggttttgtaatgaaaaaaaaagctaaagataaaaaatgaaaaataaataaaataaaaattatccaggcatgggaggcagatcagcagcagtggagggtcctgggtggtgcagcctgcaccagtgtggggtcactcctgagggccgcacctcgcgggggcactggggttgccggtaatgtcattgggagcatagtcccaaggcccttctcctcctggtctcagcctcctccacctctcctgggccatcgggttttgtcatgttggaaacaaggtctgaactgaggccagttaactaagatcaaggtacaaggcctattttgcaaggaatagcaatatgcccccttcaaagatgacagctggccacaggactaagcttggcaacaagatgtgagtggaagctcccaaagctctctaaagaggcctcctcttctctgcttcttggagtgtggacaggatagctggaatcctagcatccagttttgaataccaggtgaccttgaagatgaaagccatgaactgagacaatgtccttatcagatttttwttttttgtttgtttgttttgagatggagtctcactttgtcacccaggctggagtgcagtggcgcgatgtcagctcactgcaacccccatctsccaagttcaagcgattccggtatctccacctcccaagtagctgggattataggcgcaagccaccatgcccggctgtttgtgttcgtgtttttttttttttctttttttagcagagatggggtttcgccatgttaaccagcctggtctcgaactcctgacctcgagtgatctgtccacctcagcctcccaaagtgctgggattacaggcgtgagtcaccacccagctcctgtaagcttttacatgagagaaatcaactaggttgtggaggctgagtcaggagaattgcttgaacccaggaggcggagggtgcagtgagccgagatcgtgccattgcactacagcctgggccacagggtgagacgctatctgaaaataaataaataaataaatagccaggcgtgatggcacacacctgtggtcctgtggcaggcgaatagagaattaggataacgggggttcggcaggtgcagccagttctcataagcaaaagaacagcaggtgcagccagctcctataagcaggagagcggcaggtgcagcatataggccacatcctccctcccatcataacaaggcacttcagcctctgctgggttgcaggccaatccttcatggggtgtagccaattggaggcctctctagggcaccgtggggtgttgccaggttccttgggcttgataaaaatcctaattaaggaggctcttgagccgcttgttcgagctcactctcactctgtgaattgtcttcaataagtctgttttccctactcttcttctgttgttttgtcttcccttgtttcgttcttttgttacttcgtgcattttgttcaattctctgttcaacacgccaagaaccttaacaactctatcaggtaaaagtcccagctactcgggaggctgasgtgggaggatggcttgagcctggggaggttgaagctgcagtgagctgtgattgtgccactgcgcttcagcccaggtgacaggcactgtctcaaaaaaaaaaaccaacaaaaactaaagctttttaaagtcagagctttctcatagagcacttgacaaatttacaagtcagcctttctaatcttcagcctgctgatactttttaacatttaatcattaaatattatacagaagtagaaaagtataaaatatcctcatgtacctgtcccttagatcttttgagatggagtcttactcttgtcttccaggctggagtgcaatggtgtgatctcggctcactgcaacctccacctcccaagttcaaccgattctcctgcctcagcctcccaaatagctgggattacaggtgcccaccaccacgcccagctaatttttgtgtttttagtagagatgggtttcaccatgttggccaggctggtctcgaactcctgacctcaggtgatctgcccgcctcggcctcccaaagtgttgggaatacagatgtgagctaccacgcccaggtamtcccttagctttaatatttactcatctgtatctgcatgtgctgccccagacgatgatgatgatgattgagacatgatctcactctgtcacccaggctggagcacagaggtgagatcatggctcactgcaacctcaacctgtggggctccagtgatcctcccacctcagtctccagagtagctgagactacaggtgcaggcaatcacgcctggctaattaaaaaaaaaaattgtagagatggggtctcacctggttgctaatatggtttggctgtgttcccacccaaatctcatcttgaattgtaatccctgtgtgtggagggagggacctgtaatccccatatgtggaggaaggtaagtgattggattatgggggcggtttccccatgctgttcttgtgatagtgaattctcacaagatctgatgtttctataaggggccctttccccttccctcctcaattttctgtctcctgtcacctgtgaagaacatgtttgctgccccttccaccatgattgtaagtttcctgaggcctcccagccctgcggaactgtgagtcaattaaacctttttataaattacccagcctcgggtagtatctttatagcagtatgaaaatggactaatacagtagcccagactggtctcaaacttctgggctcaagcgatccttctgcctcagcctcccaaagtgttgggatcacaggtgtgagccaccatgtctggccttaatcatatgtttctaatttttccatctcattgcaagagggctacagcaaacacacacacacacaaagtgtaattaaccaagaacctaaagacttaaagcatcagtacttcctttccctaaatccagaggaagaatgctgcttttctaactaaggaaacaattaagcatctcaatttttagccctttagttatacatgcaactgatgtttgtcctttctgttgaagaaaaatatctgcattaccatgccaagaaatggctctaatgatttttatgttaagaactggggagaaggggcagaggagaaccattccacaaatgttacgaattatttactgaaatttttgctgtataaaagaccactttttaggtgataatcattttctgtactcaaaatccttgaaaacggatgtggagggacaatggaaaatagagcctatcatacgaatgatacaatggactttggggtctccagggaaaaggtgggagggggttgaggcacaaaagactacacattgggtacagtgtacactgctcaggtgatgcgtacaccaaaatctcagaaatcaccactaaagaacttatttggccgggcatggtggctcacacctgtaatcccagcacttcaggaggccaaggcaagcggatcacctgaggtcaggagtttaagaccagcctgaccaatatggtgaaaccccatctctactaaaaatacaaaaattagccaggcatggtggcgtatgccagtaatcccagctactcaggaggccgaggcaggaaaaccacttgaacccaggaggcagaggtagcagtgagctgagatcgtgccattgcactccagcctgggcaacaagagcaaaactctgtctcaaaacaaacttattcatgtaatcaaacaccacaaaccattgaaataaataaatatatatatatatggagagagagagagacaaatatatctataaggaaaaaaaaaatagagcctatggaagtctgtgggccaggtgcagtggctcacacctgtgatcccagcactttgagagggtcaagacaggcagtttgatagcagcctgggcaagatggcgaaaccttgtctccacaaaaaaaattaaaaacttagctgggcaaggtggcatgtgcttgcagtcccagctactcaggaggctaaggccggaggttcgtttgagcccaggaggccaaggccgtggtgagctgtgattgtaccactgcacttcagccaaggtgacagagcgagaccctgtctcaaaacaaaaaaaagagagagatattaagagatatcaacagctagagaaaagaaaccatctacccagaaaagtaaatgtcgttcctaagggccttttcatattgttggggaaaatgccctgaatacttcctataaagaattatctattgccataacacatgttcccaaaacataacagcttaaagagaaactgcctttgcaaaattaagacagtaagagaaatctgacatagttgacttcatcttgcttgtaacctccaagctgtccttggtcattcctggcataggccaagttaatcttgggaggagtttagtttatttaagcaagggtgatactagcccttcccaaaactaaactgccttcataaaactaatgaaagcccacgaggttaggattatgagagtggcctgaattctgctaatatggagttattaaatggtaaccagccattgttctgaggtcacaagatttgcaacctccacagttgcccctgtaattaacatcactattgtagaacctaagattggtcttttgagacgttttagcagacttttgcattcaggcaactgactgaccacacctgggcttgcaacttgtgactcaacaggccctgtggccccacccagagggggactcagccaccaggactgttttccacacccctatgagtccatccccaaccgatcaacattccctatttcctagccctctgcccaccaaactatccttgagtattaactccctcttctgcgtggtcggcctcacatcagttacactccctttgctgcaaagctatggcctcagtgaattgatttttgtttgtgctgacagcaggagaaagccactgggcaattacaaaacagcattcattatctcccctagtttctgtgggtctgggctccaggagcagctcagctgaatggttctggctcgaggtctgtcatgaggctgcaggattcactcccagctggctcatggagctactggcaatgaggctccagttccttggcacgtggtcctccctggtgcactaacatggtttcagctagagcaagacagaagacagggatagagaaccaaaacaagtgcagtcctttatcatctaacctaggaagagacataccatgacttctggttaattctgttggtgtttttcattttggtttggtttgcgttggttttttttattttttttatttttttgagacggagtcttgctctgtagccagggtggagtgcagtggcgcgatcttggctcactgcaacctctgactcctaggttcaaataattctgcctcagcctcccaagtagctgagactacaggtgcgcaccaccacacccagctaatttttgtgtttttagtagagatggggtttcaccttgttggccaggatggtcttgatctcttgacctcatgatccgcctgccttggcctcccaaagtgctgggattacaggtgtgaaccaccgtgcctggccaattctattggtcttatagatcaaccatggcacagtgggaacagatgacggcacaaggtctgaatatcgggagagagggatcgttgaggtctgtcttggaggctggctcccactctgctctctatcccccaaaaatccacagtcctcccacatgtaagtacattcaccccctcccaaggaacaagacagtcccatcagctcacagcatcagctgaagagttcatcttatctatgttaggtccaggggcggatgacgaccctagggttctcaggtacagctctaagacagttcttcctgatctgcaaggctgagaactagacaagttatcaccctccaaacacccagcatgcaatggtgggacagttacatgatgcccagatgctcctgttcagaaaggctgcaaatgaaaggcacacacactgctggtccataagcagttctgaaattcagctgggtaagcactggaacccagtgatactcctgccaggaaatgactttccagactgtttgactctgccctgggaggacttgatttcatcttaggagtcatacttttacatgaaaggtggtgtggatttacagcaaaccatttttctcacgttgtttcctgcctgtagaatcttagaaatctcaaggcctgttttttttttactttgtctctttcagttcaagttgaccagcttactgctgatgtaattattttattattattattattttttttgagacggagtcttgctgtcgcccaggctggagtgcagtggcgtgatctcggctcactgcaggctccgcctcccggggttcatgccattctcctgcctcagcctcctgagtagctgggactacaggtgcccgccacctcgcccggctaattttttgtatttttagtagagacagggtttcaccatgttagccaggatggtctcgatctcctcacctcgtgatctgcccacctcgacctcccaaagtgctgggattacaggcgtgagccaccgtgcctggcccgatgtaattattttttaaactttgtcttctatgagtcgtattgaggcatcaactttgatttttcttttttcttttagagacaaggtcttgttctgttgcccgggctggagtgcagtggcatggtcttggctcactgcagcttcaatctctgggccccagcaaaactcccaccttagcttcccaagcagctgggactacaggcacatgccattgtgccgggctaattattttttgcagaaatggggtcttaccatcttgcccatgctggtctcaaactcctgcactcaagcaatcctcccacttcggcctcacaaagtgttaggattacaggcgtgagccactgtgcctggcccacctttgtcttctccagttttaacaaaggattttatagttacaccctcactttaatctttaaaccatattttcctgagtgttctgaatttaatctttgctctgaagtcacttctaaatgttagtgtaatcatttgccacctggagaagctgtgcatcttctaaaccagtgagccctggtttcttttttaacagttctttctttagcttatttcattcctgtcttattttattaaagaggcaagaagaaaccaatggcattttcactctagttggaaacagatttagctagatcactcattcattagctagctgtattttccactttccacacaactgtgggtgacagcgttgctgaacttactgcctctcaccaggacttccctttctccagctcccgggaatactcccgggttcaagtaattctcatgcctcagcctccgaagtagctaggactacaggaacctgccatcacacccagctaatttttgtatttttagtagagattgggttttgccatgttggccagagtggtctcgaactcctggcctcgggtgatctgtctgccttggccttctgaagtgctgagattataggcatgagccaccatgcctaaacaaaaaaaatattttttagagataggggtgttgctatgttgcccagtgtgtcctcaaattcctggaccaagcaatcctcctgcgttagcctcctgagtagctgggactacagatgtggaccaccatggccgcttccaactttgaaacttttatccacagtttcaaagcactgtgggctttcagcagcactctcctcaaagcccactgcctgattccaaagccactcctgcattggagggttttgttatggcagcaccttgctaacagatacacaaatctgttatatattgctccattacaaatgaactcaaaacttagctgcctcacaaattacctcacaaatcctcagagctcagaatctgggagcatcctagcccagtggttccggcttgcggcttgcgtgcagttgtactcaagctgttggccagagtggccggctctgaagacttggctgggacctgagggctacctctaagctttctctcgttgctgtgggcaggaagcttcagttccttgctgtgtgggcctctccatggggccactaacaggacttcttcccctagagcgagggacccaagagagaccaccaggacagccatggtctattataacctaatctcagaagtgatgtactaccactttttttttttttttttgagactcaagtgatcctcccaccttagcctccctagtagctgggactacaggcatgtgccaccatgcctggctaatttttgtattctataatttttgtattttgtattctttgtagaga

SEQ ID NO: 94783 - DNA, 15415 bp, Homo sapiens
gcccttaaggggaggatcacttaaaaccaggagttcgagactatctgggcagcatagtgagaccccatctctacaaaaaattaaaaaaaaaaaattagccaggttagtgacatgcatctgtagtccttgctactcgggaggctgaggcaggaggatcacttgagcccaggagtttgaggctgcagtgagctacaatttcaccactgcactccagcctgggtgacagagcaagaccctgtttctaaaagaaagaaagaaagaaaagaaaaaccagtctttgggtaggaacaatacaaagatttctacttcagtgaggctgccagccctgggaaccttagagaaccaaactaacttaagaataagggtgctgagcacagtggctcatgcctataatcccaacattttgggaggccgagccaggcagttcacctgagattggaagttcgagaccaggctgaccaacatgtagaaactccgcctttactaaaaatgcgaaattagccaggcatggtggtgcatgcctgtgatgctagctacttgggaggctgaggcaggagaatcgcttgaacctgaaaggtggagattgtggtgagccgagattgtgccattgcactccagcctgggcaataagagcgaaagtctgtctcaaaaaaaaaaaaaaaaaaaagaataagggtgatagggccaggtgtgatgactcatgcctgtaatcccagcatttgggaggccaaggtgggcagattacctgaggtcaggagtttgagaccagcctggccaacatggtgaaaccccgtctctacaaaaaatacaaaaatttcctgggcatggtggcgtgtgcctgtaatcccaggtactcggaaggctgaggcaggagagtcacttgaacccaggaggcgggggttgcagtgagccgagatcgcgccactgcactccagcctgggagacgagggaaactccatctcaaaaaagaaaaaaaaaagaagaagggtgatagggctgggtgcagtggctcactcctgtagttccagcactttgggaggcgggggcagacggatcacttgaggtcaggagttcaagaccagcccgggcaacatggtgaaaccccgcctctactaataatacaaaaattagctgggcatggtggcatgtgcctgtaatcccagctactcgggaggcagagtggggagaatcgcttgaactcgggaggcggaggtgtagtgagctgagattgtgccactgcactgcagcctgggcgacagagtgaaactgtgtctcgagaaaaaaaaagagtaagggtgttaggccctgtcctgtcagcagtttctgtctgtgttgtgaggctcaggagggtataagttatttgcacctgagaggattccccaggcaggaggcaaggcatgtagtttgaaaaagtctattccatataaatgtctctgttgtttttgtgataaaatctgcaagaagtgtggcttgatcaaatcttttttcatgaggatacacaagagtacaaaagcattgtgaaggggaatggactagaaaagcatcaacctaaattattcctccaagtaggacaagtttacaaatgcccatgacttccatgcaggcatcagagaaggaagcacgagctgctttcatggaggcttagtaggaaaaaagtcttttttgaacctgtaattcctgctttaatcttccacctttttatgtgatcgtcagcgatggctaacaatggtctcaggatgtgttgctcctcggagagcagagcatgtctccagtcttcctttactcactcatgcattcattcattttttttgttttgttttgtttggggacagagtctggctctgtcgcccaggctggagtgcaatggcatgatctcagctcactgtaacctccacctcctgggttcaagtgattcttgtgcctcaggctcccgagtagctgggacaacaggtgtgcgccaccacacctggctactttttgtatttttagtagagacggggcttcaccacaatggccaggctggtcgaactcttgacctcaggtgacccgcccaccttagcctcccaaagtgctgggattacaggcgtgagccaccgcgcctggccactcatgcattcattcttgcattccaagtgtgtttgagcttctcctgggagctgggtctcatgccagtcactgtgctgagtgctgaggagacatgatgaacaagatgagcatggctcctaccttcatgaaactaaccatctagaggggagagaaaacattataaatgggatgaatatgcagaagtgcaaggtgctgtgggtatctggtctgggagtattgatcggggacaacttcccctaagaggtgatggttaagctaagaactgaagcacagtaaggtttgtaaggtgaaggacaagaaacaactgaccactttcttttttgtcacagaatctcgaatcctgaccttcttagaaacctaccttgcctcgggtcatcagaagccattgcccacagtccctgggggactcagtccagttcagagagagctggaggaagttgctattaaatttgctcgcctggtcaactataacaagatggtcttctgtccctactacgatgcaatcctgagtaagatcctcgtccgatcctaacgtgtatgcaccctacagcagcagtattactcactagccacagaatacctgttctgtactctaatgttgcattggaaaatggctatatagtacatgtctatttaacagcaccgattccaaagggaagaatattgtgtatcactgttgaaaagacttgttgagaaatccactgaattctattttgagagattgtatttatgagtgcaagtttacaaatcaaagaagcattttgttctcgagttttacaggtaacactcagctgttgtctccactcctcccccatcatgtccttccaaggaggctgggacctctctcttctgcaatctgggtagttctttcagatgcctcatgctgagctgacggccatccaagcgcaaaagagaccaagccatggcctcacctcctgccctccctcagacagccttgtccctcacccctcccttctggtatttttgttagaagggctatataacgtcttattgccattttctccccctatttattgcttcctccctgcctggcctagccagggctcccaagcccttttttctagaggagagttatttgtctctctctctttttttttttactttcttttttgtatttaaacattcttttaaccttcccccaaagatacagttattggactttaaaaagcttgttcttttatacaaaattactcctgcatctggttgagagcagttatgacttatgagatctagtgaaaggaaagtctttgactttcaagccttgaaagtcaaggaggaaatgtattgaaaaatagtttactgtaatgtgaacgaagagaaatgtctggaattcttactgaaaaattgaccctgagacaatacacagatgtgatgattgaattaaattctggaattagatttaactgttttcagataaaatagcttgagttcacgaatctcctagatgaggaagtcataggaaatccctggtgtttgagcattatttttcaaggaacttcagtgaccagaattcctgacatgtcctctgagcgtgagtgatttgggtctcatagacgatctgttctttttttttttttttttttttttaaagtgtacacatgtatgtctgcattttagacagggatgttatattagaagcagagccatgaagttggaatgaccaactgccacaacagcaaggggtaagactatattactgtatgagtaatgcagtaatatcggcacctgaagccttctgtacaggaagctaagagaaacttacaagttagccgggcgtggtggctcacgcctataatcccagcactttgggaggccgaggcaggcagatcacctgaggtcaggagtttgagaccagcctgggcaacatggtgaaaccccatctctactaaaaatacaaaaattagctgggtgtggtggcacgcgcctgtaatcccagctacttgggaggctgaggcaggagaatcgcttgaacccgggaggcagaggctgcagtgagctgagatagcaccactacattccagcctgggcaacagagtgagactctgtctcaaaaaaagaaaaaagaaaagaaacttggaagccatttcagaaagactccaggaaggccagcagccactcctgcacaaccaggaggaagggctacattttactgcaagcagctgttttctctgatccttctttgtaaggaagtgcagtgattttgtgttttgaaggaagacttgaagaagcagttgggtaggtattccaataggactgatggggaggaaatcagatactccatgagaaggatttcagacctggtagagtcagaatacattctgctttcaggatttttgagattgctgatggtcccagggtttatacaaggacttggatctggctatagaaactcaggtagaaattacatgtatgcagatcagcactgatgttggttctaatctataatgatgtgataaattaaaaaaacaaaacaaaaaacagggctgggcatggtggcttacactataatcccagtactttggaatgccaaggcaggagcatcatctgaacccaggatttcaagtccagcctaggcaacatagtgagatcatgtctctacaaaaaatacaaaaaaaattagcctgttgtggtggcacacagttgtactcccagctacaagctgaggctgaggcaaaaggatcacttgtgcccaggagtttgaggctgcagtgaactatgatcatgccactgtactccagcctgggtgacagagccagaccctgtctctccttaacaaaaaaaagtagagccagatgtatctttttgggtcccaggcaggagactggagaatctgggtcactgtaatctggcagactggctgcattttgtgagggtacttttattcatatttatttatttttgtttgtttgaatgtattattatttttttaatagaaaccacatcacttcatttgttacagcgaataattcaagagggtcccagaaagctttttcatccacagaattacagaaaggataagcaccctcaccacccaagcctttggttcattttttattttttcaagacggagtcttgctctgtcacccaggctggagtgtggtggcgcgatctcagcttactgcaacctccatctcccggtttcaagcgattctcctgcctcagcctcctgaatagctgggattacaggcacgcgccaccatgcccggctaatttttggattcttagtagagacggggtttcaccatgttggccaggctggtctcgaactcttgacctcgtgatccatccgcctcgggcctcccagagtgctgtgattacagtcgtgagccaccacacccggcctgtctttaagttttatactagttaggaggctagtctatcagaatgtccctaatttagctgaggaacctagacaagtcttccttgatttcagcttcatcccaaggcctctgaatattttctttaaaaagctgcaggcgaatgaggtaaaatggacagagacatgagatagaaatcaacagaagggcaaagagtacggctcccacagcactaataggcagtaggccttccaagaccgaaaaggcaaaaagcagtgtgaccaccacatagcccttgggagtccgtgcctttagtttcttctgtagcatgagccacaggacaaaaatctggatggcaagtgttcccatgatgaagacatgcagggactggggaaggtggaagccaagcatccagaagcaaagatggccatgttcaaggatagtgtgctggatacagtggatacaaaggcatcattggcaccatagttaaaaaagatgaggtggcctaccagcatgaagactgacatggcatagatggtgtcagtgctgacagactctgtcagggtcttagcactggtgaaaagccataagtgaaagtaatgaagactagggcactcttcargtcagcccaccgggtccacccactcttctgcccttcacytccatcagtgagatcaaacaaaacatacccaatcagtgaagaagccaggccagtcccaaaaagccattggggggccagaagaccctcatccatataccaccagataaccagaaaaacaaaaacactgcacagctgcrggatcaccacactggactcaaataccatagcccaatattggtatttccragcatggatgtttttccagagctcttccaggaaccgccggtccacaaagttatcaggaaagggctgttgctcatacaagaccctctgccactttacctccttggtgttwgttacaggttgggtacacataatcctttcattcaaactcaggctagtttaatcatccctctcacagaggtccatgtggttcttgttgatgacattttgaaatgagacctccctggaaattccatgccttggttgatattctgctgacctttccttgttttcaaaggcagcaatccaggccaggcctacaatagatgagtttgtctctgaggcaggatataatacagccaagttcctggggatgcgtgactgggagatggcagttgcctgcctttttccttgtaagggttttttttttttttgagatggagtcttgctctgtcgcccaggctggagtgcagtggcgcgatctcggctcactgcaacctctgcctcccaggttcacgccattctcctgcctcagcctcccaagtagctgggactacaggcgcctgccaccatgcctggctaatttttttgtatttttagtagagacggggtttcaccgtgttagccaggatggtctcgatctcctgacctcgtgatccacccgccttggcctcccaaagtgctgggattgtaggcgtgagccactgcgccctgccatgagggtacttttaaagaagataacatcttccatggtgtattcaatgaggtcgtgtctggaattgttcccttaaggtggaggctgctctgtggccactgtgcctggcggttgtatgatcctgggttcctgggcagagaagcctcagcctcagagtgtttggggccttttcctgccgctccaaggctgaaggagaggagcttaaccccaactgcacagcgctgatcaccacttcctgcagtcattcttcctaaatctcaaaaactcttcttttgtaagagtagattcttgcaagatatttttcccctcctgagttcttacattgccagagttccatttggaccgtttgaaatcttgatgcatgaataactggcttcacagactcttggccgcccactacctcggtgtccactggtggagttctgcaactggcaaaagtcaagaatgaaggaagcaaacttcagaaccacaatattcatattgaatcattttgttgttgctctatgaagataagctaattttcttcctggaatctcataggattattactaagggccagggagatccacttcgttcatttagtcactcaggaagcattgctaagcatccccctgtaccttcccctacagctctccttccaaaacgaaacatcctttggagtgtgttgtcctccagaatcgaatggattctatatgctgcattcagtaacaggttgtggagacaagtgtcttttcctgaaattgctaagtgtatttggcagtactttactacttgtggatagaactgagagtgaggtcagtatcaccaagcctcttggatttcttcagtagtctcatggataagtgaatgtttaaagtaactactactttgttggctcttggttgggyggatggattctcagtcctggtgtttttaaaaatctcattccagccgggcgcggtggctcacgcctgtaatcctagcactttgggaggctgaggcgggcagatcacctgaggtcaggarttcgaaaccagccttaccaacatggcaaaacccatctctattaaaaatacaaaaattagccgggtgtggtggcacgtgcctgtaatcccagctactcgggaggctgaggcaggagaatcacttgaaccctggaggtggtggttgcaatgagccgagattgcgccattgcactctagcctgggtgacagagcgagactccgtctcaaaaaaaaaaaaaatcgcattccgtctaaagcaagctacaaaatgtgattatttatgtcacgatatgacccagccataaatgtacttcaggtaagaaggacactgacatgatatcttactgatcaaatgyagtcagtagktatatatgaacttttttctctgtgaagaaaagctattaataagtttgacttaataggcctatagtatgcacatactggccaagattctaaatggattattcagcggttctgtttttgtggaggtgcttattctcatttctccaaagccttaagattcctgggaatagaggaaatgttgctgccaccagctttgctggtgaatttcaaagagaataggtgtttgctgtttgatttctagtgaccttttggcgagctctgatttataggtagaacatttgtgtttcttttcattttgaggccaggtggtagagtggaaagactgggagctgtcaggaaaccaaggcttggatctccactctgttatgtaccagctggggcaaatcagggcccattcccaactcctttaaaatgaaaggactagacttggtctttaagctcccttccgattctaacatttggtggtagcaggattgtgcacaaagctcctaatttagagaaagatctgggttttagtcttttctcctctatcgccgccttaccggttgtacaacattggaccagccattctccccaaggcctcggcattttcattgttaaatgggaacactcctaattcacactgttgctgtgaggattacatttggtaatgaatgatagaatgctttgtacatggaaaaggactatacctttcttttttaactacaaaggcgaacatgtaaccctctacctgtgggcgcacatttgctgtggtgttacgttccactggtagcgcccaacctcccttcattcaagcacattttacgggcctacagggaaggttttcttcctgtcctctcctaagacttgtttatgttcatcatctcttctatactagagctgcagtcttacatttgcttacttcctgacatccacccccaccccagtgatttctcccyatctccacctctatattatttgaactaaatgaattcatgaatgaacaaatgagtggatgaatgaatggtaatggataatgggctatgaagtcatatttaaaggcactatctcatttaaaaacaatctaaataaataactacaatgatatttgcaagtgtgtatttatattggattttgcattatataattattttaatggaaagcctttttagtcatagtattcaaagcaacttcaatgggtggggaaggggataatctttaagcccaggtaagctctgtttattaaacgatcaagtgttcactggtactttcagaaatagccagagttctacaaaatatgtgttaaaagtctaaacatataattctacttaaaactgtccctcatgtgggtttctgtcacacctgacttacatttattgcctaccgaacttaagaaccagaactaagctataggcctggttcgatggagtgtcacttttcttgacttaaaagtaaccttaaaacaagaggggctgggcaaggtggctcacgcctgtaatctcagaactttgggaggccgaggcaggcagatcatttgaggccaggaactctagaccggcctgggcaacatggcaaaaccttgtctctactaaaagtacaaaaattagccaggcgtggtggcataggcctgtgctcccatctcagcaggctgaagtgggaggattgctcgagcccgggaggcagaggttgcattcagccaagatcatgccactgcattccagcctgggtgacaaagtgagaccctatctcaagaaaataaaaaataaaaaaaagaagggcttcacatggtggctaatcccagcagtttgggaggctgacgtgggaggactgcttgagcccaggaggtcaagaccaggctggacaacacaggtagatcctgtttctacataaaatttaaaaaattagctgggtatggtggatggtggtgcatgcctgtggtcccagctacttgggaggctgaggtgggaggattatgctgtgatcatgtctcaaaacaaacaaaaagacttatgaaaatttttgttttcttttgttttgattgtttgtttttgagatggagtctcactctgttgtccaggctggagtgcagtggcacaatctcagctcccaagctcaagcaattctcctgcctcagcctccccgagtggctgggattacaggtgtgcgccaccatgcccggctgatttttgtatttttagtagagataggatttcaccatgctgcccaggctggtcttgaactcctgacctcaggtgatttgctcgccttggcctcccaaagtgctgggattatatatgtgagccaccgtgcctggctgaaatttttattaagtaaaacgtaagttcacttgctcattgccacagtcaaagaactaccatgttaaaaaaaataataataataatttatgaccatgatgactatggtttaataaaattgaactcaacatttattaactataggccaatacagggttataatatcaaataaattcataattattgaccagggtcaatatactaacagaaatgatgtgtttttccttctttttctttggtacagtttggttgttcagaaagtttactagtagtttctattaaccttttactgtactagatgtggccacataggtgcaacctcttgtttgaagtttagtggtaaaggccagagtttgactaatttttgtttaggaaggacatacatatagtccttgaaacttttgtctagttctagaatcttgaggagatgctgtcattgcttttataaacaggaaaaagatggatatcttttggcaatttctttgggtccagcaatactgatatgagtccttggaattgtaggactgattatcccatgagtctgcacattagatttccaaaggtaagttcagatgtctaacatcatgctgcttgttgaactgtttaacaaaaggaattatcaaatatcaggcagaatcaccttaaaaactaaaaattcatacatatctctagcagttagaacattcgaaaatgttttcttctaatgagaatcctttttatgctcaaagagctgatcatttctaggagaaaaaaatcctataaataaatgcaataggaacaattataatatacatagtagccttaataataattgatatggtttgaatctgtgtccccaccaaatctcatgtcaaattgtaatccccagtgttggaggtagggcttggtgggaggtgttggtccaggggggtgaagttcccatgaaagggttagcaccatcctctcggtgctgttcttgtgacagtgagttctcatggaatctggttgtttaaaagtgtgtggcacctcccccctttcttcatcctgccctggccgtgtaaaacgtccctcttccccttcaccttctgccgtgattatacatttcctgaagcttctccagaagcaaatgccactaatctatctatacagcctacggaaccatgagccagttaagcttcttttctttaaaaattacccagtcacaggtatttctttatagcattgtgggaatggactaataaagtgattaaagacacttttcaccaagtgtgtgtgtgcgtgtgtgcacgcacgcacgcgcacacacgctaaaaaatggtttttcacacatgttcgcatggctttgttttattgtctgtgggaacactttggcagatcacttacaggtatttgaaactgttttgtcttctttttttttttttgagacggagtttcgctcttgatgcccaggctggagtgcaatggtgcgatctcggctcactgcaacatctccttcccaggttcaagcaattctcctgcctcagcctcccaagtagctgggattgcaggcatgtgccaccatacctggctaattttgtatttttagtagagacagggtttcaccatgttggtcaggctggtcttgaactcctgacctcaggtgatccgcctaccttggcctcccaaagtgctgtgattataggcgtgcgccacctcgcccggcctgtttgtcttcaaaacactaactgtggagtcctaattagggaaagggagtcaggctggtgggagcagggaaaagcagataaattatgagtctgcctttcttcatggtccaggacatgtagccgtactgcacccaacttatcaccagacacctgcaagttagctcactgcaacactggcattctcagtagtacataaaaccctcttcagcacatggcactatcttataaaatccccagcaagcctttgtctctttgcagacaagcatcttctctgcctgttccaaccttgcagtgcattttcataccttctctaatctacctttctctacctactattgtcttggtaaattcttcttacccccacaccaccagccccagatagtcgctgctcacccccgatactaaccaccaaaaatggcacttcaggaacaagtctacacctctatatattttttgaagcagggtctcactctttcgcccaggctggagtacagtggtgcaatcatggcccactacagccttggcctcctgggctcaggtgatcctcccaccacagcctgcagagtagctgggactacaggcttgtgctaccatgcccagctaactttttttttttttttttggtatttttagtagagatagggtttcactatgttggccagctggcctcgaactcctggcctcaagtaatcttcagcctcccaaagggctggaattacaggcaagagccaccgcgcccagcctacatctctgtattttaaagtctatgccatatggtattacttgtcttttttttggagagcgtcttgctctgtcacccaggctggagtgcagtggcgctacctcggctcactgaaacctctgcctcacaggttcaagcaattcttctgccttcgcctcccaagtagctgggattataggcttgggctaccacgcccagctaatttttttggtatttttagtagagacggggtttcactttgttggccaggctggtcttgaacccctggcctcaaataatctgcccgcctcggccttccaaagtgttgggatttacaggagtgagccaccgcacctggcctacttgtgtcttaagttttgatggtaactgatatttttaaaaaactcacaacttgaaagtgatgcttgaaaggataagaaagtctgaattagaggcagctgactttgttttgagaggcgatttttagctttaatgggaaaatactggaaactaaacacacttttgaccaatttatataaccttgctacatataaatttatatgagtaaatgattcagcataacctttttttacaagtaagacttttatgggacatttgaagctgattttaaatgtcagattatttaatcacatctgaattcaaattctaaactaaattgtttctaatatgtaagatcatttctttataatcataatacttgtcctcccctcctttttgtttccctcctgctttttagtttttaactagtaatgagaagaggaggtaatgttgttaccaaagagcaaagtctagttctttggacttaatttgcatgacaagtttttgctcactgtaattagaatttagttaaataaatgtcattttccttaatgttatctatgtttagctcatggaaaaaaaaatgttcttgagcactgggcccctgtgaaaatatacaagttgagtatccctaatctgaaaatctgaaatccaacatgttccaaaatccaaaaccttttcggtgccaacatgatgcacaaagaaaatgcttagtggagttttgtggaatttgtactcttgtattagggatggtgaactggtaagtatgatgcaaatattctgaaatctgaacaaatccaaaatcctgaacacttctggtcccaagtattttagataagagatactctatgtgagaacaagacagcaggtggttaaaggaatttccacacttaggttgctttcaagagagacaaaagtattaacaggatcttaatctgcctcagatttactggggagcaaatgcattcatatttgaggatttctaaaatgtttaatttgcctcttaaaaatgtttttagttagcaccaaaaaagaccaggaaggagtatgtgattaatacatttagtaaatacaagatgacttttccttgtcctgacatttatttttaaatggtattggataaataacataagtagttattgtaaataaaatctgaaagaagcagaggaagcatgatgtttctgaatccttttattttttaaaggacttttaaaatttgaaactacaaaacggatttcatacattctgccataaataaaaacaaacaataaggcaggactctacataagcaaaccaagaacaattgttttcagaaaatgtgataaaatgctttacaatcataagccatccagtttttaaaataaaactgttgaaaaactcacaaatcttcaagcggcacatacaagacacccttgaagagggaacaaaatgtggttctgccactttgtactgttctcacatttttgaaaacctaattttgcttagagcataggtctgttccgtattctaaaattcacacaggttggtttgttttttctcaagaaccatgtgatagaggcaccaatgacaatacaactttgtttccaagaaccttgtaacaaagcgttgtctcttttaaacataccacttgaggcaaaaggaatcctggacaggagttttctgtagaggcgtttaaaaccctaccgaatccgcttctgctgccgtgctctgtaaatgtcatgaacaggggggacaacggctcccttttcttcatcttcatctgaatcctcgttgggccttttgacggccttggtgagtactgcattactttccacggggccgttgccttctacagctagctctggggccccaccagtaatgatcctcacagcttcctcaacagctattaaaacaaaacaacaaaacgtaaaaacatattccactatgaaagggtatgtatgttcaactgtggatactttatagtttatttcatagcctactattttagcaaaacatgggatagtactactgatactaaataattaaagaaaaagacaaaagctgctgttaaa

SEQ ID NO: 94784 - DNA, 91946 bp, Homo sapiens
  misc_feature (1)...(91946): n = A,T,C or G
aggcaacccctttgtgcgctccccccactaccccctcctgtgctgcctccccagtagcctgggtacagctatgggggtgggggcaggcacagcaacagtaacctgcctccccactccccgccatctctggtcattggtcaggagctcatcagtgctgaattaaggactcagacaggccccccgccccagcccctacctcacatccctctcagctgaccccaactcctccccaagacttggatcccaaaggagccagtgtctggggggcatccaggcagcacctacctcttgtccttcctcccgctgctcgattccactttcagccccctgccctgtgatttcaggacaaagcttcccaggtgcaggtctgaaagcttccacctccttcgagaggtgggtgtgggggcctgtggggcccagtgatgctggcaaggggagaaggtccaggcaggggcggggttgyggatccacagtgggatgcggggctgaacggttatgtcccggtaggtaggggctgcagaaagagccccgagggctggggagtcccggagctggaccacaggaagggcctcaagtccgcctgccaggtccagcttctcaggaccccagggctggggcacactctttgcaccccgctttacagatgaggaaactgagtcagagagggagagtttaagggcaggcttcaagctgacctctgacccagagacccccattttgaaaaatctcctcttcaggcctcaggcctggagggctgtgggagtcgctcctctctcgattggagggtggagtgagtgatcgatcgattcattgcctttacccacatcagtatctcttcccccttgggactccttctgaggagcgttgagtgtgtatctcgttttttgtattttccagaatgctgtgttgttctggtgcgagtattttaatcactattagtggggtgcaaatgttttggccttagtatcccttcacacttttttttttttttttgagacagagtctcacccaggctggagtgcagtggtgcgatctcggctcactgcaacctctgcttcccgggttcaatcgattttcctgcctcagcctcctgagtagctgagattacaggcatgcgccaccacgcctggctaatttttgtatttttagtagagacggaatttcaccacgttggccaggctggtctcgaactcctgacatcagatgatccaccctccttggcctcccaaagtgctggggttacagacgtgagccactgcatctggccccaacactcttagcagctgttgagaagcccaaggagctttggttttggggtgctgtctgtagtgtgtgctggagcaggcttgcacgtgctcaccagaacctacggtagcatctccagtaatctcatcagctggttgttggacacaaccattattcaaatcaaattaaagtaattaaattatgtaaaacacagaaatactataaaaagcaaaggaaataaatactcaaaatgtattgcttcctaattatttctagcttactgtgatccacgctgttatctgggtgcagtctgtgtgtgtctgtctagtggaaatgccgtatgatactgtccatctcttccccactctgtgctctgtgggctcaagtgggaatatttacaccacatgtttacaccaccttcataaaaaaatatgaaaatattcatgaagtcttattgaaaataacaacgggccaggcacagtggttcacacctgtaatcccagcacattgggaggtcaaggcaggaggatcacctgaggccaggagtttgagaccagcctggccaacatggtgaaaccccgtctctactaaaaatacaaaaattagctgggcgtggtggcgcatgcctgtaatctcagctacacaggaggctgaggcgggagaattgcttgaacctgggaagcagaggctgcagtgagccaagatcacgccactacactccagcccaggcgacggagcaagactttatctcaaaaaaagaagaaaaggccaggcgcagtggctcacgcctgtaatcccagcactttgggaggctgaaggaggaggatcacctgaggccaggagtttgagaccatcctggccaacatggaaaccatgtctctactaaaaatacaaaaattagccgggcatggtggcaggtgcctgtaatcttagctactcgggaggctgaggcaggagaatcgcttgaacccaggaggtggaagttgcagtgagccgagatcgcgccagtgcactccagcctggaggacagtgcaagactccacctcaaaaaacaaacaaacaaacaaaaacccataaactaatgacatgttaatagaaataacacgttaacattttatgaaaaatactttcaaaacaaaaaaatccagtgagaagagggacgtggctttgcagttttgcagtctcttgaatgtttgtctgcatctgcgttgcatctgtcgcagtgtgttttggttgaaatcagtgaagagatctggcctcacagggctgagccgccttttcaggtaatcatggacactcttctctgatggtacacccggactggatgaatggtagagtttcttacaggttgttgcgataacagaatctgaaaccgtgccaatggactttttgtattgttacattatcatctgttgtgttacattatcatctgttggtctgtttttactttgttttttgtttttgttatgttttgagaaagggtcttgctctgttgcccaggctggagtgcagtggtaccatcatagctcactgtggcctcaaactcctggcctcaagtgatcctcccaccttagcctcctaatgtgttgggattacaggcatgagccgctgtacctggccctgtttttcactttgagtggaaatttacctgtgcataattttggaagaccatgttttggtattaataatttgaaaaatattggtttactgagttatgcagatttttcaaatcttgacatgttttattaaatattatcccaaaatcacattactatcaccccgatctcacgataaaagcctttaaatatttggaagctgatagactcacagtgatgaatacaagttttccaaaatgctgatttttacctaagcctgaattttattattggcaacagatcctgtaatttgctgttttgtgttgttttggagagggttttatttagtttttttgtttgtttgtttgtttgttgtttgtttgttttagagacaaggtcttgctctgtcccccacgctggaatgcagtggcaccatcacagttcaccgtaacctcgaactcctgggctgaagcaatcctcctgcctcagcttcctgagtagctgggaccacaggcacatccccccacacccagctattttttttaaagagatgggatcttgctctgttgtccctgctgttcttgttacaaggccaccaggttggtgtgccctctgcacagtaaccaaccaatacacggagacagcagggtttgcagcagagaaagcttaatgattgcaggtgccaagcaaggagatgggaggagaccctcaaatccacctcccctggagttctgggctggggttcttaaggagattatggagggtgaggggctggagaagctggggtcactgacttgttggggtaagggggatgaaatcaggaggtggaaaatgcatttgctggtgagtcagctcctgtgaggtccttcccaccagctggcatcagtaattttactgttatgcaggacctgaaagagcatctcagatggaaatcaaccttttacaatgtttaagttgttctctctatggtagttaggggaactatgatcttgggacggggtctgtgtgattctggggcagtaggcagcaacagttatgaggagaggtcagagagccagcccacctcgtcgtgacgctgcctgcaccaccagcttagttcattttcccttctccccctcccttcttctctgaataattttataaagtttacaggggtgatttcagcctcaaaccctgtcttcaagtggtgctcccaccctggcctcccagcatgagcctctgtgcccggcctgtttatttttaaatttcatttttaaaagtatatatttgacagattatagttgtatatatttatgaggtagatagtgatgttatgatttttaaatacaatcatttcagtttaaatcaagctaattaacataaccatcacctcagatatttaccatcttttgtggtgagaacatttgacatgtactcttagcagttttgaaatgcacgaaactctattattaattatattcaccatgctgcacaacagaactaaaaattcccccaaaccacaaaacatacccttcctgtctaactgaggcctggcaccctttggccatcatctccccattccccaaaccctggcctctagggaccagctttctaccctgcttctatgagctcaggtgttttagattctacatataagtgagaagatgtggtatttgtcttctgtggtttggcttatatcacttaacttgatgttctccagttccatccatgttgttgaaaatgacagaatttcttcctttttaaaggctgaggccaggtgcggtggctcacagctataatcccagcactttgggaggctggggcaggcagatcacttgagatcaggagtttgagaccagcctggccaacatggcaaaaccccatctctactaaaaatacacaaaattaggccgggcgcggtggctcatgcctgtaatcccagcactttgggaggccaaggcgggcggatcacgaggtcaggagatcgagaccatcctggctaacacagtgaaaccctgtctctactaaaaataaaaaaattagctgggcatggtggcgggcgcctgtagtcccagttactcgggaggctgaggcaggagaatggtgtggacccgggaggcgaaggttgcagtgagctgagattgctccactgcactccatcctgggcaacagagcaagactccgtctcaaaaaaacaaaaaacaaaaaacacaaaattagacgtgcgtggtggcggccacctgtaatcccagctactcaggaggctgaggcaggagaatcacttgaacccaggaggcggaggctgcagtgagcggagatcgcgccaccgcactccagcctgggcgatagagtgtgacactccgtctcaaaaaaaaaaaaaaaaaaagctgaatagtatttcgttgcttgggcgcatgcacacacacacatatttacacacacatatgtaacacacacatacatacacacatatacacacacatatatacacatgcacagatacacatatacatacacacatatacacacacatacacccccccacacacattttctgtatccactcatccactgatggacactcaggctgattctgtaactcggctgttgtgaacagtgtggcagtggacatggaaatgcaggtctcttcaacacgtggatttcatttcctttggaagtatatgcaggagtggggttgctggatctgctctgctggtttttaggtggcaggctttagacagggtctgcctctgttgccaaggttggagtgcagtggcatgatcttggctgactgcaatttctgccttctgtgctcaagtgattctcctgcctcagacccccaagtagccgggattacaggcacgtaccaccgcgcctggctaattttggtgtgttttttttttttttgtagagatggagtttcaccatgttgcccaggctggtctgaaactcctcagttgagcaatccacctgccttggcctcccaaagttctgggatgacaggagtgaggcactgcgctgggctcatgcatttttgaggaaatacctatgcagcacacggccggcagcaccacagtgtctcagctgtctttccaggaaagtcctgctccccactatactgtgggtcccccggctaattcagctggagtccccgtcgctcgagagcctcctcccaggaaaacgccctttgctgcggcagctttctgttctccctggctccctgcacggaactgagcttyggtacagttcatcatttgtgctgtttcaacaaagaccttcttagggaaatggcctcttctctgctttaattctgagcacgcactggtgaaggacactgtatctgagccgaggcccagggtgtcacccatcagagcctttcaccatctgtgcagatgtcagcgcggggaagggacacctcctttacataaaaacagcttagaccttgcaggctcctggaagattctgaggaccccagggttatgtgggccacactctggggagcagtgtctatggccccgtgtttggccaagcaccccgttctgatctttactttctccacctggcactaagcttycccttcttgcttctaacactgagtggggctccggggtgtcccccaccccatggcctcccaaagtccctggttcggggctgccgtgagcagcctcctgagtccccatggggtcctgggggcctttccctccgggtcagagtggcggagtccccggcctacacacacgagctcggcccagtgctcccacgctgacctagggctggcccctcgcggtcttcccttcccttgtcaaacacccctccctctgtctccagagtgccggygagctgggcgggctccactccctccatgaagctggcccctgagcgcagatgtgcaggctggcattcctgcccgctgtgagcatggaggggcctggcctcagcctcgcacttcctgacacggttgtggggtcggggctgctgggttctttgtctccctgtgcggccaggccagcaggtgggcgtagccaggcgggctccagcaaccccaccagcttgggggcagcggctgagcttgctggggcctgtggcttctccggggccttaggtctgtgttccctgcatccgctaagtccaggggtgggagcagggcctcacagaggggccttgggctgggagagtggggaggactgtgggcagccagtggcccctggcagagtggcagaggcccagccataggctcactggcatggggcctggtctgcctcctatgcccaggacgtcttggccgggggtctccatacctgggacccacgttcagcctggagacggaagtcagggtagcagggaagtagcaggaggtggcctctgtgtgacagcgggtgccggcggctaggggcccaccgggtggagctcctgggggcgttgaggagctgggcagtgggctgcagtggggcgccctggggccaggagggcagctggggcaggcaggctgtcccctcaccctctgggtctctcgtgggggccyggggccgcaggtctgggacgagtcaggtgctgggggcagccgaacccgccccagctcagccgcccctgctggtggtttctccgggatagcgtcctgccctctctgggcctcaatctctccctcctgagagtggactctcttgtgggctgggtggccagtggggcctcaggccaggagggagagggmgcccctctgtgacatctttcctggagaggctgaggctcccacttctacctgccctcagggggcttcctgagccaggggataccagccaagggtgtggcaccccacttcctgggcactgccgcagaaggtgggagggaggatgggaggatgtcagaggagcaggccggggcttgtgggggcctccggtacctctgctgggagctcgcgatccaagggacacagcgtgaggggccaccgcaggtattgaaacagaagcagccggcgagccctccagaagtgggagccctccagaagtgggagccctcckggggtgggagccctccaggggtgggagcyggcttggactcgctggccctgagcaggtacctgggctctccctgtgggtgagagcagtgggcgggcaggctgggaacttagggctgtaggacctgctgagtgggtgacacttcatcctccgggggcttcgagggcagaggtccctgcctagaggaagatctgctggtctgtgtgtggtcgttgcaccctgggcactcggcccggagctgggcctgggcctgggctgtgcttcctgattcaatggggacagggtccaggggacctctccaccctgtccccagcatggcccggtccagcctggccccgagtgacgttgtcagtgagagttgcccaaggcagcaggtccagggtctgagcagaggctgaaggcctggcaccggcaatgtccccttcttaggccagggtctgggctcctggggatcggccagcactccatggccagggcggggagcagcaggcctcgctggggatggccccatgacaagaccagccagtgctcctctgacctgtaggccctctccagctctccaggagccgcagagaccagtgtggctggaagtaagggcgccactctgggaccacggtggctctcagggcaggactgggtgggcaagcgtggactgcatctgtcctgcayggggtcctgcgtctggctcgcccggtgccgtgctgtggggcccacgccaacggctgacctcatggtcctccgtggcctcgcctaggcttgcggcagccgacgtggcgttgttgcctaattaggttggactgtgccagccccagcggagcccacgcccggcccttgcgccggcagacgtgtcggggcacggctcctgcactcccactgccgcaggaactgctcaggaacctgccggtctccgrctgggacggtggctggatcagctcaagcctccagggccctgaggctgaggggctgagtgctcattccagccgcctcggggaacccgggctgggagaccccatgcctgggggtgagcctggagccagggcagtgcggtgagaggctccggagagagggctgggcaccaccaggcttgggtgaggagggaggcctctggtcgagagcgagctgggagtcctgggggccccggggtgggtggtggcccaatgccctctccctgccatcttctggggccagggctgccagaggtgccgggccagccaagtctaggtctgtgccgattggagggggtgggtgaggctggagggccagggcctggggtgtgcagggtgaggggacaggtggccaaggggccctccttcctggggattgggtgcgaggagggaggcgaggtcaagggtgggggtcctacctgccagggctccttctagggccctggggagagagacatgcygacaggagcctgcccctcccagccctggctgttcttcccacctggcagagcatggctctgtgtgtttgagggcccaggactcctgatgtccatctgtgctgggcaggctgggaagaatccaggcctaatggccaaggcctccacctggcccctgttaatcccctccscagggagggcactcacctccctgaggggcaggcaccaaggaaaaggtggccagaaaggctctgaaaggagctggcctgagagtgaggagttggcgggtgatgtggtggaaaggcgggttctgggcagggaggctgagcagaggctggtgggacggaacccctgggccaggacgaggaggctgtttggagcctggggccccttcttgggagcagtgagaattaggggtttggagctcagccaagcggggctgcccttggcagacattaccagggagaccaaaggggccttgattcactgcatgggctgcgtgygtggtgaccaaaagggcttgagaccctggcctcaggagtgacactggtgagaccacagggctggagaaaggagaaagggctgcccgccatgcctgtggctcctcctcggggccgtgggggccccttgtgctgtgagggctggcaagtacctcctgtacccagcacagcaggaggggmtgggggggccggcctcagagacaccccaggcacctcttgctttgcaaatgtgctcctgggagactggctggtttctgtaaagcgactcctgttttgcctttaaatttcatcaagctgtggggaaagtgtcaacacagagaaacagctggagcatggaggaagctgtggcctcgggtccctggtcttctggcttcctctgtgactgccccagagacttggggtttcagggcagggtcctgtggctctcctcccctgccctttggttcttcccacctgactcttcagacacagctacccagccccactgcgctggcctatttacctatgaggkgcagtgaagctgggctgcaatgcagcgcctgccagcaggggtcactgggcacacactgtgctccctcccccgagttatgcacctgcctggacagacctcacccaccaactccctctggccttcttgctctctctaggtgtgtgatgcgctgctggcccaggctacaccccgacaagggacaccgggggcccygggagcagagagacctcagagcagcctcctcctgcctcctgtggacggccggccccagctggtgatcccagccagtcccagctttcagttgctgcccccaccgacagtcctcagtccctccatgatggctcccccgacagccggcccccttcctggcccagctcttccgcctgaggacccagggccgkatccggagagcaggtggcttttcttgagcgccaacattctgcccgtgggtgagtgaggccctggctaccbacaccaagccagagaacattgttcttctcctgctgagtgcgtctctgtttcctggagcccaggracaatacggttcagggttcagttcagtgaccctgatgtcccgtgatgtcacctggggagaactggggctctgctagcaccccagggcaggtggggccgccacgtgcagaggagcctggcgtgcaattcaagagctctcagtgtgtgtcccttcgtgtgggcagagagggggtgggttcattcttgggggatggctctctgcccacctgctgcactgggggggtctgggagaggtgcccctgcagctcacgatgcttccttcttggtcgtgttgtcactgtcagaagggcgaaggcctcccgatgtggcggacagctctggggtctagtgtggagactttggggtgtggagctggtcccctgagctcctgagcttctgctgggatgccctggagtggcaggcctgtggctggctgccctgcgtgtgcgtgtgcgtgtgtgtgtgtgtgcacaccgctatctgccgcttctgctccccctgggggcccctgctgctctctgggcggccgctcccaggcaagaaccatggcagtggtgagcgtgtgtgcgtgtgtgcgtgtgtctgcctgcactcgtgagggtctgcacctgtgcctacatggtgtgtgcccwagtgcgtgtgtgtgtgtgtgtgtgctcatgctctgtgcatgcctgtgcctcacagaggtggctcyggcttgtcaatgccacattctccagatatgcccagacaggtcttcgccatctgagggtggagctgcgcctggggagctgcacacagcccctgccgggcttggggccctggctttcagcgctgtctggaatggacaccggggaaaggggagaccagatgggggaggggagcaagctgcgcccccttctccagagcttccagagtcctggagagcttccaactctggcagggcctgggggcgggaggagccagcggtcctatatgcagaaacagtatcaggtccaggggcaacggttcccaggatagaggactcctgctgtgtacccttctgctgctggccctgcccctcatcacagtccctgcctctccgttcctaccccttgttactgtccccgccccatgcctgggtggtggatgctgagggagggcagtcttgtgctgggtgctgggcctaccctcatcctgggggcctttctgggaggctccttcttggttgagccsgaatcgtgtccctttcctttgagtcggtgcctgcccccactgatgccagctcagttacctgtgcacattagggtggtggttggcaaggtgccccgggtggtgtgggcctctggcctgctccaggacaggctcggctctgcctgttgggtttcggggtcccagactggggggcttgtatggagcctcgtgcatttaccaggcgtcagcttcgtgctgcctcctctgggactcacggccatggctgcccacagtgaggccaggccccactctgcagatgaggcrgtgaggaccccacaatgctggggctggcacctggctgccgactctctcatcttcctggctcacaccctcagccctgaagcggtgggcagtgatggggatgggggtcaggtccgcttgggagtgcagcttgggggtgaataactgagcactccggctgggactggggcaggtggacagcagggggcccaggttgggggccgtgggacagcactggggccagccccctgccctgctggcccctcatggctgacagcacaccccgtcccctgtgcaatttgccttaccccagttcttgtgtatccgtggtaacgggctttcatttagagcagcttgatccagctcctggggctaacgggtgggggagaatgcaaatgactgctgggcacgtggccgggcccatggcacaggctggggtgtgcacccggcccccacactcagcgccctgggcccgggggcccctgctgggcatgatgagggtctgagctgcccagacagtgcactctccaggctctgggagccttcactcctgatccctgagcctctcagtgcctggggccggatgccagaggtggagggtcagagcccgccgtgcaggcttgcctggacggacaccgccgccctcccacagcagggagggtccccaactcccccgtccggaggggctgtcacaggagctgcccctgggaggcgcctggaggtctttcccgtccgtcaggtggggaggggtctgtggcagtgctcccttctcttcccggtgcacacacgggctgggtggaagaacctgggcaccctgcctgcctgttacccaccagtgcccatggctgagcttcaagtgcccaccctttgccccctcccatccctgaggttggggccgtgtttccctctgggaggatcgaacagcttggatgtggggccccactgaactcagaggtgggagccttcttcaggctgccccctaatactgagccagcaaaggtaaatgggggtcctccttccactcttccccttccagattggctcccggcccccgctgtgtacgtgctcaggtgtccggggaggaccagtgtgctgtggtgtgggtggtggtgctgggagcagaggcaggcaggttttgtggggctgactgcatgtgcacctggggctgctggtggcctggcctccctggcatctccatgtggatgaggctggcagcatggccctacttggccgggggctgctgaggcccatccgggccggtgtgctcctgtcccctggagtactccagcgggaggctgtggctcttggggttcagggctgctggagtrtgtgtccccgccattctcactgagctggagctggagcggctcagtctcggtgccttgaggctggcacaggtgggaacggtgtgtccgcacagcaggagcctccccgggggctttctgacttcaaagtgcactcagatctgcgttttccttcggactctacaccggctcttatgttggcggctcttgtatgtttcttttttccctgatcatgaaagcaagactcactcagaggagatgctttggaaaatacagaaaaagacaagggagaaaatcagaccagccattgccatccacctctccccgctccttcgtggctttgggtgcctgggttaggcagagcccctgccggctccccaaaccccctcagagccatcgactccctccacggatgtgcccacactgggggtcccgggtgatgttggccgtttggtcccttcaaacgtttgaattttcccctggagcccggctttgagtgtctgcctcatgctccgaagggcagcagtgcagtctcccccgggcacccaggaaactcgacgagctgctgccatcaacatcgcaggaggttccttcacaggcatcgcgcgtccggcttcgtggcgggtctcccgttgtttccttggaggctgcgggtctccctgggtggcgtttgatgtatgtgcaccgagctctttgaggctcccaccttcagcttcttactgagcaaccaagggaggtggctgggtgtgccaggggccggcgggggccgcgcctgggcagggggcaccgcgccttccccaggtcagtccctgcctgaagccaggtcagaggcttttctagaaggaggcaggacacacggactcaccttcacagccgtttacaacctgggaaggtggccccagctccttgtgccgtggggccccttctctcccgggcacccacagggcctctggcaggggcgtatttcccccacgcacaggttccttatctgtctccwcagctgtatccagaatgcagtctggttgtggaaagcaaaattaaacactgcctttgtagacaaagcagctgccgccaggtgcgggcggcacaagctctgtcactggcctcgggggccctgactctcctttgagatgcagaaccctggacactgggccgtgggaccctccagtcccggaagggccaagtgtggcaagggcctggcttccagcaacccccttccccccacagccagcagaggagccccaggctgcccgggctgccagccgcactaaaagtggggagagcctcgccggttgtgtccccactctggggccatgcaagctcctctccctggtgccacgtgcactgatgatgtgcttcacctggaaatcgaggctccccgtggaaaccacccccgggcagaatcagctgtgggttgcgtatgtcctygggcgcccatgctgtacccaggctgcccaggagagctgagcccgcacgggaaggcaggcccctagaagtgtgtccccgtggcccagagctggcttctcaggggggatttgttctgagaagtccgtggcctgcgagcctcagcatgcagcaggccgggcagaacaccggggcgcagggacttggctttgtcagcagcaggaggcaggtgcactgacctggatggtcctgcctgggctgcagagaagtgggcagtccaggagctctgctgggaggaggagtggagctcaccaggacgaaggagagcatgtggaagatggtcccgggggtgaggacctttcctccaggaacccctgtcacctgcggacagtgagcaggccagaggccgggcaggggctgtggggggtggggcccggttgctgcctcttgcagggagggcacctgggctcggggtgtttcctcagagaggatagggaagtgaggctcacgcccaggggtccccgggctctgggctgaccagcgctctcacaccaccctgggtagtcagagggcaccagcaaagctgttttaggttccaaatggctggaggctggaggctggaggctggaggctggaggcatgtgttagtgaggcggggatagcaggcgcaggggcctctctttgcagggactggggaaggggccagggacctcaatggggtccctggggaggacagaggtgggaatagttgctggctggcagggcccgagtgcagcgtgacacggctctcagagcccacagcacgcctggcctgttktgatctccaggaggggagactgggtttccagggtcctttgatggctgtggagtacagccagggtggagaagatgatgaactgtgggcagctggggtccagagcccctgcgatgggaggctcagctcagtctggagtgagcccccacacctggggggctcagctgggaacacctggtctgtccagtgtggggctgaatttgctgctgagacttgggctctcatcatctctctccctctggccaggaaaagagtgagggcccctcctcccttcctccctcctctcctcctccctcctcccttcttccctcctcccttctcccctcctcccttcctcccgcttccctcctctctcctccctcctcccctcctcccttcctctctccttcctcccctcctcccttcctctctcctccctcttcccctcctctcttccttcctcctcccctcctcccttcctccctgctccctcatcccttcctccctgctccctcctcccttcctccctgctccctccttccttcctctgtttcctcctccctccttccttcctgcctcctcctttcctccttcctccctcctcccctcctccctcctcctcctttcctccttcctccctcctcctttcctccttcttccctcctcccttcctccctcctcccttcctccctccacctttcctcccttcctccctcctcccttcctccctcctcccttcctccctccacctttcctccttcctccctccacctttcctcctttctccctcctcccttcctcccttcctccctccacctttcctccttcctccctcctcccctcctccctcctcctcctttcctcccttcctccctcctcccttcctccctcctcccttcctcccttctccctccacctttcctccttcctccctcctccctcctcccttcctccctccaaggtcagtggtgactccccagggcttagmcgtcacctgtggctctgtctcctgggaggcctggagaggcaggggtgggtggctatgcaggctgtgctggcaggcatggcctgagggtcaggctagtcccttctcctagtgtcctggaaactggcactgagtgggcatatgcagccttgtygtgggcacygtggctcctggagtctggtgaagagggcagggttggtcttcctgggccagggtaggtggggacctgcaggcaggggagggtgtgggcagcatggcccatctggttagagtgtcccaagagaccacccagctgaggcctcctggggagctctggggccagggtgcaccttgggtgggggtgagcatggggacctgaggtgctgctggggcccctccccggggctttgctcccaagaccctcccacagtccccagcccagacagggccgccaggcctctcgccttctgtggggcagggcagcccccatgggtcaggtgctcagtgttgccctggggcccagtgggcaggtgagggagcagcaaggccacagcaggtccccgggtcatggagggcttggctgggagggagcaggcttgggttatggcccggggtcactctgccaatttcggtgccttggtgggctgcgagcccctcytctctgagcacggactcctgttccagaggcccccacattctctagggttgctccatgcagtgcccagcycctactcctgtccaagactgacttagacctcctctggccagctggacagctctgcccaaatctcaaattcatcatccctgaggactcaacctcagaccctgactccaggcctccctgctgggcaaatagcacccaccgcaactagggggcccagatcctgggaacaccctcccgcccaccatccgactcagcctgggggtttctctcctgtcccatgtcccactctttgctccacccctgcagcctccaccccttcagaaccaccctcaagtcatacctggctaagcaggggccatagccagatcgcctgctccctgcctctctctctagggacaggcaatacacacatgcacacgcacacacgaaggcacacacatttgtgcagacatgcacatacacgtgtgcataccacacacatacgtgcacacacatatgtatacccacccccacacacatagggaaacacatgtgtacatacaacacatgttcacatgcacccaaaccacacacgtgcacacacagtacatgcacccacgcacgtggccgtccatctcagtggtcttccagaactcgcctctcaccgcctcctctttggcctcgaaggccttccacgatctggcccttgcctgcctctgccaccccaccccaactgagcatccgccaaggtccctccaggcccgcctggcacctactgcctcagcattagtaaagttcttggcaacytggttgtgtgctggctttgcaggtccctgggctgaggcctcccccagggcagggtcacactgcgctcccagccacctggctcagagccctggggatgctcagagcgtgcctgttggcagccgtggaaatgagcaagcgcggagatgaacggcgctcggcagacggtgtgtgctggcgcccggccctgtgcaggcgacagttggtttacaaggaagtgtgcactgggcccggctggcgtggggtaagaagaaagggcagggcccagtgtccctgggtcccaccagtctctgccccttggcacccctggggcatgactgtgaggccgaggggcccagggtcagcccaggtcagcaggaggtccaggggagggtctgtccaggaggcactccctcctgtactgyctcccatgcccctgccatgtcccctccagctcacctcctgcaaaggtgtgcacactcgaccctggcctccatcagagagggcagcatgagggctctgggtgtgggtgcccacaggaaggggagggggctggtgcttctccacatcgtctttgccgattgcccaagagagagcacccccggccactgcggctagggcaggtgaaggtcccttcttgcccccgcctcccaacacctgctccccacagcctggaagtctattttcctccaaatttgctcggatcattccagctgggagcaccccccgtcccgctgcctgcccaccagtctgccaccctccctgtgtgccagaagggcctctggtcccatgggcaccttccctgcagatctagggtccttcagggggcgcagcgtgtgcaggggggaaccggggcaattcacggcagcattgagtgttttgccccacttcgccggcgtgggctgccctgcccagggatctggatgggccgatggagcccagctctggccacatgggtggctccaggtagaagtggctttgactacgccctcccagccctgacccagctcccagggtccctgtcttgctagacctggacggaaatatctcccttgccaatgagaaactgtttcaaggcaggataccatgtctctggggaccctgggcaggtgcctttctctctttgtgcctcagtttccccctcagagaaaagggtgtgtcaggcctcaatgattcctaagggcaggcagtgcctataaagacctttggcccccccgagggtgtcctcacccttctcgctggcaccagcccatgcagcaaggtgcctggggggtctcagagcaggaggctcagccctgcccacccaccccagtgctggccagacctggtccccgaccccagggctgcccccgggttctgggccctgttcatgggaagccaagccaggggcagctgatcccatcccacccgttcgttgtcttgagttctgattgagaacgggacgtcttcagaccagatgctggtggaaaatgaaacacacactttctaaatttagctgctgaggattgcacgtttacccgattaagcccattgattgagttgcgtgcacgtgctctctctgcagtgctcagctgtgcctctccgggctgtctgtcctccatggtgacctcaggctgcagaagggcctctgagacctcccgcccaggtctctggccctgagccatctgttcacctggggctgacactgccaccctcgggggagagtcccggggtccgtggggagagcccgtcagagtccagctggattcttctccactgaggaaaggcattgcctgagagacaccgcagccaggcctggctggagtgttcgagggcagcgggcacgcggctccctgcctgcagggacctcatgatcttaatgtgaagggcagactcaaaatcagggcaaggtcatgtccgggacactgcgggggacaaggcaaccagggaggcttcccagaggaggtgcctcgttcctgaccttggaaaccaggcaggggtgggcagggggcctgtggagaagggggagtcaggcttggtggagtgtctatgagggaagggcaaacagggtagagaaggcagctgcagccagtccacagggccctgggtgccaggctgaggggtccgatgtagcctgtggtccagctgcaggggtgggtgtattggagtgaggcctgcaggccagatggggtctgtgggtatggcccaggaagtggcccatctgggagcgcccgggaaggaagactggctgggagggctggagctggggaggatctcgggtggggggcaggcggtgtgccctggctgccggggttgcccccaggagcacccggccatggtggtgggtgcctccacacagtctgccgtgagaggaggcctctctccatgtctgtcgctggccttgcccggcccgcccggggatcttgcattgctgcgaccagtgatcctctctccatgtctgtcgctggccttgcccggcccgcccggggatcttgcatgctgcgaccagggatcctctctccatgtctgtcgctggccttgsccggccygcccggggatcttgcatgctgcgaccagggattcttgagcctctggctcaggatggagatttctttcacagtttccaatttgcgtttcggttttggcttcgtgcaggaggccaggtttctgtctcattgctgttggtgtcatctctctgcctctgtccctgggtccctggtgcttggccacgtccccccgggaacggaaggctgtgggtctttcctcctggggcctcatctgaggccactgagctccacaactgccgagatctggctgtgcccgggtggtcctgcccccaggaaaccgccccgaccatgctgtccgggaaagggggtgcagatgggcatggttcagagggcactgcccgctccaggtgcccaggaagtggagggggtgggttcccatcctgactgcacctggctccaggtggtctctaagccaggcagtgaaaggggtgctcaggctttcatctgaggaaagcccctagagggccgggggatgggaaaagtggagagagcccccctggcagcccctgccggcccctgccagcccctgctgtgaagcctcagaagcgaagaggcgcgggcaccacacgtatggtcccagagcaactcccagctccaagcaggcgtcgcatccggcctgggtttggcttctgccagctcctgggcctgcactgggaggggctgagcgtgggggcatgggggtgggcaggagcctggggaygttcattcacagcaccgagctctgtgggtactctttcattcacccacacctcatttattcctcctgcacgtttctgagcatcgactggcacgtccrtcctccactcatctgctgagtccactctcactttgggatcccagaccagctgatgctgtcacggtggggtttcctcctgggaaggagagggaggagcggcagctctgccctggcctgggcattaggtccctggtgtaggggtaagcagagaagctgcaggagccagcaccccgggagaggaagccagggtggagtctgggagtcccgtgggccrgtgtggccaagggagccaggaactagcctttccttggaggagaagccctggagctgccgcagggttcactgggggaggagcggctctctttgccttccatccacagcccgcattaaggcagccacacctcagggcgcagggctctgtcagcccctcagggtagtgatgacagaggcttcactgcaggctcatggtcctgggcagaggctgctagagccmgcccagcctcagccagatgaaacatccgggaacacacacccggcacagagtctccagggctgtgtggagatggcactgcctggtgctcctggaaagcagaaagcctcgggagcggagctggccctgcaggcggcaggacgtagcctctccgcggtgagctttgcaccaggaggaatcctgaccatgccccaggctctggggcacagccaagcaatagactgcttgggggagtcagaaacctcctgggcttcagcaatcaggaaagaaccatagacaccagcaggtctattcctggggaaactgaggtctggaggggagactgaggcctctcgtgaatctgtggggagccaggacatgcacctgtgtcttctgtctcctcttcagccactacgccagggccagatggtgggcagggtctgctttggagagcaaaatagaaactccggcaacactggtcctgagtgacacgctcccacgcacccctaccccacccctggcctcctccctggctcccagcttggtgcccatctcgggcctcatctcagactcagcctttcctctccctggcaggcagagctgacgggcccagggatgtgtgtktccttagtggcctgtgcccctttctcagctctggcgaggaccccctctcagtctgaaccactcatattagacccaaagaacaaagtccagggacccttgggtgcagaagcagcatggtgtgggtgcacggggytgccctagggtgaacgctgtggcttccctctaaggctggaggctggccttgtgggtaagctgggggctctgagtgcaggagcccttcttgttccagagtctgccaggagggtctgttgggaaagttctgcctcttggctctgtggccaaggcagacctgggggagctgaggcctctctggacacaggccagagctgggcagtctctcttgacttgtctcccgcctcctccttcatggctgcctgcagcagagcggggaaccgacgaagtgcctggaaacagagaagcctggtgggcagggagggtccccagggtctagggcctgtctctgtggctgctttgggcctccagggtctggaacagtggaagagttgactggtgtggggctagggacctgcccaggggaatggtcatcctggttctccctgggggcacaggaggcagcaccaagctccctccccccagaggtgggtgggctggccgcccgatgggagctaagggtgccctgccaccctcttggggctgggccgtaccccgttctcagcagtcccaggcacttctgcaagggtctgcatgtgcccctgacatcttagttgggggaggggtggcccaggccccagtcctcaaatggggaagggrtggcccaggccccagtcctcaaacgccagggtgttgggagtggggggtgggttgtagtgtcgccggggcccctgtcttggcttcttccagcgcctgggcaaacgcccagcctggagatgggaagcgctctcggccccgcccccttcccggtcccgccggctggggccacggggagccggagggaggcggagggggaggtgtggggagcggaaggccgcaggagcatctttgcggagaaagtactttggctgcggcgggcgcagggcgggccgctagccccgggcgttccacctgttctgtgcgttcggctccgcccggttgcgcccgatctgcctccagcccggtgcccgccgcgcagcagcgcccccggccctcctcccggcgctagcagagcaggaggtgttgatgcgggcggcacgagtgacagcagcgctcctcgcgggccactccacggggcaggtggttaccgcgcacacgccgccgcagcagccccgagctggcgggcnnnnnnnnnnnnnnnnnnnnnnnnnnnnnnnnnnnnnnnnnnnnnnnnnnnnnnnnnnnnnnnnnnnnnnnnnnnnnnnnnnnnnnnnnnnnnnnnnnnnnnnnnnnnnnnnnnnnnnnnnnnnnnnnnnnnnnnnnnnnnnnnnnnnnnnnnnnnnnnnnnnnnnnnnnnnnnnnnnnnnnnnnnnnnnnnnnnnnnnnnnnnnnnnnnnnnnnnnnnnnnnnnnnnnnnnnnnnnngccgaacgcccagctggagatgggaaggctctcgcccgccccttccggtccggccgctggggcccggggagcggagggagcgaagggaagtgtggggacggaaggccgaggagcatctttgcggagaaagtacttctggcttcgcaggcggccgctagccccgcccgtggccgcgccccacctgttctgtgcgtcgcgctcgcccggttgcgcccgatctgcctccagcccggtgcccgccgcggagcccgcgcccccggccccctcccggcgcggggcgggcagggggtgtggtgcgggcggcacgagtgacagcgcgctcctcgcgcggcgcctccacggggcgcagtgtcaccgcgcacagcccgccgcgggccgcccgagctggcggggcgatgccgcgggagccggagccccagcccgagcccgagcccggccgctgactgcgcctcccggcccgcagcccccgcccccgccgccctcgctgccctcgctgcagccgccacggagacaatggacgcgggagccgccccgcagaagcacagtaggtgccgctcctgccgctgcgccgctgccaaccgggatgcgcgggtggacgcgcgggggcgccgcagccctggtgcgggtcggggctgagctgcctgggcttcatactcgggagcggaggctcggatcgcggtggcacgggcaggggtgcgggcgcgggactgtgggcgggaygggcggagcggtcttgagctctccggatggcctcakgtgcggggtgagggatctgggggccgcccctcggcaaactttccttccccgggcttctgcggaggtcgcactggggctgtgaccgtgctgagaatgacccctgctgagcccaggccgggcaccccgatccctgccggatggtgccgcagggcaccctgtgtgggtccgggaggtgctgcgtggacttgccgcatggcacatctgcctgggctgcaggtgckcatctggggggagccggcctctccccacactagcaggtggggtgcagcgggcactgcccgggcaggcgggagctccggaggccctggggcggccctgctggatggtctgtaggacacgggagggggaagtgtttgagtgtccactgctgaggggtctcctgggctctggacctgccggcagagctacagggtattctttagggagatgggctctgctggagctggtggaggaagatgccaaggagataagaggcttcccctcccctccgctccccgcctcccacactgtctggtgacactggaggcagccaaggtggccactgatccccactgtgaccactgagaccactggaactgcccttcccccatggccttctccctccaggagaatggacccgatcggtgtccccttcgtcccctgacacgttggtctggggaggcggggtcacggtgccccaacacccctgacttggggagcccatggtgtctgcctgcctgggtgtctgatcctagagactccttcagcgaggtgcagcctcagaggggattcaggcaccatgggaggccggggaggggcaagtcagagggcggaggccactgtcctatctcctgcttggttggtggggacagaagccagcctgttggtctcccctaggaccctgggctgatgggagaagtcgtctctaaattggcccccactatgttccctctgcacttaagccagggccacattctccgcactgccctaggggagggtctggggtctggaaaggatgagggaggcaggtgtgcactgggcaagtgggtgcctgtggctgtgctgagggtccccacaggccccttccctgaggctgaacgcctgatggccctgccctctgggaggtgagagagctgagcctgcagcctcgtctggacgaggcagggagggagactggcgcctgcttggcatgtccccagggaaaccagggcagtgagagaagaggctggaacaggcctgggcagtggtcggggaactggtgggagtgtctgctggacagtgtgtagaagactcggggctcggggcttggtctggtggccttggcctcagatccctgagcatgaggctggggtcaggcctgatgtccagcctctggcagagctggctgtgggtggggaacagctgggggtacgggggagggtggggacaggttggcagcggcccctcctgtgggtgaccaggtasggaccctgcccagaggggggaggcagaggagctggtgggcaggagagaccccctacagaccctcctaggtggtggtgggggcctggcagcccggttcccgaggccctcactgctgctgctggagttcaggtgacataatctgcacggcacacacggattgccgtaagccgcagcagccaggtctgacaatacgagttgtaattggattttaatttttaatgtccacaacacatgaagagcttcggaccaatttgtgtatcttctgttactctgcgcctaataggaccgcttcattagctgctgtcgcacccacagtgccgtctgtccgggaackgagggagcctggcccgagccccatgccagagccccaagagctgcctgccacctgctccagtgatgggcacgccgacgggagsggggctgaggaccagcccagagggtccctcccgctgcctggcygggcttccacccccgtcctgcttccctgtccactgcagtcctagccagggtgctgcccctggctgccaggaaggggtggccattgggggcttggacatcagtgtacccactgaaggcccagcttccccgctgctgcccactctggggctgtcacaggccccactgggactcttgtctccaatggcccctgggcacaagtggccctggattctggggttccattgccactcacccccctattcacttgtggctcagccctgcctgygatttgggggttgaggctggagttaagaccctgtagccaggtctcccggggctgggggtggggtggcccttgacagactggggccccaggcagaagcaggagctgtgtgcctcaggcccctccctccccccagctgcaggggtcccaggaggcggggcagctccgactccgaccgccctccggattattcttaggtctgttgtgtaacaggcgcacattggaggcagagggaggaagggctcctggagatgtctcyggcggcagcagctagccagccgggagaacagcttttgtcctttccactcgcccagcacaaagggacaaaggaggctgcctcggctgcccagcccagctgagagctggccaacctgggcccatgcagaggggttgggctggcagaggggttggggctggcagaggggtcggggcctgcagaggggtcagagccggcaggaatgtgatcatcccttcactgcctcatgctccccagggctgggctgagtctgggctggggctccttcctcctcctgcccctgcagccccgtgtgtgtgtgcacacctctgtgcccatgcacaagcacctttccggggccagcttcaggcagcacggtggcctggtggaggtggaggtggcagagggtacccaccccagcctcagagccgccctcagggctcctcttcctgccttcctctcccaccccctcatgtgctcccagcagcctttgggtgtcgattccggggtctccacccccgcagatgggagcaggctcctcatgcctgccttctgagctcccagtgcagatcagactctgtgcgtgaggctccaggaggagccaggcttgatggcagaaacgagcaacctgaggggcttccagggctagggtggctgcagggtggggccccaagtctgtggggggaggcccatttgctcacctcacccgcatcctccaggaccactctgccttcagctccttctcccggatcgctggacctgtgttccgcacacacctgcacacagctgtacagtcactcccaagacggctaagccagccttctcagggctccccctcccctcccccaggttctgctgtgctcccagggtgccctcccactggggagcaaggagggacatgcatagtgggtggagattccaccaggggaggccccgtgttgagggcctgcagctccagggaggggccgctgacccggagctccactgtgacccttgactgtgactgagctgctgaccctggagagactggaaggcaggaaaggcttgggggtgggggcaagttgctgaaatgtccccagcttgatctctcaggttgggcccagggagacgcctgactggagcttcagcggtggtaacctggcctcactcctccctgatgtggcccggtctgcccacttcggggcagctgctctctgagtctttggggtctttccctcagcccaccrgggaccagccgaccgggaaccggggaatacagaggatgtattccctgaggatgcatgtgctctgcggcaaggcctgaggtctttccgtccctccctggctgcgggactttggcagggcactcggcccctgcttatccctccctcccctgcggtaccaggagagtcagtgagatcattcagaccaggctgtgccgcagtgcctgtgggtggagggcatggtgcccctggctgctgtggtcctttttccctggtsgtggcctccaggcagccaaacccaggcaaaggtgacccttgtcaggaasgctttgctgacagctgggctgcccttgccctcctggagcgccaggtgccccgggtgtctggagcaccacgacatggaggggtgtgtttcctgcagctgctgggaccggctgccgtgcactggccactaaaaacgccgcacgcttattctctcgcrgtcctggaggctggaagtctgaggtcagggtgtgggtggggccgcgctccctctgcaggctccccgggaggaacttcctggcctcctccagcttctggtggctctggcgtcccttgggttgtggccgcctcctgcttctgcctgtcttccctcgcccttctctccgtcttctcttgcgcctcgagtctcctttgtcctgtaggatctggggcctgcctgggtcattcgggacgatctcctcggcgcaggcctttcactgagcacgccctcagagaccctttttccaaataaggccaaattcacaggctctgggatgcggatgtgttttctgtcgggggtcgcccttcagccccctactgtggccgtgtgctccaccccagcacccccgcccgaggcaggccctggagctcacgctgctgaggtcccacaggccccctggcgmagcctcctggctccccaccatcccccctggtgcagcctcctggctccccaccatccagtctctccctgggtggggtcctggctccacaggtgaccaagaggggtactggaggcctggacgggcctcactccrttcttagggagcrgctgctcctggttcccaaccacaagtcacatcactgctgccccggaaggcacctggggcctccagaatgctcgtttcgtcaaactgttgtacgtggctcctttgctggcgcggggaaagggccgtgggcttgggccctggaacgcatcccaggatcagtggctctgcaggctccaggccccaccagctgctctgaggaggctcagatgggtctgggagtcctggtcggagctgtagcagcttcacatccccctggacggaggaaaatgcagattcagcacccccaccccccgccccccaccacccagaggttggagctatttcagtagaaatacatgttttaaactggggcgtctggccagccacggtggctcatgcctgtaatcccagcactttgggaggctgaggcgggtggatcacctgagatcaggagttcgagaccagcctgggcaacatggtgaaaccctgtctctactcaaaatacaaaaatttatctgtgtgtggtggcaagcacctgcaatcccagctacttgggaggctgaggcaggagaatcgcttgaacctgggaggtggcagaggttgcagtgagctgagatggtgctactgcactccagcctgggtgacatagtgagactctgtctcaacaaaaccaaccaaccaaccaaccaaccaaccaaccaaccagcaaaccagggtgtcaaggcccacacttgagggagtggtgtcaggtgaggtgggggaccaggtctgcagcagcctctgcctggcctgggtggggcagctctgcccaggtggtgtcactggggtggaggacatggctctggagctgggcagacttggatcccaaatctgcaactgtgtggccttgggcaatggactcactgctgagatgagccagcagtagtatgttatgggcagggctgtgtggctgcctgtaagctctgcctagccacctctcagggacagtggctgccccagcctcgcccygtcctgcccctgctccgtgacgctccctggaactcagtcattctctggggaaccaacagccctcagaactgagttgcagctgtagctgcagttgtctttgatgcataagtgggaggctggcctcggactgggctgccgccgccaagctcagccctggggaagtgggtgaatgaagctgtttctctgcatacagtgtctccctggctcccctggggtctcctgagccacctcaaggagccccggcccctcccasctgggccygtcccctgaggcttgtccaggaacaggcrccctgggcagaggtggcttcatccgttgctgtccccttcttggctgggcctcgrcgggggggcagatatcgggcacctcctcccaggagggagtttggtttttgtctgcaaaatgtgatccttcgagagctggttcaaacacccagccattccctccctccccgtgggcctccagcacaggcggccggtcctctgggtgcctcgttagctcaccaggacgtgccccacttttcagagcctctgctctacatgaagtgaagatgggctgggccgtctgggatgtttcccgcggcattcagaacacagaaaaggagctcgttaccaagtgcccccaactcggcctgcctccctattcagcctgcgccctatacagcctgcccccaactccctgcctggccccactccccgcttgtcccccaattccccacctgccccctaactcccccaccttccccctcactccccacctgccccccactcggcctgccctccaactccaactccscccctgccccccgctccctgtctgcccccctgctccccgcctrcccccctctccccgcctgcccccccgctccccgcctgccccccgctccccgcctaccccccgctccccgcctgctgactgttgcatcccaggttccagacccttggaccaggcgcgttcaaggccaagcacgtgggaccccagcctgggctcaaatccccacctgtccgcccaccagttgctggactgtgggttttggggacatacctgtgtctctgggtctcagtttcctcatctgtgaaaagggggtgacagtggttgtgagggtgagcaggtgacttgtagagaaggagggacagctcggcagtgggacccccgcctgtgctagggatgtcggctcccaggacacagccctggccctggccctgccataggggctgtggctcggccacccagcacacgctgtctggaaataggacttgaggtgcaatttggggcagggcctggggtccaggccagcagctgggccgagtgcgctccaggagggaggcctgttgctggtgtccacgtcaacaaggtgccgggcgcttctccactccccagggccctccccctcccagccaaggcaggcggtggtgggcttgcctcgtgtcccgattgtggggtctggggccagagatgtgtgtgcctccccggcccccgaagatcatacgcagtagcgtctccgagggatgccactagcagtgacaggcagagattgtcgcggagaatgtggctgatggaggtgcgtttctgggctgtacagatcagtgccgcccctctggactgatcagtgctgcccagctaacccctggcagccccagtagggcttctggaggaagcccctctactccagccccaggaactggctccaagggccaccgtgaggccagagagccgcgacccaccaacatgtcctatcaccgtggagggcagccctgtgggrgtctgcgccatgggtgggctgggggctctcgggggctctgacccctcagaggktcagccaccgttggcagcagggagcccttcccccagaccacagccctggtaatgggggcaggacaggccaatgggacccctccctgggggctgggcagcgagttggccccaccggcctgggaccctaacgtgctcttggccccagccctgcccccactgcgtctgggctgccgggggggcggtgggtggtggtggggggactgtgattcaggctgagctgtcacggatgcctgtcatcggcatgctggtggggaagtgtctgtttgcacagaaaacacgttytgagccccgggatctttgtcatccttcagaaatgccaaccctgtgaagtgaggtctgctctgccgtgggcctgtcggaggaggctgagcagagacttccgtctgggccccgagytttggcagtgcacgggaaggcgccccctccctctggcccgaggctcccttgctggtaggggcagcgggcagcccccactgcattgctgagcctggaaccacggtggccgccgtgtgcagccaggtgtgcagaaggacggtggaggctgagtgcagctgggccgcacgacccaggatgctggagcttcagggagcaatccggaggttctccagaagccgctgaggcctgggtccccctgccgccccccatcccccggccctgcctggcrggtagcagccccgtggaagtatttcatcttggctgaaaggcagcagctgccgtcctggagtgagccccgtggaggggggcctatctggtggggatgggagcccttgatcctgcctcctgctctccctcctgccctggccctccctgcctgttccctgccccagcccctctggcctttgggagcggccaccgtgagcagcaggaggtgagggctggtgctgaggtggggtccacctccctccagcggcgccttgcaggcattcggggagcaaatgcaccgttcactccaccccaagctgccccagagagcagcagatgggcccagggaggggcttaaataattcacaggcccyggggacaggggatgctagcctagggttccccaaccagaggctgggcatgaacctcccttctggggcgcctggccacccagtcagccttggtcctgggagggcctggagcttggccagtcgctgtcctcagctgaccgccgctgggcctggccccgggtgcagcaagtacacaacaaaggcagtgcctttgttgcccggagctcagcagagcctagaggaggacagcctggaggaagggtgcctgttggcacctggtcctggcttctcaggcgggaagtcccggctcaccccaccccttcccatggatccattcccggtgggggcgcccctcagtgctctcagagtcctggctcaccccgcccttccccgtggatccattcctggtcggggcgccccctcagtgctctcagagctgggactcctywccacctccacccaggcctgggccgcccatcccccaccgtgctacaagcctcctgcctgtcccccgatcttccagtggggcagccgggacartttgccaaaacgcaagtctgccccccgacagcgccagtgcccccactgtgctcgagatgtggtctgtgggcgccgtgctccctggggcccttccccgtgtggtgctgcttgggaggtgaagacccctgaggcatatgtttccagtccgccctgttatcgcccattgcaaagatgaggacattgaagctggggatggcaggcggtgcaggggaggcccttgtcctatctggagggctcactgggagcgtctgtgcacaccgcaggccctccccagcctggagaagggggccactggccccggaatgctgacagtgatctgggctgagacacggggctcacaggacctccttcacgtgtccagggccagtgtcttcacagggccctgtggcctttgccctccccattgcccagggccacccccctctggcaggggcaggaccctccaccaccccttccttccaccccctgtggagcagagccccatcctcccagcagaggaaagtgcaccccagtgcctgctctctgctgcctctttctggggtccttgttcctgtgtgcagcccctggacaccctctcctgactccagcagatgccagccctgggtccagccyggtgcctgtccccgtctcccggtggggagggctgctatggcttccagggtccccaggactttgggcaacggtggcgggggctgctggaggggcctggcctgcgcctgccgagtggggtgggggaaagagggcaggccccagccagtgtgggggcctctgagagccgagtgtgtgggggcctctgagagccgagtgtgtgggggcctctgagagccaaggctggtagtggggttccgggggtgccgcaagccacccccaccccgagtctgtcacccacctatgggtgcccactgtgggcatagccatgagggccacctggcctctccagcagtccgggctgggtgtttggcctccccggggcatgtcctggctcacctggctgagctcctagggcaggaactgcctgttcccttcctgccctgcagcactggaggtgacctgggcctgggccctccagttccccgatggccagtgccccgcccaccatgcccgactcaccctgacacgtggggatccccaggcagccccgagacagggtcttagggctgcctctgcaggacccttggaagtgcaggcccttgctcaggaaggggttgatggtgtggtatggcaggaggcggcaccacgtgacatgcttgatgtgacatgatgtggtgtggtcccctccgggaggatggtctgtggaggctcaaggccatggacctgctactccccaggggctgaaccagcaatgcaccgagtggaccgtgtccctttacttggtaggggtggcctgatggtggaccccaggccttcctgcctgggaccctgcagggcctctggagccccctcccaggtgaggcctccgagtggggaggggccaggacctgagccccagtggcttccccaggggcccccagggtctgggataaaccgggaatggtggcttccctgagagcagcgccctggctcggcccctcggtgtcctggcccttgcagggctgttggggcagggcctgtctccgaaggtctgtgcactatgtccttggccaggtttggggctcagtggcagtgtgggtgagacagagcaggtggctcgcggctcaggagccccttggagccctctcactgtcaccagtggagtgtgcgtcacccccagaaacctgttgtccaggctggaccctccctgcctgggggcagccaggcctcggccccccatgtggcctgagcacatgcgcccagctgtgctctgacccccacctgctccagaaggctctgctcctccctgaagcctccatgggccagacccccatgatgctgagcccccagcggagccgggacctggctctccccttacccttgagaccatgctcttttctgagataggaactcagccgacccatctgcaggcttagcccgggcatgggaccctcggctgtgggagctaggacgggcgggcacctggaactggacgttggctgcgtgatggccagtctaggctgggtgctgcccagaggcccrgcaggtccctgttccccggcctggcctgagcaccaaggtgtcggggcaggaggaccctcggccctgccaggccccctctgcatccctcggtgtgggtccccaaatttggcggttcacccactgttcccagggcctgtgctargttgggagacacccctcagggagagcacgtaggggcacagggtccccagagaagggcctactgggggcgcagggaggctggcagcccgccttcctgcaggtggagttagactcagtgagtgtgaaggatgctctgtggccaccatagctggagcagctgcctgtgggggatgccgacgcttgttccctggggtcctgggggtcaggcgggggcaggagcagtyagaagcttcagaggagcggccccagggcctttgctgcagatggaggcgggaggctcccaggtggcaaagcgcacctgctgcaggtgtgagagggcccagttcggggagtatggccaccgggagcccctcgggccctccacccccctgcagggcctccctccccggccgtgccccggtcttcaccctccatacctgttgagccgtgccgtgggtggaggtgagcatcccgcgggcgggctgtgtgcgtgtgtgtgcctgtgtgctcgtgtgtttaagtgtatttttaaagcggctttgcagctgtgtttgactcacttccattctctggtaggagctcggcaagtggtgcactgtgggttattttgggcttggcaatattgcaattattagattccgtgtttgtaaggaaacagcgtcgcctggggcagcattggctgtgggtggcggtgttgatgccgtttgggatgcggagcccagaggggaggcccagcttgtcccttgggcctgtcacagggctatcagggttaccaagccgccagcaccagatcacctggtgggcagtttctcccgggcctttgtcggatttaggcctcccctggcttccgagcgcagcccccccagttcgtcccctgggcgctggctcctacctgacctcatggccgctgagccccgcagggtcttggaggggctccagcccagcttgggaggcggggcggccctggggggygggtggcgctctagccacgcgctctggggctcgtcaaaaagacttaaattgccccttgctctcagctgtgccttaaaaagctgcrggtggtgactcagttgtcaccgtcactgtcaccgctgccggtgcttctggggacgcgtgaggtcaccggggtggctcgtcctgtgcagcccccgcccccggcagacccgtcgaccccttggggttgggggacatgggggagctgctggagctggtgagacgcggcctccgtcggcttcctgccatggctgtaacttgagggagccgccctccttgggcctcagtttccccctctgaagccagggagctgggccttcctctggacttggtttgtccagggctcttggtgggaggtgcccacccttcctgagagaatgggcccacttggtaggacctttttctgccccttctagggccagcggaggggcccgtgctgggtmtgcggagagcaggtctcacagccacaaggggcttccaggtgggaagggaccccaggttcacaccatgactctggcactgtgaggggcgatcckcacctcctctaggccttaggcaggtcctctctgtccagccagggcccctacctgtcatctccattttcaaaggggcaagagccacctacctccagaaccccccggggctccagtcctcaggcgcctggtgtggcggtggtggctttgggtccggccctggtggtcttctcacactggccagcccttgtgcaggatggcctggggctggggggtacccagggctctctcaggtgggctgagatgtgaactgaccagctggcagctccgtccatcagcaaggacaggaatgaggcctgggcctgcctggccacgctgggctggcccgccctccactcagtggggacctctcctaccctccctgctgggcttcaggggcctttccagccatggctgggacctgtgagtggccaggggctggggggctgcatgctcccagtrgcctcgtggccgtgatcacaaggggctgagtgccctctgcctcagcttcctgccactgcagcttctcgccagggttccccagccgcctgctccccaatgtctcctggccttcctcccgggacgctccttgggttctgagatctgctgagatggggcctgtgtgttgcgggacggggccgcacccaccctgggggagcggctgagctgctggatggcctcctgcctctcaggggcccaacagcgacctgcaggcagtcagggaggactccctgaaggaagcggtttcctcagtgtctgaccacagggcagtcacaagttccccaaaggcgaaggtggctcaccccgagtcctggctgcaccctggtacccacagcctcgtgtggaacatgaaccatcccggtcccaggaggcgcgtgctgggagcggctcccagcccttggatgatctttcctcttgcctaatgggcaggctgctttcttttctgttttagacctgaaaaaaaaaaaaaaaagcatttgccagcatagcactgatggccacccggcccatgctgtccaccgggcgggtggtagggagggcagagagcaacgtgcgggcctcaggcaccaagraggccgcacaggcaaggggctggtgggcgctgggctcactggtgcatccctgcagggctgactggccccaggctgtgtgtgtgagtgggggtgggccatgccgtcactgtgggcacccaggcctgtcctcgggagctctgacagcacagggaaggtggccggctgggtggggactcagggcaggacaccgggctgcctggggcggggggactcctatcagtccccgtaaggccctgctcagtgcccggcccctgtgaggctgaggaygggacaagggtgtgtcctgccgtccagacactgggaccttgtgcaggcatccagctgccttggagcagatggcagagaccctggagcagggcactagcagggggctgggcacctacagcaggagccctcagccgggacccatsacacaggaagggctggaggctgggctggacagtcccccttgggcactggcctggcctgacctggacatgccgagtggccrgggaacgggtgccaggctggcccgagtggccttcctgctttcacaggaactggcaggccgggtggacccagtgggtccagcaaggttggtgtgacccctgcttcctgggcctggggagaagctgggctccatctgtgcccctggagcagccagtggctgagtggccggaggagatgcctgaggaggctctggctctgccctcagggacgctcccgcccagaccgcgcccatacaggcagcctgcccccagtatgggcagccccccaaagacccatctgyacagggatgatctcgaggccacgtttcattcccacttcagcctcctgtactcccgagtctcactggcttctaatctgcacttatgcaaccatggtaaaaagtgactacatctggggatgtccccgtrcgctgtgatgtgtgcttggccrtctctgcaaacgggggcccgaggggctggtgctgcttctcagcagcctgggccacgccggtcttgcagcgtggctgctcctgggcactcttgagtcactgcctcgtagtgacctggccccctcattgcagactcagccccgaatcctgctccccggtggctgggttgcacccatctggaggtggggctcaggaggcggccttggtgatgccaggtggtcagtgggtttttgccayccgccaggagcttcactgggcctcccgttggccctgcatgggacatggtgacaaatgccacgctggtgacaagccctctctggcttgtttattttgtcttgttggagatgcacgtgccccttgcagccttgccggtggtcttccttgccagtggtcctccttcctggtggtcctccttcctggtggtcctccttcctggtggttctccttcctggtggtcctccttgccggtggtcctccttcctggtggttctccttcctggtggtcctccttgccggtggtcctccttcctggtggtcctccttcctggtggtcctccttcctggtggtcctccttscyggtggtcytccttycyggtggtcctccttgccggtggtcttcctttccggtggtcctccttgcctgtggtcctccttgcctgtggtcttcctttccggtggtcttcctttccggtggtcttcctttccggtggtcctccttgcctgtggtctgtcttccttgggctgacactgagccagcgcttatctgaatgcagtgctggcgcgtggggaatacgctcctgagtmattcacacgcaggaccggccggccgtggacggcgggcagtgtttggaggccagtttctgctcagcgcctcatggtggggctgtttccttggcaccgtgaggggccggtccatgcrgccagtggaagcgtccatcggcccctcaccactctgttcgctcccctctggcctgtttggctccaagcgagcaccctgagctgggacctgggccaagcgctcttctgctccggcagtgactgtrctccagctggcgctgtccagccctgcccaggccctttctgccctccggttcctccccttgctgctctagsctggcctaagggaggggcccgtgcccccatgggactggcccttcatgtccccaggggccctgctgtccaggaaagcagcccattctctccagggcttttctaaggccatgctgccccggggtcccaggccgggttcccccaagagctaggacccctgaccactgctctgtgtctcccagaccagaagccctctgggtgcggggcctacctctggtttcctcacttcctctccagctctaagccatgcccacacacagcaggtggttagtaaaccccggctgatggctaggggtatggaacaggtgggctggagacaggcaaggaaggacgcagagggtggcaggtcttggccccggggcatgggccgtgtgggctccctctggcctgagaaccgagtctgaggactgggatcctgggagccaaaggcaggggcttagtggcataaaagggacactgcttctttttcaaggattttcatatttttaacgatgcaagcagctgggaggcctggggcggcacccaggtgtaagctgggctgctcgggcctgatgaccctggtggaggctggtgaggctgaaggggctcctggtcctgggggtggggactggcctgcctgtggggccaaggctgtgggggcctttgaccagcagccaggggctgacctgagctcaggtttcaccgtgactgaccgtgtggacttagcaggtctcacagcttctctgagcctcagacccctcagtgcagcggcaacactccccacctgcagggcaacagctgygggttcgcctcttctctctctgcccttccttcagcaggcccttgaggctgggtgccagcctggtggcgtgggggctcaggagtgtgcccagtgcccctctctggggccggatctcacacccccacatggggagggcctgggtggggccaggtggccagcagctcctgacagaccctgctgagggtgtgtgtcctgggacgtggctgcattggtggccatggggcagtgttcgtcctgcaatcctgctcactggactccgtgccaggctggccaaggctctgcatggctgctgcatgcgggcacagaatstaggtcaggctgttgcaggggggtagggctgggcagccagggcagtgcctgctccctcagcgtccagtggggctctgcagcccggggctggacacctgacccaccgaccttggccagggcccttctggtggtgcctgaaccccctggcaaggctgtccttcagcagggaggagggaggcatgtgggcacctgctgtgactgtggatgctgctagcagggcgggctgagctcggtccatgtgggacctggcccctgggcactgggaggctaggatgtgtgggtcctgctgagatgattcagggcagagccttcccgaagctccggtccctgtggctggctcagctttcgctccctgctgggttacccagccctggggcctcggctcccctccagcccgcaacagggaacactgtggggacagtgacgcccactggacaccccatccccatgcctcccgcctctgtgggcctcaaatccagctgtttcttgctctgtcttctttgtttcttctgcgcctctgccttggcattaacaatgttccctttgaacctgtctgcaactcccccaggcttgggggaaccaggagcagggctggggcctttgtttggggaatggcaccatggaaggtgggcagggcagctggggatgccagactcatccccacccagggcctctgcatctggccttccctggccatccacccgggaccccctgtcccatcagcttgtgtttgcttgagtcccactttcttggggctgcctcccctggcgccccctctctggaactctgcctgcactggctgtgccactcggcagcccctctgcctgacaccccctctgcctgacacctcctccacctgacaccactccgcttgacaaccctccacctgacaccccctccgcctgacacccctccgcctgataccccctccgcctgacacccctacacctgacacccctctgcctgacaccccctccacctgacaccccctccacctgataccccctccacctgacacccccgcctgacacctcctctgataccctctgcctgacacccctctgcctggtaccccctccacctgacacccctctgcctgacaccccctctgcctgacacccctctgcctgacaccccctctgcctgacagcccctctgacaccgcctccacctgacaccccctccgcctgacacccctctgcctgacacccctccacctgacacccctctgcctgacacccctccatctgacacccttccacctgacaccccctctgcctgatgcgtggtcttgtccccatggcctgctgtcaggtggtcaccccaaggcatcttggtccatccggggcaactacggtcagtctgggtggcccgtggtcagtctggccaggtcctcactggtctgtcttcctcctcagccaggcgaygtgctcctctgtgaccttagagccccagaaccgagctctgggctctgggcatcgctggggtggtttcacatggggccctgggggctgaggcagtaggggatctttgtgctggggacacagcagggccttagaggggcatcccttgccttackctgtgctcccaccccctagccactgcccaggacaggaggtcgctcagcccatcctggtgccaagatgtgtgtcggggtggtgggggtggatctggcccttcgaggcccccacagtgggcttagtttcctaaccgaagccgtaacatccatagaactcttaaaccaggcaagaaagcaacacggaattcgctttgatgttgaataattaatgaaatgtctgaggtatgggcttctgggctgtgtctctcccagccgcagagctgtcagcaccgtctcgtcattggaggggcctgcatttctgtctttaaatgtgcgcttggcacctctgagaggtaattaggacgttctgtgcacgatgaggaggctggggtgctcacctccagggggctgcagggccagtgcgactgttgtggaccagcccyggagggggagctgcagggtcagctgggctgtgagaccccgggcaagagtcccctgcctcagtttccctatctgaaaagtgaagaggttggatccaggggcctctgggggcccgtcgaactcagacattccaaggtggtggaggagcagaatcagggacacatgggggacctcgctrtgtccccaggtcgccctggtgctggtaggcaggctgcagagcccctgcctgctgaagtttgctgaacggggctgcagccgagaatctgtttactgcagcaggtcatcgggaagcgtttccttggagacatatgtaggacagaactcggaagctgaaaccgaggcaccccacgaaggccccacaccgctggcgggaggcggtttctcagggctctgctcctggaggctgctgggagacagctgcmgcccggagactggtcagagcccgcgacccgagaacagggctcctagcccctcctcacagcagtggccacccagggggatatcacacttggacctttggtgcaagaatgtcccccgccagaccgcactgaaggtgcccactgccctcctctgggaaccctcctccccatggcctgagccaaggcaccagctggccaggcccttggagaactgctggtcctccctggttcaacacagggaaactgaagccggagaggcagtgaactcccatggggcacacagagtcgggcagagtcagggtgtgaactggggtctcctgagctgrccggagcactgcccttcccggctcctgtctacagtggcattttctggaacacactcagggcaccccttgctggcagccccagaggacatggtgctgggcttctgtgcggtgggatcgctcggcagctggttgcgggtgtgaccaggscactggcctccctggcggcacaggrtgctgcccactgtccaagagagggctctggggctcagaagcagctgggctgtgggaagtcctgggggtggagtctctttccatggggttcgagtgttggcaggggggcttcacgagcttctcccctccccactctgcccttactctggtcttcccgatgtgcatctccatctttccatccttggctttctctggggctgtttgtgctcaaacacagggtcacctgcgggctcagaattggcaatcctgacgcaggctggtgcatggagtgcttatctggcccctgggcatgcacacgagtgcacagaggtcctcaggggtgcctgggagcctggagcaaccctggcctatagtggcccctgtctttgggctggccgtgtcttcctgaacctgtgccctggggcaggggccacctaaatggttttctttggagatgagacgtgaaggaacttttgctgcaggatggctgaggaggggggccacctcctgctcccccaagccaatggagaaagcaggaatggaaggtgcactgcagggaagccggggcctgggctctgtccggactcagctgcctcccacccctacccctgtgagatgctgggtggtgccctgcctgcttggggcctctgtccagcctgcagggcaagaaagcccctccagctgaaagagatgagatggagacactgcggactctggggtgggcagcatggaggtcagggcagcacctggttcaggtggcctcgggctcacggccagctctcagtcaactcacacagactgaagacgggaccctcaggctcggctctgcaggaggcgttaggggctcagcaggccctgaggctgggcttggtgtcactgaagcccaagagggcaggggaagtggctgcctttktgtgcagagccagggcccggggagcaggtgtgcagtgtttccattgcacatcaaggaaactgaggcacaggggaagggggatcagctctgcccacctacaggcctagctgagaacctagggctgtgggccaaggtctaggctcgccctgtctcagggtgtggtctcctccggcctctgtcctggcaatgcctgtgaacccaaggagagatccagccagggctcacagccaaatccagccttagactgtggggacaggggcagcctctcagacccggaaggcaagaaccagtcccagaaagyggggctgaggagacacagctctgggcctacagggtggggaccctctgccctctgccctccaccctccggccaaggcagaagctgggtctggtcctcccagctgtgccggcccatgggcaggggctctggcgggctcacagctggctctgcgtccctggatgtgcttgttccttccagtcgccttcttcaaacgaggagaaaattaaactccctggggcctggctcccctgccaccatggtgcctcctcacctgctgcccgccgcctgccgcccgccacctgccacccgccgggccaaatgctctcaaagacagaattctgcttaaatgcccagaaaagagatttaggagatcagaatcttaagcaaattaacatgtgcagygggcggcttttaatcaccgcctttaatcgcaggccgcrgtgacggaaatcatctcctggctgagtggcgggcggggctggccctgaggatggattattccttagaacctgaacctgggtttcaccggcctctggaagggggctcaggggcctctgtccactccaaggaggcgtggctgggtcrggacctgcagcccgcacacccctctccctccttcccacccttgggcgtgtctgtggctttcgccttctgtctcctctccccacctcagtttctcccttctgagacttggggctgctggccctttcctgagtggactgtcccaggggacatgcagagcccaggtgtgggggatgctgggacgcctgttgctcctgggccactggttgcctctggcacacgtgcactgcagtgtcattgcctggacagcccccattgtggcctggcctcccctcagccctgccactcagctcagcaccgggacccactgagacctggggcccagagggagggggccgcccctcccttctcgcagctgtgcccagccaggcggacacaggccctgggaccctggctgtgccgaatgggtcgtgagagagactgttcattcacgagggcaggtcccaagagcccagggcaggggctggtccagccgagggtcctaggccacctgagtggtggtaaaggcaggaggcagctcctttgagggtgccaggcagctgcgcccaggggccttccttggcaggacccaggtggtgactgcagctgctggtggctcccctccccctccacacctggggccccgcatggcaggaggtggtcacaccttgaggtggcagcggctcagagagcccagaggyggccccacatcctcctgcccgggcctgcgtgcctgcctgccctgcccacatccggggctcagtgtccacacaagcctcccaggccgcactctgggatgggggctcaaggccccttggggcagaggtggtacctttcagaacaccccccatgggtggacgtctcttttgtctggaaaatgttacgtccctcagatgctgggagcagcgcgtgcagggggaggcagaatgctggctcggagagggagaggaccccagcgcgggcagctcagcactggacagacagggcagggaggcgaggggctgggagagcacaggaaggggtgtagcagcacgcagggctgcagccgtcaccgtcaccatcaccaggagctactgctggractcggcctcccccaacgctggacgccccccagggcagccagtgaaatgtcacctcaatgacccttggcagtgctcagcccttcccagaggccctcctggggtgagtggctcttcttggctgcagcctgcggggcctggggtgtaatgaccagagggtccctgtggtggaggggcagccagccagggagcatttggctctggtcctgggggtgcagccacccctcagtaggaggagccctgccgggagggagggagggagggaggacaggatgaacggtgggtggtcgctcaagctgctatgggaagagccagcagccaacccgcctccccttctggcctctcagcggagccagctcagctcccgccagagaccccagcccaggtgycctcccttcccactccagcagaggctgctgggcccgggctgggcagccaagggttaagtgggcggggctcccacgggaggggcggtcccagcggcggcccsgtcccgccttcccctcgccttcctcrccttcctcacgggcgggcgcggcagggcagcgtgtggggctgcgatcggcatgggctctgcgcgcggggtgcccctgctcgggctggggctcaggggacgccgggggccagcacagggcccggtgtccctcgggccgtgccggtaactgggattggcacccgccggccatggaagagcctgggcccccaggtgggctcagccaagaccaaggtaagggggcaggtgggrtcccagaagggggttgtgatggtccccgtrgggagcccaggaccggacctgttcactggtgacccgcccaggaccggacctgttcactggtgacccactgaccccccgtgggcagtgcagagctcctcccagcagggtctccgggagcacggcccaatgaccccattacctgcacatccctcagactcggtcccagaggagggatgctgcccccaccccttggcgcccccaccctgcctcatctgcccctgtgctgacacgtgaaagcgagagggtctgctccctgcaaagggtccaacacagtccaggtgggcggtgggggaggcgccctcagccatgccagcacgggtcctgacctccagcttgatcccagcggatgcacactgctcgggtggggggcaggtctgggggtgccaggggctggtaggctctggcttttggctctgggggctctcctggcccaaccccaccccagcccctgatcsaggttggcaraggtggccctgagctgcagtcagcaccatggacaggggcagctgctgctttctctggggggcctgcagttgctgtgcgtcctcagggttccctggagttacactctggtctggcccatcccgctccgctccgggttggagatttcttgctgtgatctgtcacgctttcctgacctgggagccggacattgccctgcgcagacagagcggagcagcaggggtggcggaagccccggggctgttcacagcaggagcttccgaggggcatcctgggcaggccccttcagcactggctggggcagggtctmcagctccccaaacacagcgctagctctgggccagaggggcagggtctccagctccccaaacacagcgctagctctgggccaggggcggggagaggaaaacgtgaagggggacagtggccacggctgcagaagaagtggctcaggccagacaccaggaggaactcctgggtttccagggacagtaggagcttgcctcctggtggtttggaacctgcttgttctgccctgtgattggcatggacacgtggggtgggacatggcatcgctgctgggcagactggggacgggttgctggtttttgcctctgataaaccgtgtgacctcacacaagggactgagcctctctgagcctccatgggcaagagggatagcatggggcgctttcacagggtggctgtgggcattcagagcaagcctgtctgcagtggtcatgccgtgcctggcctgtgcagctgctccagggtgcctgtcccctcctctgtcccacccccagtggaggtgccctctctgaatggagaatagtgtggcagatgtaaccagggctgctgggcagacactgtttgtaggatgggctgtatattcaggtcactccaggtgcacccactcgctgaccgcagcccccatcccagggctctcctgggcacgttgtccctggttcctgcctgtctggcctgcagagagctccctggagtcactgccctgtgctggccactgggctcaggatgcctgcctgctgtggacaggggctggctgctgccgggtggccccaaagccccaggttccaggagacccagcacacttggggtctgcagctggccagggaagggcctagtcttaggagggggcagtggtgggagtggctctgagcccaccctccgtgcctrcgtcctctgggcagagggaggggagccagcagaacagtccttacagactccacgtgccgccgaggacggagcagatgggccagtgtcctgggtccagccctccatctgcacagctaatgagctgatgacgatggcgtcccagttcctggcaccttctcctggagaagccatgggctggccctgcccgggcagtgccctttgctggggcaggtgtgtgtggggtgcctggggccctctcagggacccaggcccagtggctccaccttcattgagggtgggcagggggaggggttggggaaggggatgagtaatccaacgtgcctgtttcttcccgggattttgctcccagcactgcatacgtgggctcccaccggctggacggacttcctgtgtgggaaaggcgagtgggcgcgggcctcccgtgtgggggcagggtggagttggtggacaccatccccaggacaggacgtttcctctggctcctgagaagtcactcaccgtggtggccgcaggcatggctccatgctagctgggtgaagaccccgagagggggccttgkggctgacggtcactggagacaacagtgagccactctggtgggactgtggaaccccctccagctctgccccagagagcagcacctgggtgagggctacaggaggctctttcagcaggcaggtcccaggcaccrtgatgcagccctgacttggggacggtggccacactgtcctgggagtaggtcccttccaccgctcagacctggcgacccaggarcacacctctgagggacttgagtggtcttgatttcacattgatcaggcccctggctgctccgactttcaggyccctgttgtggaggtttcgggcggcccagttctcaggggcagccctgtgcccttcctgggtcagctggtgtgtgggtgggggccgacccagggagcacctcactggctcccaaaaggcaggagtgggagacagggcagccagcccagccccagggccagcttgagcagggaggtccagacagggacrgaacgactatacaagatcccagaaacttcaggcagggaagctcagagggccagctccatctccaggacaccctctctgtctgagactctctggcagagcattcgtggggctgctccccggcctggcagtggcccggggtgctctggccgggaagagcagccccgtgccgggacggatgtggcgggctcagcctcctgtttcctcgcctcctccgtggctccatgcctgctctgcctggcagcggcccagctgccaccctccctcccgcgcctggctatgggctgggggcagggctggctctgaccacttggcccgaggaccctccccttggagctgcagccccctcccctcactcggcaggagctccctctctcccagctggcaggccaggctccatctggtgacttttcaggaaaggctcccccaccgtggctgccacgagcctggctccctctgcagctcctctggggtgtcctggacggtggctgggggcaaggccgtgcacctgccttcagagagccccaggccargtgggtgcgatgcccctgctggccatgccctgctcagtgagggcagagaggcagccagggcctcagagaaaccagtgacttgtggcagggacaggagcctccagggacacacaatggggggggcactcgcgrtggggggaggaagctgtgaaatgggctattaatagggtccccttcctgatggggctgtcaagtgcgattaataccgctgctgtgagctgggctgccaccagctggggatggctggggacrgcgagggggcaggaaggggagcccactctgggagggacccttactgagatggggacctggccctggctgtcccgaagaggccagagaaaggccagatgttggggcccccttggccatagcgggccagctggagagtgtggaggcctgggctgggcaggcgcccacctgcacaagaagggctgcactgggggaaggtacgggtcacctggcctcagaggccatcctgtccacttgccactgccggctgcttggagggtccagtggcctcaagttcctgcacctttctgtgcaactgggactgctttggacacctgtgaccatcacaagtcctcctgtccatccctccacaccgggtggccggatgacagaagaaaggtgtctgctggccctccctctgggccctgtgggagctggatccttctagcagcagctgggccaccaggggagcatgagcctggctgctgtcctccccctgctctggggccggtggaaggtggagggcaggtcaggtggcgcggccgatggagtatggctggccatcgagaacctgtccccacgctctaggacactggccgttccagctcccccagggctctgtgcacacggaccaggagccacccaagggggcagaacaaagtcaggccccagggccccctccggcctgctcccctgccgagctgggtactgccatggggtcaggcccttccctccacaacgcccccacctcctgctgagagctggagtggctgccacacggagggcgctgccagaggagagggcagagcgtctgtccctgcggtgccctccaggtgtgcctagggtggccccagccccacaggccccgggcacttgcccttggttcccctgcccttgctgggacccctcargcccagcctgactctgggatccctgggctcctagcacgaccactctggggtcctgcctgtggggagggctcgaggcaccgactcacactcctgataaaataaaaatagttggggaggaggctcccagacgtgcggggggacaagtggcttctctcagacgtttaaataatctccgccatatgtgtgtgggcccggccctccctcccgtgcggcgccagtccaggggcccggctgatctccagtgagcactgtggctggggcaaggtggccacttcctcctccctcccgtccacccaagcacagcctcagcccctcctgcatgctgggccggcccttgggggcagcacgggagggggatgctggggctgcgaggggcaggggggcgcggaagagccagggccaggaagggctgcaggagcatctggccctcatgcctcactgctgctgaggtcctttgctctcctagccctgggatgcggctgcctcagggactcttggtggccctggagggtgggtaggctggcctgggggccattgggacagcaggtgacggtcaggccaatgccagccgggcccaggcacagccctgtgggggcttcagagggagacacgggtgggcccagggaggtcctttgaaatgtcctgctgaaaggcagcaagcgtcgggagaggagggggcttagaggcagccagggccacctctggacaggcctggaagaggtggggcccctgcccgtcccgtacacgctygtgaagggaagaggttggtggaggggcatgtgcagtccccatgcccctgtcgtgggaggggctgmggtacccaaagctgccccgggtgtgtgtgtacatgccgggaggcctgtgggtgtgatttgtgggttttgttggaagattcaattattttccagccttccccaggggagaggcggagatgctgagccaccgctggccccttgttgatgacagccgcgaggcccatgctgcctgctgtgttaggacaagatcgatctccgccataaaaacaaaattaagccaacaccgccctggcttctgacagcgcgcgctcttcctctaatcagctgccacccgcccggttccagccttgggaagaaaggaaggggctgcaggagcaaacctctcacagtggggaaactgaggcactgagacagggaggacaacccaaggtcggggggcaggcccaggacccctgcttcccagcagccaccagggccaggcagtcagggtgggccggtgcagcccaggtgcgggggctgagcccaggggatcacgggcgcattcctctgcgtgtcaccgtggggcccgcagagccctcccatgcactctccccaactggggtgcagccccgtctgcccgtctgtccacccatccgcccatctgggtgcatctgtgtgggaggcttctccaggcccagggctgaagccggccagacmcttgagagctggaccctggacaccagtgtggacactggctcccgtcacctcctcagagcaggcctggtggccttagctgcctctgtccygcccgtccctccctgtccacctgtgtccagccagcgcctgctacgtgttggatcatggcctcacagggacagagcagggaggaggacttcgaggtccctgccccagggatgtcccggggtcaggcagtgctctgaggactggggagccccactgtgctgtgcagggacctgggggagcagcaggtgagccagggccctcctctccccgacggagcctatatctgcccgaccaggactgccggcccttcccagtctggcctctggtgtgggcccacagccaggtgcattgctacaatcccacctgagctcccacatcaggtgtcctggctcaggctcacgggaggggccgaggcggcctgggggtgggtgtggaccatggctgagggctgggcccctgtgtggaaccacagagcagagcgtggcttcttcggcctccctgtgggctttcaggatggccgggccctggctcagggcaggcagggtgagcatgagggcccgtcagtgcaggctgtggggctgggctcgcctgccggcatgggggtggggcagccccctccgtgaccttgtgtgggggctgggctgggccctgggccggctcacaggcagcacgtggggaggggttcttaagtctctgggcctgggcccctgccacgtctcttggcccggggcacccccggcttcacgctgcagctgcggttctgtgtctgcctgagttttggaggggagtgggcggtccctttggacctcagggcaggcagggcagcccccggcagaggcctgtgtcaggaaggattagccaggcctccacccgcctggacagttgaggattccagctctgctgctgaggaggtcagggggcctggggtgcaggagcctgggacccacgttgtggggctggggccaggcactctatgtgtggctcctctcagaacccctgcccaggcagatggcggcctccaagccctaaccccagctgatgggggatcagctagtggctgagagctcaagggagggagggagggagcagaggcccagccttggggagcttcaaggagggatgggtgagagacgggagcacccccagctggggccaggcccagggtgagggaacagcaggtgtgtcccaggccaggaggcctctgaggtgcaggaaggagaactggaccccctgggtcagagtggaagcccgcagcagcccagtatgaggtgggcaggggccctgggccagggctatggccgtctggtctgtctccaggccctcaggccacctcctggcccctgcgctgccccttacacggtggccttccccgaggccctgtcttcctgaggacgcccgggactccagcccctctcctctccctgcagctcatggctccctaatctaattccacggcagagcccagaaacgcctgctgacctgcttccgccgagagcagcagagcctgtgacggggcccctggtgggggcctgggttggctctgtgctgactgcatctgatctggctgggtgtggccctggttgtcagtggtcagctggagacgcatggccatctcctcagggactgccacctcccacgcctgaccttggccccggggctctgccaggatgcccagccctggcacctccctgtcctgggctctgcaggccaaactcctcccctggtatggggggaggcgagcagctgcccggaaccttccagtccttgttgctggagccagtagagcctgggcagtgggtgggaagaagggcggggttctccccagtgtggtcacgaagcatgggcatggccaggacacaggtggctggtgttcagccggggtctgcccacctcccattcccacagctgcccctggtgtcccggcctggacttggggatgggagagcctgtgctgtcctgtagtgcggggccagtacacagggtgggctgtgtggtcctggtggcagtgggacctggagtcctttcctcagtgggagctgagacggtggggtgggtcctccttgggcgaggcccctgtccaggtcagatggctgtcatccctgcagggcagaatgtggggacaaacgtgccctgggcatggggccacctcctccgccacagctcggtgaccgtggagaaaggtcaggctggggctgcagctgcatgagggagacatggagagcccaacccaggctcagggacccacatcctgggcctgggctgggagttgtcgctgtaagggatccggctcggctcccctctccagccacaggggctgggcgctgcggggatgaggtgagcttctgcccctgctctgggccacctgcctctggactttggggatccactcagaggtcctcataagtagggatgcggggtgagggcagggaccactccaggcccagcctcggcatctgtggtgggcgcacagcggggaggcccaccccacacagggtcctcggaggacagtaccctgcaggccttccggttgcgttctctgggtcccaggagggccctcccgttggtcctgctcttgtcccgcagccctgacctgggtctggtggcctggggccttgggaaactctgttgcctccccagtgccctcccatccccagctgggagttccctcggcctaaatcctccaccagctgggctggagctgggattagcacagggattgggcctggggctgggcggggctgaggtcctttgctcccccagccttgggaggcggctgcgtcagggattccttggtggccctggagggtggataggctggcctgggggccatcaggacagcaggtgacggtcaggccaatgccagccgggcctgggcacagccctgtgggggcttcggagggccctgaggaggaggaggaagaggcagaggagagaaggccccacggaggtcctgtcgccagcgctgccactgcctgacctccgctgcccgaaggccggtgggcctctgtggcctccgtgaagcaggcccggctgtcgtcaggccatgtctggtccatggccctcccccgacagccggaccaagggaacggtggcctggctggcggaggtactcctctgggttggagggagtgtggtgctgtcttcagagtggcagctcggccccctgggtaagaaggggcaggcgagtggcctgggctgagtgctggccctggccaggtgactggtgggtgggggctgttcctggaggtgggggaagcctgggcctccatcccatcctgcactcgcctcccctgtcccccgggtgctctagggatcatgtgggtccagcagcgtcggctggccctgcccctcagccgctcagaggcgtgctcagcacacctcggtctcccaggcacctgcagggcctgggggctgaacccaagggggcgaggggggatctcaggtggctccaatgctctcattgaaggggtgccttgtgctctgggggtcagtggtgcttgcagcccaggcggctgggctggcatcctggtgccggacatgagggcctttgccgttaggagactctgcagaggagactggctgggtatggctgggagggtggagtgtgtgtcttgtggtggcctgtggagggccccggtccgggctggcctgccagctctctgttccagcggcagacrgggtcctgtccaggctgccctgttgcaggcctctgcccgccccctgcccctgtgtcctgcctcacccctctcctaaatccctgcagccatacctgcgtcttcacctcccatgtgccccggagagcccagccccccatgccatggcttccatcccttcaattcccctctgctcgtgatcacgtagtagcttccccaagaaggcccggccagtactgcccttggtcctctacaacgcccccgccagggtccctcagcgtgcagacctggggtggggattaacgtctctgtgctttagcagatggtacctctgggacccgggctttctgtgagcaggtgtgcaggaaccgagggggtgagaccagtctgttcctgggctgggacagctgactctggcctggactccctggaccctgcagccccctctcctgggacaagctacagcaggaggctgaatggagagaggaggggagagaaggagcgaggcaggcagcctgggggaggggaggggaggggttgtgaagctcggatccggcaccacagcctcccaagtccatactgcagtgcagggcgtgcgacgcagacattcatggcaccattcgtggcgcttgttgcacgtgaggggtgggggctttcctggagatgccccaggcaggggcacaggcactcaggaattcgaccgctcccaggagccacctgtggccaggggcgggggcaggggcatagggttgctgcctgctaggcccaccccgcccctgacaaggggcctccactgcactatggccccagacagccagcccagccacctcatctgtcttgcctcgtgcccggccttcccattgttgagttctgtgctggctccgtctgagtggtagctctcggggccccaggcccagcgccggttaccagggctgctaggactggtccaggaggtggtgggagtggcaggtggccgagcagggtggggagcagggccctcagttcccaggaccatctggggaggagtggcagggcccagctgagctgtgtgacccaggcaagccggcacctggggtggaggtggccctgggctctggcctttgccctgtcactggcagggcggtgtgggcggggccgggcgaggtgaggagtggccgtgcctccgctgacggccgtgtttctcccgtgaggagtggccgtgcctccgctgacggccgtgtctctcctgcgaggagtggctgtgcctccgctgacrgccgtgtctctcccgtgtccagtggagcggtgcatgggtgccatgcaagaggggatgcagatggtgaagctgcgtggcggctccaagggcctggtccgcttctactacctggacgagcaccgctcctgcatccgctggaggccctcacgcaagaacgagaaggccaagagtgagtgggagccctggggtggggacaaatcagagtccctggggggacacgacggtagggaccctcccagggcagccactgatggctgaggagcagcgagaccctaggcctggacacctctgggctcagtggccttggggatctgcagtgacctcgggctgtggggtaggagggatccaggccccctgcccgcctggcagagctccctgggactcagtgaggaccgagtagcactgtgcccagccctgtgctgagtgctgggctggaaggaggggcacagcatagtccatctagctggggaggtcacagctccccataaacagaaacgacccccacagaggtatgctgatggatgggtatgggtgcaaacagtggctcaggcagccactgggcatggctgctggagggagcaggggccacccgagatggaggctctgtgcagggggtgggtggggagagttgaggcacacagggaacgggtagggtcccacggtttggggagagacatggcagtcctcaagggctgggatcagggcgcagccagggtttctgatggctttgctgatggtcaggacccaggcatgccaggcaaggcctcagcccagcagttgccaagcgtgtagccactttgggcccgtggagagagtcgcgctgcggagcccccagggggacctgaggtcacaagagcctcgatgcacctgagcgcggagctgggggtccctggagcygctgtccccacctgcggcgctggagccctggaggtgtccaggggcttccttggaacgtggagacgtgctggttaaacgtggagccccgggccagccgggcactgggggctgcaggtggagggaggtggatgctctccctcgtgggggcgtgtcttttccacaggaaagggaaagggggagggacacgggtcagcagtggggggctgtgcagtctcgcagatcttcacccttggttcttgaactctggaccctgagccctgccgagggtcccgcaaaggtgggcaaggagctcccggctgcttggtctccgcagtgttggggctgccagcagggggacgctgggcccccggggacctgacccgtgctccctccccaccccgcagtctccatcgactccatccaggaggtgagtgaggggcggcagtcggaggtcttccagcgctaccctgacggcagcttcgaccccaactgctgcttcagcatctaccacggcagccaccgcgagtcgctggacctggtctccaccagcagcgaggtggcgcgcacctgggtcactggcctgcgctacctcatggccggcatcagcgacgaggacagcctggctcgccgccagcgcaccagggaccaatatccttgggcacctatcgggcaatgcagacccrgggaccggccccttggctgctcaccctgggggggcctgtcctttgccgggtcacacactggggaagtggccggtaggctggggtcccctattccttcctccctaggccagagggtggaggtgtcagggctgggcccatggatcgctgttggcccctaactcggcaccaaagtggctgaagcagacgtttgacgaggccgacaagaacggggatggcagcctgagcattggcgaggtcctgcagctgctgcacaagctcaacgtgaacctgccccggcagagggtgaagcagatgttcagggtgagctggggggagccctacctgggctccagagccagggctgcacgggggctgtgcttgtgtggctgggagcctgccagccctgactgagctggaggggaccctggcagtgccctcaagctgcacagagtagctggctgctgaggatggggctgtctgaccagccaccccacagcctatggcaggcaggcaggtgggtgcccaggtgctgcctctttgcagctgggccgggggctgctctgccagctctggggaaagtggtcggggcacctggcacaggccctgccaggtgagtggactgggcattcagggcaggtgcccaaatgaagctgcacccccttcccaggccccagccccgcagcctcgaggggggtacaccagccctggcagggcccagtctgatgcgcagcagctcgttactttccccatgccgccctcgcccaaccaccctgatgttaggagttatgaaaatgcagccttcagctgagctgcggcctttattgtctgtaattggtttctgtttccggwaagcctgctgggcygggggagagaaactctgcccgtcagcaggtcctggttccgggtggtgctggctgagccagcaaaccaggccctggggccttgctgctttgctgcagcttggaaagcgggttctgtgggtgcaagtgccaggccctggggtctctgacacgcacatacacgcacacacacgcacacgcatgcacgtgcataaatacacgcacacacgtgcacatacacatatgcacacaggcacacacatgcacacacacacgcatacacatgctcacagcctgacagctccgccgtgtccagcccctgccagctcctgccagctcctgccagctgctgcctgttctcactgtaggtggctggtcatgcctggctggagcaagggaagctggcctgctcacaggacagggtgtgtgcgtgagttaggggctgggtgcttgcagacactctggggactgcccggggcttgtgaaggccccagtggggacacagtctgcctgggctgtgggggctggcaggtggctgagtctgcatgtctgcgccccttctccctgcctgcctggggccatccccagccacattttgggctcaggggcagctctggggccagcaggtccctccacagagttgaggctgtgccagggcccgggcagcagggtggcttagggtgcaggctccagagtggcctctgagtgggaggagacagatgcccctcactgaatccagcacgagtgtgcgtggtttctggggcctgaaggtccaaccagacctccctaagggaaccccaggcaggcggaagcagggacagtctgcagggctggctctggagaggaatggcgaggtagctgttgctgtcaggttaccggcctggcactccagccctatgtagtggaggcccagtggccctggtctttggtggtcaagacagctggagacggccccagtttcagagcgctgggcctccccgcccatctgtactgcatcctctctgggccctgcagagccgagagaaggagcctgcagccaggctggaggggctctgagaagtggcatcagcttcgctgtagagaaatctggagatggctcccattgcctggcacggcctaatcagagagaactgcatggtggataaacacttggcttgaggctaatttcatcaaacctaagataaggctggaagtgggctggacccagtggggcctaattgccagagtgcgctgggcgggcaccgaggcaggctcagccaaagtgcacgttcaacagcagtggcttccctttgtggaaagaaaagatgccacgtgactgtgtcaggggtgttctagggtggggctcaggccccgagggcctcactstccgagcatttttgttcctgctcagtggtgagtggctcaccctggcacatagccactctgtggagggggccgcatctctgcccagctcagccacaggccctgggagggcctctggcctgggctttgtcccatggcccctgggagggccatcagcccaggctctgtcccatgggggccctttgagctgcagtgtgtcccctcatggctgtcctgggtgcagtgagtgggcacccccagacttggggctaccctcacacctcgcaccaggcaccccagggcttcatctggtgtgtgctgggcccagtgcatgtggctttagctgggcccttcatgccacgctggcctcatcccagccttggtgtgggcacacagcctgtccctggggtcctgacccaccttcatgccaagccgtgggtgtagggcgtgtggcagccagggctctgccctggggacagggacaaaggggctgatggggccacctgacyggtgactcccctggctcagaggggatcccaggggagctggcaccaccacccctggccaccccagatcgtggccacgggaggaggcaaggctggtccccagtggcaggctggtggctgctgctgtccatggtgccgagccggccctggttcctgctcagctgaggcacatctgcaggccgaggcggggccctgggtactctcctgtggaccaggacattaagctgtcctgagaggcatggccagcgtgcaggtggccctttgtagcctgcttcctcgaccccactctgggctcctcgcaggcccccttggagcccctgggtgggctgctgagagcacgccgtcctcagcctgtgtgggctctgggaagaggacccagcggggcttgtctggaagcccaaatcacgaagcctctagactactgctgtggtggatgcagcacctcctcgacttttggaggtatttcctgcttctcagggcacccagtctggggcttccgtggaggcctgaggactcagccagtgtaggcggacacctgctggctgggtgtcggtgtggccaggcctggggtgagcaggcgcagggcggaaccctgccttcaaggcatatctgatcagcccgtcccatctctggccacatcctcagtggggggccagggccgaagtgacagcaggcggctcactgggagcgtaggacccctcaagatgctgagcagctgggcaggtgtgaaacgagctgtcagggctgcccctgcctgaaatgttgaactctggaactctttgaagagcagggctaggcactgcgtccctttrggcctggtgttcctcgtgagtaggggctgagctggggtgtcacactggggccatgtcacctccaagcaggtcatgctctcaccctgccctgcccagccctgggctcccatacccttgtgaggcaaagtcctcaatccttagggctcaaggatttcaagcatccccttccatggggactttattgctgccatgggattcccatggcccctgtagcaccttgggtttctgctgggatgcccagcctccagcccagagtgtgttgttgacccccgtktgggggggcgctgacccccgtgtgggggtggcgctgacccccgtgtgggggtggcgctgacccccgtgtggggtggcgctgacccccgtgtggggtggcgctgactcccgtgtgggggggcgctgactcccgtgtgggggggcgctgactcccgtgtgggtggcgctgactcccgtgtgggggggcgctgactcccgtgtgggggggcgctgactcccgtgtgggggggcgctgactcccgtgtgggtggcgctgactcccgtgtgggtggcgttggctcccgtgtggggggtgttgactgctgtgtgggggaggtgttgactcctgcgtgggtgttgttgactcccgtatgggtgatgttggcttccgtgtgggtagtgttaactgctgtgtggggtgagtatatggaggtggctgtgggttgaaggtgaaaagcatatggcttcaggcaggtgcgtcagttctgcattttcatggggctgtcctcctggtgggtgggcccgtgccctggggagtgattggaggccgtgacaagggcagtggagtagaggagggtgggcttgcatgttggtcttgactggggagtggggtggtcctgaaggacccctgtgcatgcaggccctggtcgaggtgccaatggggacccaaggccttgcattgcaggaagcggacacggatgaccaccaagggacgctgggttttgaagagttctgtgccttctacaagatgatgtccacccgccgggacctctacctgctcatgctgacctacagcaaccacaaggaccacctggatgccgccagcctgcagcgcttcctgcaggtggagcagaaggtgtgctgcccggggcaggtgttggggggccagccatcaggcctcgccttctgttctgagctttgagcttcagtcaggggacagtggtgatgggggagctgtctgaagctatcccaggccagggatgggctacctgggctcatgcccctgctctgagatggagagattagggtggggcaggtcacagcctggcatttgagagccccccaagttggctttagttttgatattacagggtgcgctctatggggcagccaagcaggtagggaaagtttgtggtttctcctccaggggccyctraatggcttggtcctgactgtgaacaccctgcgcctcccacagcttgaccatgcctcctgccttggtgttgagcatcttgtggactagggttctgtggcccagcctttgagacctgcccctgtgttccagccacatgggtctggctgactcgctcccctagggtgccaggcccgccacaatatccactcacctgtttgtccagcagacactcagatgcctcctggaatccagaggggcatgctcagccctttatctagaccccaagaaatcctggccatccttagagaccaatgccaaggccaagtgctctctggacgctgccccactgaccaaggacctcatttccagaggttcagggctctggccatcttgtatcaggcctgggcagggactgggtaccgcatgccctggtggcaggagttgcaggtccagccaggcagcggaggggaaggccggagccccagtggggacagggatccatgggaggggctcagactgtgtgtggccaccctccagcctcgtaggagtgcaggtgaggaccctggaccctcctcagggaggagagcagggacagggcaagccttaggggaccaagatgcctcggcctgggggtgctgcttagggacctccactctacttgcctcagcctgggggtgctgcttagggacctccactctactggcctcagcctgggggtgctgcttagggacctccactctactggcctcagcctgggggtgctgcttagggacctccactctactggcctcggcctgggggtgctgcttagggacctccactctactggccacctgcgctgcgtcagcctctcggtgatggtctgagggcgaggatgggagtggcaggaggagccttgggaatcccaggtagggtctgggtgggttttacccaggatctcccagcagtaccccacccccaagcttaccacaaacccagagctggcctttggggctgtccctgggcctgagctcccgggatgcccccacctggccggggcagcttgccaggctccatcccgtggcagccgcttctccagtcctgcaggcatgacacccgggacgcatggcccaggcaggggaagctagcaccagttggctagaccccactgtctcggatgccctgtgccctggccaccaggggcggcaccagcatgtgtctgtgggtgacctggctgcagatagtaggtcctctgtcccagtaaaggcagaggtgggaatggggcctggataggggattggcaggcagaagtgacccttccctccctgacctttgccccaagccttgtggaaccctctgtgcactcaggagccagagtcctccagccggcaactggtgccctttgcctggcctcctggttgctgggcctccccaggggcccacaactggctctgggctcccccacctgttacctcaccatgttcccagggacctccaagaagccgtgtcagtgggctgggcagctcctggcccagctgcaccatagcgccctggaggtcccttggcctgtgatgcctggggtggcctgggctgggccggactgtggtgctcagatctcttgggagggttagtgtgtgacggcttgggcagacartgggaggggctggatgagggggctgcctgtgcctgcctggctctgccaagggggcatgaagattcttgctctcctgtacccacccacacatggcctctgctccgtgccaggcccactctgggccacaggtctcgcactggtgtggggtggtccagctgatgaggtcagaggcccctcccgtgccgtcagagttcatagtcagagcaagccatccaaaagccacgtgatccacggtagtcccaagtcatgtgacactggagctggctggccatggtcatccctggtgtaatcagagacaggcaggggacagtggtgatgggggagctgcctgaggctatcccaggccagggatgggctgcctggactcatgcccctgctctggcctagatggcgggtgtgaccctcgagagctgccaggacatcatcgagcagtttgagccatgcccagaaaacaagagtaaggggctgctgggcattgatggtgagtggggcgctgccctcagcccagctgtcctgggatgctggaggggcaacgagggcccaacctgtgggccgggacaggtgttctgtgttctgtgtggcatgggggcaggtggtcatragacgaggctggtggtgggctgacatggcccctatgccacgcygtcctgcaggcttcaccaactayaccaggagccctgctggtgacatcttcaaccctgagcaccaccatgtgcaccaggacatgacgcagccgctgagccactacttcatcacctcgtcccacaacacctacctcgtgggtgaccagctcatgtcccagtcacgggtggacatgtatgcttgggtcctgcaggctggctgccgctgcgtggagggtaagccctggaccttgggtgacggccgtgggctggcatctgctgtgggagatgggctgcacctgaggagccccyggggkgatctctgggcaggggctgggaaggcctcttctgtgtccytcactgagcaatgggacaggccctcttttggtcgaagctcagcctgcctgggctcactgtggctaggcccctggggctgaccaaggcctgcccgcctgcagtggactgctgggatgggcccgacggggagcccattgtgcaccatggctacactctgacttccaagatcctcttcaaagacgtcattgaaaccatcaacaaatatgccttcatcaagaatgagtgagtggctgggcctagcggggctggccccagaggtgggcagggtagggtctccaggctctagctcttcctgccacacccacatgtcctttctttgggagcagtgactgtggtgaccagggggctggtttcattctggcatctctggttgaggagagaggggcagggagagagtatggccgcaggtctaggcaggggcttcacaggagcagctcgtccacacgcctggtggcacctcccggtgtcagtgcccacagcagctgtggctcccacactcatcacccctgagaagccactctgtgtccagactcaattggctgtcactcagctgtggctgtagacactattgaagaaaatacagaaattagtttctggaattagaagaccgcctccccgtgtggtttgaattaccttcaagtcttggctacatgaggctcgcaggtgggcaaggagctaattgcatgaaggaagagagaagaagcaagattgatttaggaaacagaagtagatgggcctctcctggaagagctggtccttgctgtcacagtctcgagctggccccatccctgggactgtaggtgggaagggcattgcaaggcacaggggcggggatggggggaggagagatgagctgggaggagccaggggcctgctgggatctcaggacagagttgcacctatgaccagtgtaatctgtgcaggcacaatgttctcctgcaggccctgggcttcaggcctcagtttcttgcctgagaagtgggggaatgagcccctgcgccctgcctgcccactccacatcacaggacttgctcatctcttgccctggttcatgccctcttgctctgggtcacttacattttctgaaagaatcatggctgccttttggtaaaaatccaagtaaaacatacacatggttaaaaatgaagctgaaaagcttatawttaaaagtccctgctatactccccattctgcactgtgcaggtaataaccatgttccaccagatggtgtgtgccaggcttatgtctccttctttatgggaccaatgtcaggaccccagggccattcagaggacagggtccccagtatctaggtcaaaaggattctatttcccagcctatctatagctccacactgtaccttggttttgtccacatcattttaaaaccatgactttttcaaacgttccttttgttttcctggagtttctcattgcctttgttttttttcttattggggaaagcagctcatgctctctttaccagtccctaagattctcccagctcctttcccatccactctgttgcttttcaaagccattgacgggtgggccacctcccagagctgctggtaatcccagctatcctgggttcctggtgaagacccctcctcattcaatggtttagatgacctgggatcttgcagaggtggggcytacccatcctctgaggccctggcctcatcctgctctttctgccttggggccacaggtacccagtgatcctgtccatcgaaaaccactgcagtgtcatccagcagaagaaaatggcccagtatctgactgacatccttggggacaagctggacctgtcatcagtgagcagtgaagatgccaccacactcccctctccacagatgctcaagggcaagatcctcgtgaaggtgagtgagcccctgccctcctgggaccagctcacacagagtctcrggcctgcagcagtgccctgctccagacaggcaggggcatcatgccatccrtgggcatatctagggggctgagggctggccacgctcctgacctggcctccatctccccatggtggtcactctggctcaggcccctcatgcacatccaggcctttcccttcacgctgctgcagccacagggagctggccagtctggcccctgccccatggctgagatgccaaaactgagcttgagaaaaggcccctctccttggycggcggctctttgtgggtgccaggtactggcttcccagcattttctccagggcccctcccatcatgcacctcctcccccaggggaagaagctcccagccaacatcagcgaggatgcggaggaaggcgaggtgtctgatgaggacagtgctgatgagattgacgatgactgcaagctcctcaatggggatgtgagtcgggctggaggtggaggggggcgcgtggagcctgcagttcccaagaacagctgtccgtccttgctgttggggcgagttagaaagggaggcatccgggagagagggacattggggcagattcgcacagcggcctggggcctggggggtcctccctgcccacccacccctctgcatgagagctgcaggcctgcctcttcccagtttcagctcccacatttgagctgactcttggggtaccatccactccccctgccctgtcctcttggcccctcagtaagtgggggcagcactgggggctgggtcccacgccagactccaccccattcccaccagcacctggcccacccaggccctggcacaggatttcccagcttcccgcccttttcctcaccaagtctggctggacgctgggtggctggtagtactgcccagccacccccgtggccagtgctggcctcatctccaagcagtgccatctctaaggtcaactctgatatgggggtcccaccagcagtcacctccacagagcgctgtcactgtgtccccgccagggccagggtggggggctgcagagatgggagggtcctgtgaggtgttgggctcgggggcgccgatctcctctcctctggacactgctctggggccgctgctgtgaggcagggaaggccgttgcttccagaggggccatgcatggggagataattgtgcagcgtgctcctggccacgcggccaaccattttagaaactcctgaggcagcagcactcttcctgcctgggatgtgcggcacacgcctctgtgtggcccacgtgatggcaaaggcagctccacggtgctcctggctttgtgcccactccaacctggcaccaggggcgtctgacacccaagtcccagaccctgtcctcaaggattccaagttcatcaggggcacccrgggggctgcactggcagggaagggcgtccaacccagctcagaggctgccctgaagtctgcccctggccctgccatctcctgaggcacatggtggccagtggtgggactccagaccctgtgccgcctgctggcgcactgacctcccaggccacagggccagaagccgcacaggctctgctgggggccgctgggcagactcgtgctgctggaggagtcgggtgggcctgggttcccgtcctgcctgtggctgcctgcaggccctgaggtgaatcacacgccttccctgagcctggggtgggcagagtgctgtgaccctgggggttgtcattgccactactcgcagggctcgggacagatgccaacaggccgncctctggctcctgcaggcatccaccaatcgaaagcgtgtagaaaacactgctaagaggaaactggattccctcatcaaagagtcgaagattcgggactgtgaggaccccaacaacttctccgtctccacactgtccccatctggaaagctcggacgcaaggkagaggccaaaaaggtgacacccctgatgccgacaggcccccccgacagccagcctgtgggccagccagggcccccgaacgtatgctctgtgcgcactcacacctgtgcacacacaaatctgcacacaagcatacctctgtacacacctccgcacacacctgcatgatccatacccacctaccagyggggtctcaaagcccagccagtcgttgagagctgcccagctggggggacatgattgccttccctgcccagcgcccctgcctagagctgcctgtggccacgtggggaagtttccacatggagcgaatggccctcaggggctgtcatggcagacacaatggagtgtgtgtggggtgagaggtgacaggcagggtgggccgggtcctgcggtcacagagcctccttgtagaccttgaaggaaccaggagctgtggccggtggatcccgcagtcctgctgtgggtgggacagagtggggagcgtgggtgggccctacagaccctccacagggtgacagtgctggtgggcgcctgtgctggggacacggtctcctggtgcacagagcctccttgcagacctcgaaggagccaggagctgtggccggcagatcccgcagtcctgctgcgggtggggcagagtrgggagcgtgggtgggccctacagaccctccacagggtgacagtgctggtgggcgcccatgctggggacacggtctcctggtgcctggagagccctaccgtgccctgtggcaccggctcgttctgcctgtccctgcagggaccttgctsttttcctaacccttggggagggtgggaaggtgacttctccctggccaagtgagggtgctgtgtccccttccaggaccagtatttttagactcaggtgtttgcgtttccgcccacgggcctcggagcactcggcacagctgacaccgcaggagagctcgaggaacatgccctgtgcaggtggctcttgcagggcccgagctgagaggcgttcctttatttttatcccaaggtgtctaggtgggggagagtggccatctgtggctctgctgggcagccagctgggcctgtgcaaaacctggagatgcatctgcgggtccaggagagtggtcccctgcagacctcaggtctgagcggctgctgggggttctgtgctcagggaaggcttcctgcaggaggaggaggggctcaggcacagccacgaaggttgggggaggagcgggaatcccccctgatgagatgcactccttgcctggtgtggacacacaccccagaagggtctcagagtctttggtacaggcgaggggcggagctgatcccaaggccaggccgggacgcgttcagccctggagctcacggagggcgtggcccaggtaaagggggtgtctgtgcactgggggtcgtggggatggcaaatcccactgagggacacttgtgcctctctgtccccctggggtagccggtgtcccctctgcccatgaaccttgaggacgtgagacctctactcacgagtccctgaggcccgggggcagcaggaatgggtatcttggggagagaagccggtgggtaaggaggggccccacccccagaaagctgagcacaacccggtgagtgcttgtgcagccaacagcctygccccgtgaggacccttccctgagcaccccctcggggcccagaacccagcctccctgacagaggcagggctggggggcctgctgctggctgagaccctccaccaccatccaggccccctcacctgggccttctgctgcctgcagccccttggagcatagttgggtcttgctgtctcctctgtttgggagtcccaggggtgacaacgggtctggccgtgcagtacgggctgtgtctggccgtccgtctcctgggtcagcgcgtgcctctcctcggtcatgcctggatttacagtcgctcgtggctctgggtcactgcagcattttggggatgtttaaggagctgtgaaatgtggtggccccgaccggctccaggcgcactgtcagtctggctcctagcgcctctcccggcagccgtggcaccaataaattcagaggaaaccggggctggcttttctggaggtggagagagacgagcaygtctgagagccatgtggacctggacaacctgggagcctcctgctgcagtgcacgtggggcctcgggctccagccagtgcagcctggtgacgggaaggccccttggccactctgggccgtggggagggccgtccaatcccatcctggctccctatgagggtgaaggaggggcagggcacacctctgggccgtggtacccagagcacagggaggctggcgggagctccccggccgcatcaacaggactgagaggcccgtctggcatggggcctgcggacgcgacgtgccctgatttccaacgcgtccagcgaggcagtgtccaggcaggcccaggtccaggctggggagagcgggcagcagtcggagctgtttgctgtggcgtggctgagcgccgagtgtctgtggtcatgagagctacagtggcctctttgcagcagtgtgggagcatccaggggtgtgggagggtgtgtgtgcaggggcgtgctgtgggtgttgcaggggtgtgtgcagaggggtgggcgtgtacaggggcatggccacgggtgggtgatgtgtccgcttctggcggaagccccctcctaacagggaccgctgctgcaggcccacggctttgctgtgtttcaaagaaagtagcccccacccttggtgggggacaggatgtggtatgggagcccctcctgagcacagctgggccatgttttggaggtgtctgtgggaggggctgcaggggtcaggtggtggcacaggctctgctggttccattgggaatgagctttggggtgaatgagcagctcgtgaggcagccctgggttcggcggggggcaggcagggtagccctggatgtgtctgctacttatacagcggtaggaaggctcacagtggtttcctggggttccccagctcagaacccgcctcagggagtgcccacctggagccgtgtgtctgattagggatacccgcgcactgcgggaacaggtcagggccgtggaatgctcgtaaaagggttgcgcaagcaggcctggccgagcagtattccaggcacacaaacgcagttattacgtagtcaccactggtgggaaaaaaggattcagaacttaaygagtttaaaacaacacatgagagacgctgaggcaggtgtgagcgaatgtttccaccggggcctgactttcaggccgcttctcctcggcagctgcctctgccccagggtggactgggaacggctgccacgggggctccccaacctgtccccgccctgmcctcccctcccgtctgccttactccagacctggctcaagcccacctcttccaggaaggccttctgggaccaccaggggctgtcccggcctccctgcctggttcaaggctagactcaccttgtccctgtctctcccctggactcagagcaaggctgaagaggacgtggagtctggggaggatgccggggccagcagacgcaatggccgcctcgtcgtgggaagcttctccaggcgcaaggtccggcgcagctcccaggccagggtcccggtctgggcccagtgtcctccctgctcccagtgccccgtgtcctccctgctcccagtgccccgtgtcctccctgctcccagtgccccagtgggccctgccccagccagagcagatgggggtctcctccagtccccagggttcccagcctggctcacaggatcccctctgagtcaggccgagctatcggttgcaggtgccagggactgggccagaagcctgggctcggagctggtgggaacaggtgcctggctggctcacatcccttctctggyccacgctggccctcgccccaagctcaggtgccttgtggctgccctgagagtctgccagagcccagatygagagggcrccgaggaggctttggcaggcccagccaggcgggatggacatgggaggctgcgtgggccgctggggaccccggaggataggccctccccaaccccccagccttcgccaaggcctggcmtgggccagaggccctacagctcacacctctgccccccgcacagaagaagggcagcaagctgaagaaggcggccagcgtggaggagggagatgagggtcaggactccccgggaggccagagccgagggtaggtgccctgccccacggggaggccccgcacactcctgggagcctggcccaaccgggcccttctctgcggtgaccccaccaggaccatccctgagcagggcaggacctacccccttcttggcccctggaagcagtgaagtggtagggagtgtggtgtgcagggcaggctggtggctgtgggcagtgggggcaggggcggctgagcaggtggctggagggcccaggtccccacagccctggatgctgccgggctgtcggctctcggtcctcaccgcctcctcttatgaggcccccagcctcatgccctccccagggggcaacaaatgccygccatgaagtggctccccctcttcccgyccagtcaggctgaattcaaggcccaggcccccgtgtcggaggccttcctcagcactgtctggggtctctttgaggtctcaaacctacaggcccagaaggaactcccacccctcccggaccctgggctccccccgtgccgcccactccctcctattgccgtctcccctcacttccatcccccaatggttcctccgtgcccctcgcctgggcacagccccctcctgtctcatcccgtcccacgtgccagccgggctctgcccttagcacacatctgatccacgtgtgccgctgccacccggccgacacggaggcccccttggaccctggcctcctctccacatagygattctaggccagacccaggccccgagcccagctctcccctgctcagaaccttccagaagcccccacacctgccacgcttrgcaggccacgtcatcctccactgcacacagtgcctagggactttgcacctgctggtagctcccagccagcccacatcctgcccagcactcaggtttccgcagcccgcggcccagtctggcgtccgtctctgatggttcggggcctgctgcgtgaattaatgaggctgcccgagccctggagcccgtctcacggagctgggtgccaggctggccctggacgggaggggttctgaccccctgcacctgccacagggcgacccggcagaagaagaccatgaagctgtcccgggccctctctgacctggtgaagtacaccaagtccgtggccacccacgacatakagatggagggtgagtggctcggggacctggggccacgggcggaggcctccctgtcccccatccctgctatgctgctgggcgccgggcgaggtcgaggactggcagtctgatgcccggtcaccggcgccacagcggcgtccagctggcaggtgtcgtccttcagygagaccaaggcccaccagattctgcagcagaagccggcgcagtacctacgcttcaaccagcagcagctctcccgcatctacccctcctcctaccgtgtggactccagcaactacaacccgcagcccttctggaacgccggctgccaaatgggtgggtgcgggcatggtgcgctgggtgtggtggggagggctcggctcagacggtccctgaagcccaaggggcgagcaggggacccgctggggcctcggttctgtcctgggctctattgcccttggagcctccacacctctgtggcatgctgccgacaccaggctgccactgacaccaggctagcactggggcagggtccttcaggccttgtgggggatgtgggagcgatggtgcaggcctgtccacctactcccagggatacctgcctgygaggctggctgcgccagctccggggatgtccctccaggatgtgctggcctcagtcctgcacaggtgtgaaccttggagtcccattcacattgggtgaacgaggggcagacggcagatacgcggcagctgtgcaggggaggctagcgtgtggtggygggtgggcggggcacacacctggaaggtcaggtgctgaccagggcagccttgtgtcaccctcgcagttgccctgaactaccagtcagaggggcggatgctgcagctgaaccgagccaagttcagcgccaacggtggctgcggctacgtactcaagcctgggtgcatgtgccagggtgaggcactcggacactcagggctcggacgctcagggctcggatgggcctcctgggtgtccccagaacagagatcggagccccacaggctagcaagggggtgggggcggctttggcagagtcccctggagggtcaggttgggacgaagctcccaggatgctggggaggtgggtgggggaaccctccttgctagcgttgcaaagaagggcccagctccgtcaggaatccagggatggagaactggggagcctgggccccacatgagattcatggcaggacttgtctgaggggccccagtgccagcgacccagccccctgtgcctggcccctctgtgggtctcaggacctgggtctgggctgggtgtttggaggaacctcctcccggctctcagacacctctgttttgtctgctgtggatgacttccagcttggtccccctgtggccctggcaggagtatcaccatgggagagggcaggacaggggctgggcgagcaggcctcccactagaccaggctactcctgctgtggaccagctacttccacctctgcccttggcttgccctcctcagagttctcagcctgagtgggccctggggacactgtcaccagagaccccacccctcatacccccagggacccagacccacccccagaagccatgtgacctcctcggctcagctgtgggaggcatgggctctgtcccacatgctgcggtagccacaaaggtgatccatactgggccaggtgcaccccgaggtgcccccctggaccactgcctccctccctccccctggcaccggctccagtctcctatgtgggggctggggagggggctgttggcagccatgccccagcaagcagggggcttgctgagggctgggccactgaccacctccccggcatcccctcaggcgtgttcaaccccaactcggaggaccccctgcccgggcagctcaagaagcagctggtgctccggatcatcagtggccagcagcttcccaagccgcgcgactccatgctgggggaccgtggggaggtgggggccagccccacacaggcgggaggggtgggagttgggggcgggccgggcatcgcgatgggccctgatgccacccccactcctgtgtcccagatcatcgacccctttgtggaggtggagatcattgggctccctgtggactgcagcagggagcagacccgcgtggtggacgacaacggtgaggctgggccgtggctccgtcacacctgtgatggaagtctgaggggggagggttggggctacctggtgtgcccgggtgccctgcccaggcctccctcagtgacagtcctgggcgccctcccctctaggtgggcagtcccggaagcagcaccgggagtggcactgggagtggtgtgggccgggggctccaggctggagcggtgctgggccgggccctccccatgggacactcctcctggcgctgcttccccagggttcaaccccacctgggaggagaccctggttttcatggtgcacatgccggagatcgcgctggtccgcttcctcgtctgggaccacgatcccatygggcgtgacttcattggccagaggacgctggccttcagcagcatgatgccaggtgggcaggagtggacacggtgccccccacactggccgagggccccagggcagggcaggtactctttcccctgtgagtcagtgcctgtgtaggtgggcctgcacctggcaccaaagagacaggagctgaggacgggaggagagccagcctggggatctgcgggtcaggcaggggcatggcctgtgggggaggggccacccccaggaagaggtccctgcargctggtgcaatgccaatgggcttcctggaggaggtggggtagtgctgggcccacaggaggcagaggccccaggcctgggcttgttgggtgtatctggggtcttgggacctttaagtagaatggggggcagagcaggtgggggccctgggaggctgtgacctcatgacyctgctgacccacactgctccaggctacagacacgtgtacctagaagggatggaagaggcctccatcttcgtgcatgtggctgtcagtgacatcagcggtaaggtgagtgtcaccccctgccaccagccatcatggggaggggccacaccagccccttgtcccatgcccccccatgtgtccccagtgctgggtcctgaactcaggcagtgaggcctagggtcccctccccgggcctctgctcctctatctcaagaggggctgctgtgggggcctggctcctgagccaccagtgcccacctctgatctcagggctggctttgggcatctcgggcaggacaggtcctgagtgctccgggccttgccccgccctgtgtcacccatgcctgtctcagactcttgggggccttgcagcctccacccctacagtgctgccatctggcttctcagcagggaccgagtgatgcccctctcccctctactaccccccacccctctacttcctggtgtcacgtggaaggcagctgcccgggtttgcctgtgactccacacccagcatgtctgtcccctgccccaggtcagggtggggcctcggcttccgcaggaagtggtcttggtgccagccctgctgccctggctttgagctggggcccagtgccctctgggtcctgctggctgcagctggccctcggggaacccgcacacacagcaggaggggcctgcccaggcccagtgctgactctctcctgccatgctctcgggcccagaggtgccatccagcccctgccgtctatccacccatctgttcctcgtcccccaggctgcagggctccccacgccactgctgtggccgcctcacctgctccccctgtctctttggtcttgcagtcggcttctctatggccacagcctacttttagaagtgcagctctgttaggagccttgaaggtacccggtgcgcgggacagtgcggcccgccgcccctgcatgcccaggccgcaccccattagcatccatgattcctggtagcatttggagactgtcgctcatgtgacgtggatcatgacatggctccgggggccctggccatccccagccatagtggcatttacgaggcagatccagggttcagctgggtggccgccttctcactggcctctcctcccctcccctccctcagtcctccctcccctccctcagtcctccctcccctccctcagtcctccctcccctccctcagtcctccctcccctccctcagccccttccctggcgggcagcccgctggagcccccactgtgcccctcctatccccctccttctctctcctgcccccatctcggaccctcaggctgttggttctgagttcgcctcccactccctccctgtccttgccaaccatgccagtgcmtgggatgagggcacccctgaggccggcgctccgagccagaatcccggatctgcttctaaatggcttcccagccactgtgaccaaatgcgtagatttgggatcttgaatcaggaagctgattcaagtgctggccatctgaacgcatctgcccagaggcgcccctgcaggggggtgacccacctgccgggcctgggccgctctgtgcacgagcacggctcgtcatgggggcgcggtgggtgctgtctcgggggcatctggcatgtgagggcccctctggcctctgcgccctggagatgcrgctgcctccctctcagcagctgttctgcccaggcagggacctcctgggcccagctgtccaggaagattggctgtggccaggtgctggtgggctgggagtctgagcccatcttggcagggctcagggggcagcaagccagctgcgggccttgggggctcacatgagtggagggcagggcaagaccagaaaaggctgcctgggggaattcaggaaggcttcctggaagaggtggtacttcctagggcacgagtatcaccatgggagtgggcaggacacgggccgggcaagtgggcctcccgctgcacctggctactcctgctgtggaccagctactcctgcctgagggtggggcacacacaaccagggagtgccacgccagtgtcccctgctagcgccgggggctgcgggcctctgagcaggtgcaggctgtggtgggccaggctggggctcgaggtctctcctccggagggaaagaccttctctccatgcccctcaagggccccacatgccctggacaggtcaggcgagggcagtttctgccggaagggtggggtgggccatgtgtacttagatctgtagcagctactgtcccaggcagagctgccctagggaccctgctcctgaaggccctggtgtgtccacacacccccagcctgaggtggcccagcccctcggaccgagacacgcatggcacgtctgtggcacggtctggagagctggccctgggggagcagctgcagctgggctgggacccctggcaacagctacatgggctccttctcttgcaggtcaagcaggctctgggcctaaaaggcctcttcctccgaggcccaaagcccggctcgctggacagtcatgctgctgggcggcccccggcccggccctccgttagccagcggatcctgcggcgcacggccagcgccccgaccaagagccagaagccgggccgcaggggcttcccggagctggtcctgggtacacgggacacaggctccaagggggtggcagacgatgtggtgccccccgggcccggacctgctccggaagccccagcccaggaggggcccggcagcggcagcccccgaggtaaggcgccagctgcggtggcagagaagagccctgtgcgagtgcggccccygcgtgtcctggacggccccgggcctgctgggatggccgccacatgcatgaagtgtgtggtgggatcctgcgccggcgtgaacaccgggggcctgcagagggagcggccacccagcccggggcctgcaagcaggcaggcagccattcgccagcagccccgggcccgggctgactcactgggggccccctgctgtggcctggaccctcacgctatcccggggagaagcagagaggcccccaagggtcctggggcctggaggcagggtccaggcggtagcggctccatgtcctcggactccagcagcccagacagcccgggcatccccgaaaggtccccccgctggcctgagggtgcctgcaggcaaccgggggccctgcagggagagatgagtgccttgtttgctcaaaagctggaggagatcaggagtaaatcccccatgttctccgccggtaagcccctcttgccctgcgtggtcctcccgcacgcccctggcatggctgggcctgggtcacctgctgctgcttctgcgtggacggtgtcgcctcgtgtgctcgtgctcgtggctctgtatccgtggcactgtctccgtggcactctgctcccttggcttgcctgtggcccayagccccagccctcctgtctgagcttgaggccctgggacttgggtggagctggtttgaggcccgacaggctgggaagaaccagctgctcttgctgagggtctggggccgggactgtggcctgacatgctgggcccctcyggctgggcgcttccccaaactcacctcctgggcggctggcgacctgcatggcccctgatgcctttcctgggactgggggccaygtaccatcccattcccacctccctctagggcaggctccaggggtccctactgggaagtctgatgtgggcaggtagtgcagctgctgggcgtctcctgcgcccctgggacgcctggagcctgctgagtgctgcgtggagtagattccctgggccccagggcttcgctgctttgggctgaagcaccccactagaagggtgtctccttagcctggagggagggacatacacggagcccgccccacaccaccctgcccctccagacccccctgaccaagctttcctttctgcccccacccacgctgcctccgtagttaggaactgagagcggcgagtgacaggtaacggggcccagccccggtgtcccgtgctgtcccagcccaaggagggccccgtgtgcggcacagggcgtggactgggccccagcagcagcagggtggggacaccgagtgtgccgcgcccgggggatgcctcggggtgggagctgggcctggcgaccctcggcacagggcaccggggacaccaccctgatccgactcctctccgcctctctccctgcctccctctctctcttctgcttctccctctggctctctctcactcccccacctccccacagacacccgccccctctccacgcagcggccactccccccactgtgcagcctggaaaccatcgctgaggagcccgccccaggccctggtcccccgccaccagcggctgtccccaccagctcttctcagggacggcccccataccccacaggacccggagccaatgtggcaagccccctagaggacactgaggagccccgagacagcaggcctcggccgtgcaacggcgagggcgccggcggggcatacgagagggcccccggcagccagacggacggcaggagccagccccggaccctgggccacctgcccgtgattagaagggtgaagagtgaggggcaggtgcccacggagcccctgggagggtggcggcccctggccgctccctttccagctcctgccgtgtactccgatgccacgggcagtgacccgctgtggcagcggctggagccatgtggccaccgagacagcgtttcctcctcctccagcatgtcatccagcgacactgtcattgacctctccctgcccagcctgggcctgggccgcagccgtgagaacctcgctggagcccacatgggacgcctgccccccaggccccactcggcttcggctgcccgcccagacctgccacctgtgaccaagagcaaatccaaccccaaccttcgggctacaggccagcggcctcccatacctgacgaactgcagcccaggtccctggccccaaggatggctggcctccccttccggcctccctggggctgcctttccctggtgggcgtgcaggactgccccgtggctgccaagtccaagagcctgggcgacctcactgctgatgactttgcccctagctttgagggcggctcccgcagactgagccacagcctgggcctcccgggagggacacggcgggtgtcggggccaggggtgagacgggacaccctgacagagcagctgcgctggctcactgtcttccagcaggcaggagacatcacgtcacccaccagcctgggcccggctggggagggggtggcagggggccctggttttgtgcggcgctcctcctcccgcagccacagccgcgtgcgtgccattgccagccgggcccgccaggcccaggagcggcagcagagactgcagggcctgggccggcagggacccccagaagaggagcggggcacccccgagggcgcctgctccgtgggccacgagggcagtgtggatgcaccagcaccctccaagggagccctcgggccagcatccgcggctgctgaaaacctggtcctgctccgcctctgaccgtcagtggtgsgaacctgggcggctctggaggcccagggcaggggtgggcgtgttgtttgctcaggaaacagggcagccaggcccccaaaactgtgtccccctggctgccctgtgtcccctccrcccctgcctccctcctgcccctgctcccggggaggaaaggctaaagctgctggcccggggcccacaggaggggcttcgaggctggccctgccaggcagttttcccggcgttttaggatctgtacatagagaaatatttaaatttttagaagcaaaacttatacaacattaaaatgataccaagtccctttccatttttacctggtttttcaccccaggtgtgtgtggtgtgcatctgtgcgcacctgtcctgagcctgccccgggaggcgcggctgacctggccacggcacaggcgggggtgcttgtgaggcaccagggctgctcaggacggccgtctgggccttgccctgaagcctgtatctgccttgcaccgaccacgccaccctctgcaccatgcctaagcctctgtcaactcccaaacgtggttctgataaacgtgctcaccagcacgcatgggcttcccgttcgctcagcctcctgtgccacttacttaccaggtgcccgtcggagcctgcgccaggcccagaagacaccccaagaaaagacctggcctgtcctcagagggctgagctggacaggctcccagggtaggctgcaaagcctgctcctcaggacgcaggccctaaccccgggccacaggccccccaacccgggggactgctctgcctgcagagcatggtggttccagaaaggcccctaccctagagaagctggggtgctggtcgggcctctggaagcctgtgctgcagcccgtcctctgctgccccaacagtgggagtgggtgtggcccaccctgtggccaggggagtcaggggatgtcctgccccatgaggctctgtcacctgcggctgcccaaggggcctgcccggcgcaccacccggatgagcactgctctgtcggggtatcccgtctcacccctggctgcgttgtgcccaggcagggcccttgggaaggcgggcctgaggcccggaggccgggatcctggggtgctgggggagctctaagggggctgttctgccctcaccatgttcctgcactgacagggattgtgggcggccacaggaatcgctgtcaccacttccccagctcagccaggcagaggggccactggtgccgcccttcccccagccccaccacgcccctcagagagagcctggcaggacttcgtcatcctcgagccccagaacacttgcgtgtgggcagctgcagccccaccgagagcaggggtgtggtgagctggttgcctggggcccggggcggcacctgaacctgaggagtctcagctctgggacaggggactcacagagcccccggcagtgacactgacagcagcctggtgaccgaggcctcctggcgagcccccaagtggtgccgtgggcagggcagaagttggggagccagctgggggtctgcgggagtcaaggaggggctgagggcctggggccagctcgtgttttgaggaaagcgccgttgaaatggccacatcaagggaacaaggcagaggccagagccctcctgctccagctccggcttcggcgggaaagggctggggaagggctgggaaagggctggggaagggctggggtcacagaggctggggttgcccggaggcacaggggtgcctggctcataggctgggtggccccttgtgcaagaggggagctgaggccgtggccaccggcaggccctgcatgggggtgtgcaggggctgagcctgggctaggccctggtgtctttgtcctggctctgtccttccaggcctctgtgcatcccccacctcctcctcggcatcctgtctgggccaggctcaggccaaacctctgtagtgggtgcgtccccagcacagatggactctccaaccccggggtcaagccctgtgggtgtcaggccaggcagtcacacatccgggtgcccagagcggccaggccactgctgccacccaccaccagtgagggtggggccaggatgggagcaagagctggaggggctgagtggggtcagggaaggctacagagatgcaggctgggagggcttccccatcagagagccgggcctgaggagagggccggaaagtggtgagggcccatggggttccgggggctgggcctctgccctggggacccacaggagggagaagctggagccagggggacagtccacctcaggatagcccagctgcccccgggctcctctgccaggacacgagaccctttggtggccgctgcacgagggctgggactcaggttccacgcagactccaagggcaggtcacgaagagacaccacagtgggggccagaaatggccactgggcacctctgggcaggccaggtctccatgagggaggggtcttagcctctgcaggttccagaccaccaagcaaagctgtctggaaggtgatccatgccaccccrcctccttggcctaggacagcctgtgcttgggggtctcagtgamgcctctggatgtgggggaccccagcgggggtgggggtggtggggcaaggtagcagctcagcctcctcagggcctgcccagcagctcagcaccaggaacagctcccaccacatgaagtcaaagctgggggcctgcagccagcccaccccarcagggcctccgcaagccctgtgccctcctgccctctctacgatgctatgtgtggtctcaatcccacacctgggctgagggggaggacccccaggcgcctcagagctcccaggggccaggcccagcgggcctccctgctgccagctccccccagccatgcccaccctagccacagaacacggccccagggagcctggtcccaaggccatagcaacaaaacccacgcggtccacacagttcctagcagggtccacgtcggcccctggctgcctgagagcccttgagggtgatcgatgttgagcgctcctttcccaggctctcgagtcaggaattgctgctcagcacccacacatcccgcaggtgcagggggagggcgctggagggacgagggtggctgagttggttcttctggcccggagggagcggtgagagacgcaggggcccggggccatggggtctgcggggcggctggcactcgttgcctacaaggtctagaagcagcgcagggaagggctcccgctctgggctccccccatgggaggagtcgggaggggcccctgctccgaaataaaacatcgcagatggctccggcctcttttaaaaactctatttggtgcgtgcccacggtgctgcgtcccgtcagacatacctgtatagatctctctatttatatatatatatatataaaaggttctttagcagttaaatagattccaatatgaacgtctcccaggacaaagctgcgtctcgcctctgggtcacacgcatctgtgcggctggggtgtatgtgccgcgtcacagcagtaccatataaatacgttgatttgaacgcagtttccctgtggtggtaaaaacacattcctgacaagtgacaagcagaagagtccggcagctgcagcgcctcactcggctgggacctcgtacttgaagatgacgctgaagagccggccgcccagccgctcggccagccacgcgttcttgatgacggccagcttgaggctctcgcagcgcagggctgcgtggtagtttgtgtggacagcacggcccatgccctcgatgaccaccagatccgcgccacgctcccgcaccagtgcggccagccccttatccaggcggctttggggaggaagaggacggtgagactgggcaagcagaccccagaccccacttcccatacagtgcggcgaccaacgtgaaggctgaaacccctaccgctcaattccctgatgtggaggcctccaaacccagcctccgcctggtagctgcctcagcctggggcttcctcagagcagcagctcacacagggccagagcagctgcagcttggaaactctgccctagatctcctgtgaactctagggatggattccttgtcattttcacgccctccttgttggtgagagtggggctggggcacagatgaagccagcactggagaatcccaccaggcagagcagaccagcggccccagcactcagaacccgctcatttaaggggttccttcctcctctgcaatcaggaggacagacagcaccacatacaattgactaatgacctccagaaccacagaagcagagcctggcatctatgtgggacacggaggtgacagacaccgggcagctgcccaggtcgccctcggtctcagctgagtggccacagggacattggcccctcttgccccaagtccccaaacccagcccatgtgtaaccacctcagaccctgaatccattcaccctccccaggccaccttcggggatggcatatctgtcccctcctgagatcaatccgggcctggggtcaggagaggccgcaggggcagtcctgaggtcggtgtcccgcatgcacctgggtgcaggtgcacggcacagagggcacagagcccaggagggagagaacaggtgcagggtgcggggttacctgaggtcgaggcacggggagctggagcccgtctgcaccagcagcagcctctcttcctggagcgcagagctgccagatacaaggtggtcagtgcccccaggagctcccagttcagtgacaatccccatggcccactctgcccagctggtgcccctccccatcaaggcccccccagcactgcccgccaacactcactgcacgacagggtccatgcccgcaatacgctctgccacgatgagggactcgctgtgggtcacgtcgttcagggcggggcctgagttgcacgccaggatgacctgcaggaggagggcccaggctctttaggaacctgtgctggcccagcatggagcctgcgtgcaccccggccttcgagtggctgggctgggtgagggtgctgtgcccagcgggcctggccagccacctgctgctgaggagcagggacctcgcctgaccttgccactctgtggcccctgggagggagctgagccgaggggcagagctgagtttagagcctgcccctgggacctgcctgtctgtgaagtcacagccccaaagcctccttgctgtgagcacccttccaggagcctggcgtcaaccctgggcttcagcacatggaccctcagcctgagcccagggggctcggagcctccaccccagcagatgacggctctgggccgcctcccccgtgctgctgcctgcacctacctgctgcgtccggaggagccccgaccaccgccagaggcccacagcggcgccaaccccaccgagagcagagaagcccaggggaagggccccacccaccacctcaacactcacctctgtccctctaaggagtagctccctgacaaaggggaagactcccaaaatgatgtctattccactgttatctgcgaaaattaaggcacatttatgagggggcccctgtaagacaaaaccaggacgttcagttgggaacaggcgcatccaagcgagtcagtccgcacccctgctgcccgtcacgctgccctgcaggggccgagactgggggcttcagggccccagagatgccagggatgggctgtcctgcaggggccgagaccaggggcttcagggccccagaggtgccgggactgggctgggctgcaggggctgagaccgggacttcaggaccccagaggcaccgggacgggccagcctgcaggggctgagactggggcttcaggaccccagaggcgccagggacggattggcctgcaggggccagtgcctgtctcttctggcaaggctttgtgcctagagcaggtgacctaagaagcagtcacgacaggagggcaagtgtggggcaggggatgctgagacccttggctcgcaggatggtgagactctaacaggaggggagggccacccgaggcagcccatgcccacctccctccagtgaccacccccccgggccccgctgtgtccccagcagcagaggtgggaggcccctccacatacctttaatctctgaagccactcgctgtaggaatccacgagccagggtctttctgagacagagagagggacacatgattagcccggtgctccaggtcaggggtcagggagacgcgtcttcaggtgttcgtctctccaggaagcaagttctccccgcccccgaagcccagctgacagagccttgagcaggggagm

SEQ ID NO: 94785 - DNA, 115262 bp, Homo sapiens
atccaactctaagttaaaaaatattctaaggaaactggccagctgtaacactcaccgcgaaggtccgcagcttcactcctgaagtcagcgagaccacgaacccaccagaaggaagaaactctggacacatctgaatatctgaaggaacaaactccggacacaccatctttaagaactgtaacactcaccgtgagggtccacggcttccttctagaagtcagcgagaccaagaacccaccaattccggacacacttgtactcctggctactcaggagtccgaggtgggaagatcacttcggccccggaggttgaggctacagtgagtcatgatcacaccactgccctccaggctgggcaacagagcaagacccggtgtcaaaaaataaataacactttgggaggccaaggtgggtggatcacgaggtcaggagttcaggagttcgagaccagcttgaccaacagggtggaaccccatctctactaaaaaaaatacaaaaaaattagctggatgtggtggggcatgcctgtaatcccagctactcagagggctgaggcaggagaatcactggaacctgggaggtggagcttgcagtgagctgagatcatgccactgcactccagcctgggcaacagagcgagactccatctcaataaataaataaataaaagtagacattacagctgacaccacagaaatacaaaaaatcatcagacactattatgaacaactatattaataaactagaaaacttagaggaaatggataaattcctttacacatacaaccgaccatgattgaatcaggaataaacagaaaaccagaacagaccaatcatgagtaatgaaattgaatccataataaaaagtatctccacagtgaaaagcccaggacccaatggcttcactgctaatgactttaataccaaattctaccaaactaacaaagacaaactaacaccaattctcctcaaactattccaaaaaattgaaaaggagggaattcttcctcattctactaggctagcagtaccctgatagcaaaaccaggtaagactgcaacaacaacaaaaaaagatagctacactctaatatccctgataaacacagatgtaaaaattttcaacaaatactaaccaactgaatccaactgcacatcaaaaagataacatgccaggatcaagtgggatttgtcccaaaaatgcagaggtagttcaacatacacaaatcaacaaagacgacacatcacatcaacagaaagaaggacaaaaaccataaggtcatttcaagagatgtagaaaaagcatttgatacaattcaaaatctcttcatgataaaaactctcaaactaggcattgaaggagtgtataatacctcaacataataaagcctacatatgacaaacccacagttaacatcatactatcatagctttcagcttttcctctaggaactggaacaagacaaggatgtctattttcgccactcatattcaacacagtactggaagtcttagccagagcaatcaggcaatagaaacaagcaaaagatatccaaattggaaaagagaaagtaaaattgtccctctatgcagatgacatgatcttgtatttacaaaaacctaacaactccagcaaaagctcttagatctgataaataagttcagtacagttgtaggatatggccaggcatggtggctcacgcctgtaatcccagcatttagggaggccaagacgggaggatcacctaaggtcaggagttcaagaccagcctgaccaatacagtgaaaccccatctcaactaaaaacacaaaaattagccgggcatggtggcatgtgcttgtagtcccagctactcagggggctgagacaggacaagagcttgaacccagcaggcagaggttgcagtgatccaagattgctccactgcactccagcctgggctgcagagcaagactctgtctcaaaaaaaaaaaaaaaaagttgtgggataaaaaaatcaacatacaaaaattagtagcatttctatacaccagtaataactagccgagaaagaattcaagaaggaaatcccatttataatagctacaagaaaataaaatacttaggaaaaaaatttaaccatgttgaaaaaagtttcaccatgttggcgaggctgatctcgaactcctgacctcaaatgatctgcctgcctcagcctcccaaagtgctgggattacaggcatgagccgctgcgcctggccaactttttgaaatttaatatgttaacatatatgtaaaacttggacactactcttaaggagccacagtcttcctctaaaattagtagtgggcctgccatggtggctcacacctgtaatctcagcactttgagagtttgaggtgggcggattgcttgagctcaggagttcaagaccagcctgggcaacataatgaaaccttgtctctactaaaaatacaaaaattagtccggtgtggtggcactgcgcctgtagtcccagctactccggggactgaggtgggaggattgctggaacccaggaggcggaggttgcagcgagccaaaatcatgctactgcactccagcctgggtgacagagcaagactctgtctcagttaaaaaaaaaaaaaaaaaaaagaagaggaagaagaagaagtaccctggttggaaagtaccaggtgatgcctgacactgagcgttaagcgctctgttttctttttaaaaaaaaatattattttttaaatttaaattttgagtgctgtttttctttaccaccagagggcaccaatcaggcaagtcaatctacatgccattatgaaacaatatgagaaagctctaggaagctgtttctagcattcattctttttaacaaatatgttttgagcacttaatatgtgccaaacattggagtagctggtgtagagttttggaatttatagtcttgagcacctactatgtgcttgagagaacagataggcatggggatagagggtagggttcaatttgtgattttgtgattactcattgtcttcctgtccttggccatgagtctcttgagaacaattacttagtgtctactttgtgtcagatggtgtgcctgttgctgaggattcaggcatgaataagacacagtggcagtctactaataaacaatgtcttactggctagaataaaaacacatgagctagttctgtggaattccagttcctgtgacctgagaataaacagccttgattataaaactcattaacgcattgagcttccaacctcccagcatagaggcatgcccgcagtggatgcttagtgagtttgtgagttgacatgagcccagggggccgcttctggtctgagtgccaggtatacgttccagtgggttagactagggcttcatcaccctccaggtcagggtggggctgtgatgagtttttgtgggtgaaatgctttgaagatgacctttctacctatttatctgctcaccgccttgctattaaaggtgtcaacatcatctttcacatttccgggtcagcaatcctcttgtccctaaattgactggtactggagggaaagacagaatgggacataaaccatcattttgataagaggggctgcattcactaggatactccctcttctctgaggggagctctaattccagtagagttcggtctcaagacctggacagtagcgttggcggctagaaaaggatgttttaaaacactgagacctcgtcttttacaggaaaaaaaaggccaaaaaaaaaggagggggggctgcttaagtgtggattgtgtagagtgactccattccaaagagtacagtatagaaaaggggaggaaggggcagagtaactttacagtagaaagacttgacacacttcctcagccagacaatcaaggtcaacatcaacattgctaagtcatgttgctatttgtgcccttaatatgatgtgatgaaatggcatttcacctctgtgatcttaccctcaaaaactcataatcccagtctaatcatgagaaaagcatcacaatcccaattgagggacagtctacaaaatacttgaccagtattcttcaaaactgttaaggtcatcagaacaaagtctaagaaactgccacagtcaagaggaatctacagaaacaggaaaactgaatgtagtctggtatcctggatgagatcctggaacagcaaaaggtcagtaggtaaaaattagggaagtatgagcttcagtcaacagtgatgtatcaatattagctcattaattgtaatacatgtactctactaatgtaatatgttaataaaagggggaactgggcgccaggtgtaggggaacttgactatcttttcaatttttctataaatctaaaactgtccttggctgggcacagtggctcacgccagtaatcccagcactttgggaggctgaggtggacggatcacctgaggtcaagggttggagaccagcctcgccaacatggtgaaatcccgtctctactaaaaatacaaaaattagctgggcatggctgtgcacacctgtggtcctgctacttgggagactgaggttagaggatggcttaagcccaggaggttactgctagagtgagctataatcactctactgtactccagcctgggcaacagagtaagaccctgtctcaataaaaggggtgggtagtggtggtatccagaatacagctatgccttaaagtttttttctttcaagtttctatgaatcattaaccatgtgccagtcactacgctaaatgctgtacatacatttaatcattacaattgcttgtgttgggtataattaatccccttttacagaagctgattaaacagccgggtgtggaggcatgcacctgtagtcctagctacttgggaggctgaggtgggagaatcgcttgaacctgggaggcggaggttgcagtgggccatgatcgcgccactgtgctacagcctgggtgacagagcaagaccctgtctcaaacaaaacaaaaccaaaaaacaaaaaactgatgatacagggagaagtaatggaactagggttggaaccaagatctgtctagttccgaaactgtgtgtgtagaactctcacaatattctggcttttctaggaaatgttttttaggcagttatcctaggacatgccttcctaggagaaaggagtactgtattctgaaccacggggggaccaaagactgtccccacatctcacttcggttatgattatctcgaaagtccctcagttccagggtggacattcaagccacaagcacctatagggaactttgacccctaagttcaaccacagtagtttattttacaaatggcgaaggcgaagggcagcctgagcacttgccccaaatcacaatgagaagggctagagacccagtttgttattgtctttttcctcacaacttcctctttgtagttaagaagggaagcagaagctgacctttttgtctcaccccgtttctcacgtggaactgccgcacccagggtgagtaacgtgccaaagggcacacttgcctgtgggctggcctgcgggaaggtctgttcccaccgaaaagacccacattgtcagcacatcctaatcaagtagctactaagtggagggaccgcagactgggtgtcacggggaggggcctgcagcgaccaggcccgtcccaggatggctgcggaggcccctggatccacagtggggagggccccgagagccgggagacctgggttcccttcccgggcacgcctttggaactgcggcgtccagccgcacaaccgtcactctggggccacggcaatccctgcgcccgcccttggtccccgctgcttctgggatctttatgggcgggggacacgcgccagcgtcacaaagcgccgcgaccgcgcgggagaccgagaggaggcgtggaaacgggaggaggaggaggtggtagtggaggagagccaggcacggtggggggaggggagggaggggcacgcgcacgcgcgtcgggccgccagccgctgagagccgcccagcacccggcgtgcgcccctcctccctctctccctccctccctccctccctgcttctcggctccgttgctcccgcggcgcgaggcgctctcgctctcctcctcctccgccgtcgcccctccccccgcgcagcccccgccgccaccgccgcgagacccccgcacgccgctctccccccaccctctcctgccccgcgcgcctccggcccctgcggcccccgaagagaacgagagggcgagcgagcgcggcgttcccgggccggcccggccccctcccttcaccatcgccggccctccgccgccttcctccgcttccacctcctctccccccccccaagttgaggccccctccgggggggggaggcccgggaccgggacccgtagcgaattctcctaactccctcgacctctcctctcgcccggcccgagtgtgaggagaagggcccggcccggcctgcgtcgtgtgtgaggaggaccccgggcgggcccacgggccgtgtggggcctggtcyggcccgccgggtgtgtgaagaccggggcccggtgctgcccggccggagggcgagcggaggggaggggcctggtccggcccggccggtgcgtgaggactggggcccgggcccggcgccgccgccgccgccgccgccgcgatggcccagcagcagatgaccagctcgcagaaggccctgatgctcgagctgaaatccctgcaggaggaaccggtggagggcttccggatcaccctggtggacgagtccgacctctacaactgggaggtggccatcttcggaccccccaacaccctctacgaaggcggctacttcaaggtaccctcaccctcctcccggaccctgcttcygcggccgaggcctccggctccccgccgctttctgcagttcctgggaccaggagtatgagcacgggcgagtggagggggcttctcacccgtgcagccccctcccccatccctggaggcaggaaggccttgctcgccgagtgccttttctttgtcatgggggcgggggctcgggcgggggcgggagggcaggctgcaccgggaaatcggagagcctctctggttagggtagtgtctacgggcggaggaggccgcctttgtttcccccgctgagggtgggtggaaagagcggtggyctatctgtgctttttcgttctccggtcggaacccctccctgcgcaggctggaactgccccagagggcagggtgacctgcaccgactggattggacttttcttttttgggggkgggggtgggggtggggtgggggaggggcaccagcttgtcatttcagaagctgccgagtgccctgacattttgaggatttgttgggcatcttgggtagtggtagtgccaactttgcattccaatgggtggtrgtgaagaatgggaccctaggggtggtaaaaaaaaaaaaaaaaaaaaagggtgcccgcgtcgtcttgtcattatccatttgggggaactttaaccctctttccgttcacattctctgcttacctcagtcactggttctttcaaaatgccctttgtcctcaccatgccaccaagtttgccaacctttttttctacaggtagaagtatccacaaagggtggaacgagtcatgtagggagaytgatagcttcctactttcagagacaaaattgaaacctgctcaagtggttaactctagctaaaggggtggtctcacagatgacaagtatcatctgaggcgagatcgtttctctgggtgggatgtatggttccttagcgaccacagacattgtttctgttgttttatatggtcttagaacagtggttatcattccagaatctaatgatttttttttaactccaaggtagttaacttggagataatgagtgtttgttttgttttgtttttacttgagtgtttttgcagggaggaatcacagattgaaagtctgaatattttaaatgatgggggcagagagaggaaatgagtgcttaggaatccatttagttttatttttttattttcaaaattaagtaaaataggccagtgagtcaattttagtttggaagggaggggttatcttggcacaagttttaaatgagtatcttagtcatgtagttgtgatgtgtatttttaggactacccaattacttaactcttgttttctacccttctaaaggtggaaacctcagttttatgcttgaaattaggtcaactttgtaggaaatgggattgatacaggaatgtttaatattcactactgtrtatagtcactgagtacctaggaaaagcacgtttttagaatattatgtaagtgcggtacccctaccaactgttaggcttcatcttttgtggtcagcctaccctatacttttcagatggaggtatttaaaattactaagaaaacatgcaacttattagtaacaaagtggaaaagatattgctgtgtttatgwtgaagcatattctctgttgtcaaatataaatttttatgcatactggaaaaattagttgtacaaaattgaatgtatgtgatacctttctttttttttttttgagacggagtctcgctctgtcaccctggctggagtgcagtggcgcgatctcgcctcactgcaacctccgcctcccagattcaagctattctcctgcctcagcctcccaagctgctgggactacaggcgcacgccaccacgcccagctaatttttgtatttttagtagagatggggtttcaccatattggccaggccggtctcgaactccagaccctgtgatcaacccgcctctgcctcccaaagtgctgggattacaggcgtgagccactgcgcccggccatgatgccttttctgacaaarcattgtttagcaaaatctgctggctaatgttagtggaataaagtttgatttccaaaaagtgtcattgtttggtacaaccgatatttaaaataaataaatgggtactagttagaataatctcactccaataaagttaaaaacaagagcaaacaaaacaaaacaaaacaaaacttgtacatgagagaaaataatgggttgcaagttgtaatatttgtgcataagtctgggaaaggagtgtggagaaccctctctgaaataggaagtatggaaggattccttgtgttaatacactgatttaaattaaatgcttctgaacttcagtccttgtttaaaagaatgatttaatctcgtgctttgtgatgttagatttcttaagctttgagtgtttttacctttaattctgacatgtatgaaaatttgtaaacaggttttatggtttagtcttgtgtgagaagtttgttcgattgtattttcgactactttttcccttatatggccttttatcccattagttgttcattagaaaaaggcaaatttatggtcatgagcagttgacactggggatatgtttaaaaccattgtttttattttactgcttttgtcttaagacaaggcttttagtgtatttcactacagctgcagttgaaagttggcacaaagctttccctaccatatcactcttctcccttattaaatgttagtccttgaacatttagtataatttattttcaagttaaactcttttccctttttggcatagtcattcgtgaaggcagtgggactgccagtcattctttacatttttcatactgtaattcctttaacttttatatattaataggtttctaactgatctttttcaccctgaaatagttggctcttgtctcttacccacaggatctgcattggagatttgtgagacctgtatttcacagaatttttttattcatcctgctttcgcttatttaatatcgccaatccacgtgattcttagttttgggccatatagatgtaggatgggcaaagatagtttcttctgtycattctgaatactatacaatcttttttggccttactatctttttgtgtagtttcttattttgctacctaagcaagtcggaattttattgttactagaaaaataaattgtggatcaagtcagtagctaatgaagacttttaacaagttcaccccctttcttttgaaaggaactttttcagggtctttctctgtcacttagtttggggtacagtggtgtgatcatggctcactgcagcttccacatcctaggctcaagcagtcctcccacctcagccccctgagtagctgggactacaggcatgactacgcccggctaatttttttttcttcagtattgttaagtgaggtagggtctcactattttgtccaggctggtctcaaactcctgggttcaaaggatcctcctttctcagccacccaaagtgctggttttacaggcgtcagccaccatgcccggctggaactatcttttcaaataactcctgctaaggattgtagcttagtgtgggtgctttagtactgaacctccttggaacttttgcattatttatctaaagcattatagcagtgagtctagagccagaaagagtgcctcttttatgatatgcataacaaaaaaaaattttttttttttttgagatggagtctcactcttttgccaggctggagtgcagtggcacgatctcagctcactgcaacctctgcctcctgggttcaagcgattctcttgcctcagcctcccgagtagctgggattaccggcgtgcgccatgaaacctggctaattctttttgtatttttagtagagacagggtttcaccatgttggccaggctggtcttgaacccctgaccttaagtgatctgcccatctcagcctcccaaaatgtaatcctaattagaggcctgagccaccactcctggccaaccttttatagttttgattttattaaataatttgattgaggtaatgaaatatagatgtgttccatttttagaaaactccagtctgataatttagaaagtatttgttgtatacttaaagttttccttattaggaacatctttattagactcaacactgacatatatatatatatwttttttttttttgagactgagttttgctcttattgcccaggctggagtgcagtggagcgatctcggctcactgcaacctccgcctcctgggttcaagcgattctyctgcctcagcctcctgagtagctgggattacaggcatgcgccaccatgcccagctaattctgtatttttggtagagacgaggtttctccatgttggttaggctggtctcaaactcctgacctcaggtgatcccgctcacctcagcctcccaaagtgctgggattacaggcctgagccaccacacctggcctacactgacttacattaaagaaactcttcaaaaccttttttttttttttttaagagatagggtctcactttgttgcccaggctggagtgcagtggtgtgatcatagctcactgcagcctgaaacacttgggctcaagggatcctcttgcctcaccctcctgagtagctgggactgcaggtgcataccacactcgttttaatttaaaaaaaaaattgtttatgcagaaagggtctcataggccaggctggtctcgaactcctggcttcaaacaatcctcccaccttggcctcccaaagtgctggtgttacagatgtgagctaccacacccagccaaataattttttttttaataagagaatatgcattatttcctatgcttcatttgttttgcaatgaatgaatctattttctgccttccctcttccccctaaaaaaacaaaccagacttagcctagatctggcaatgtcatttagatattttatttcttttttttctttttcttcttcttattaattttttttttttttttttagctgagtctcgctctgttgctcaggctggactgcagtggtgtgatttcggctcactgcaacctttacctcctgtgttcaagcagttctcgtgcctcagcctcccaagtagctgggattacaggcgtgcaccaccatgcctggctaatttttgtaatttttagtagagatggggttttgccatgttggccaggctggtcttgaactcctggcctcaagtgatctgcccaccttggcctcccaaagtgctgggattacagatgtgagccagtgtgcccagcctattattattattttagagacagagtctcgctatgttgtccaggcttgtcttgaactcctgggctcaagtaatcctcccgcctcagcctcccaaagcactgcgattataggtctgaaccattgcacccagcctattttatgactctttaattggtaaaatatagttgaaaaaaaatttttttttttcctagatggagtcttgctctgttgcgcaggctgaagtgcagtggcgcgatcttggctcactgcaacctctgcctcccgggttcaagcagttctcctgccttagcctcccaagtagctgggattacaggtgcgtgccagcacgcccggttaatttttgtatttttagtggaaacggggtttcaccatgttgtccaggctggtctcaaactcctgacctcagatgatctacccgccttggcctcccaaagtgctgggattacaggcatgagccaccgcgcctggctgaaaaaatttttttaggaaaatgattgtttgcctttttgagacagggattcttttgagaaattgaagaattttctcagagaaaatgggtacacgtaaactaattttatgtatctttttcagagggtttactgccgatgagctaagaatcctcttgtaaggtatttggataggcaacttaaagacaattttaaacagctcctttaaaattataaaacgaatgctcttttattcccccatttctctcagttaactttgaaactacctcttagggcatttagctgtctctttctggaagatgaagttgtcttgagtactgggtgaactaaggtaacgttataaatggaaacacagttaaggtctaagggttttggaaactaaatgaagtttcactttttgttgtttctcagaacatttttcaaaccaaatatgatgccttagtttttcatagaatatgcttttatcctgtttagttgattacaagatgcatatttttctaccttttaacttctttttgattaagaaatttcttagatggccaggtgtggtggctcattcctgtaatcccaggactttgggaggccgaggcgggtggatcacctgatgtcaggagttcaagaccagcctggccaacatggtgaaacccggtctctactaaaaatacacaaattagctggtgtgggccgggcgcggtagctcatgcctgtaatcctagcactttgggaggccgaggcgggcggatcacgaggtcaggagatggagatcatcctggctaacgtggtgaaaccccatctctactaaaaaaatacaaaaaaattagccaggcatggtggtaggcacatgtagtcccagctacttgggaggctgaggcaggagaatggcgtgaacccgggaggcggagcttgcagtgaacygatatcgaggcactgctctctagcctgggcgasagagcgaggctctgtctcaaaaaaaaaaaaaaaattagcgggtgtgatggtccgcacctgcagtcccagctacttgggaggctgaggcaggagaattgcttgaacccaagaggtggaggctgcagtgagcctagatcatgccagtgtactccagcctgggcaacagagtgaagctctgtctcaaaaaaaaaaaaaaaaaaaattcttggaatccatgaagtcttgtaattgccatcagccaagtggtacttataacctagttgtgagagaccatttcattgaaatcttttggtaaatttttttttaaataccagtttcaatgtcatagatttgctaaaataaggattatttcttcctggattgaaggatttaggtcctaattaatactctgcgttgattctccttttttcaccttttgtgtcaggaaaaatttttattgaggactcattaaaggaaaagcaaattgtaggaaaagtcacttccttaaagatagtaagtgaaagtattaggacaatgataaccttagagcttttaagaatgatcggccaggcggtcgcctgtaatcccagcactttgggaggcaaacaacaaaaacaaaaagaatgatcttyataaaagcaaagctttttttttttttttttttgagacagagtctctgttacccaagctggagtgcagtggtacaatcttggctcactgcagcctccatctcctgggtccaagcaattctcctcctcagcttcccgagtagctggggctacaggcgtgtgccaccatgccagactaatttttgtatttttagtagagatggggtttcaccatgttggtcagggtggtctcaaactcctgacctcaggtaatccacccacctcggcctcccaaagtgctgggattacaggcatgagccaccacacctgtccaaaagcaaagcttttaaagctttaaggctagttagaccatttttcaacataatgataaaatgttctgttccatctttccaacttaatggtcagttggagacacgtgagagaaaggagaccatccagcaaattaggctacctctgataatctagttatggaaaaataacagtgaggaaaaggtataaattcagagtttaggactacagatttccatcttgcttaaagattatattgaaaaggtttaattcttttatgtttctgaacttcttttgaactgcttcacatacgactacagagatatctgagttggttggatgcagtggctcatgcctgctcacacctgtaatcccagcacttttgggaggcggaggtgggcagatcacttgaggtcaggagttcaagaccagcatagccaatatggtgaaaccccatctctactaaaaatacaaaaagtagccgggtgtggtggcatgcgcctgtagtcccagctacttgggaggctgaggcaggrgaatcgcttgaacccaggaggtgcaggtttgcggtgagccaaaatcttgtgccactgcactccagcctgagcaacagaatgggactctgtctcaaaaaaaaaaaaaaaaatcctacagagattcctgagtaaaatttaacctctttgattgtgttaatatcaactttattcagcaagaaattgttattcagagattatgcttatgtacctcaaaattagttgactctgaagtgaatggaatgatagatactaagttgaagaggtaaatttagttcacatcaccaaggtttgatgttacttaaatgatcttccacatgataattggaaaattcaggtgttggaatatgtatttaagatgcaaagtggctaggagtggtggctcacgcctgtaaccccagcactttgggaggccgaggcaggcggatcacgaggccaggagattgagaccattctggctaacacggtcaaaccccgtctctactaaaactacaaaaaattagcagggcatggtggcacgtgcctgtagttccagctacccgggaggctgaggcaggagaatggcttgaatccagaggcggagaggttgcagtgagctgagatcacgccattgcactccagtctgggcaacagagtgagactctgtcccctgccgccccctccaaaaaaaaagaaaagtgaatagtccactttaaacacctttatttgatttagtaacaaatacatataaaaatgttttggttattgggtgggtgcagtggctcacgattataatttttacccagcactttgggaggcagaggtgggcagatcacctgagctcggaagttcgagaccagcctggacagcgtggtgaaaccccacatctactgaaaatccaaaaattagccaggcatgatgtcgtgaacctgtagtcccagctatccgagaggctgaagcaggagaatctcttgaacccaggccaatcgcttgaacccaggaagcggaggctgcagtgagccgagatcgcgccactgcgctccagcctgggcgacagtgagactctgcctcaaaaaaaaataaaaaggttttggttattgtcttattattattattattttttgacgctgttcgaataaaaaaaaattagtcaagcatggcagtttgtgtctttggtcccagctacttagaaggttgagttgaggtgggaggatcacttgagcctgggaggtcgaggcttcagtgagccatgagcatgccattgtactctagctgggtaacagagcaagactcagtctcaaaaataaataagttaaattaaaaataaataggctgggcaccgtggctcacgcctgtaatcccagcactttgggatgccaaagcgggcgartcacttgagattaggagttcggcaccagcctggtcaacatggcgaaacgctgtctcaactaaaaatacaaaaattagcctggtgtggtggcgcacgcctgaaatcccagctacttgggaggctcaggcaggagaattgtttgaatgcgggaggtggaatttgcagtaagctgagattgcgccattgcactccagcctgggcaacaagagtgaaattccatctaaaaaaaaaaattaattaattaataaaattaaattaaaaattaaatcaggctcggcgtggtgacccatgcctgtaatcccagcactttgggaggctgaggtgggcagattacgtgagatcaggagttcaagaccagcctgaccaacatggtgaaaccccgtctctactaaaaatacaaaaattagctgggcatggtggcacatgcctgtaatctcagctactcaagaggctgaggcgggtgaattgcttgaacccgggaggcggaggttgcagtgagcccagattatgccactgcaatccagcctgggcgacatagcaagactccctctcaaaaaaaaaataaatacaaataaaataaattaataaaattaaaaattaaattaggctgggcacagaggctcactgtagtcccaggactttgggaggctgaggctggcggctcacctgaggtcaggagttcaagaccagcctgaccaacatggtgaaaccctatctctactgaaaatacaaaattagctggttgtggtagcacgcgcctataatcccagctactcgggaggctgaggcagaagaatcgcttgaacctgggaggtggaggttgcagtgagccgagatcccaccattgcacaccagcctgggcaatagagcaagactatttctcaaaaaaaaaaaaaaaattaaaatcaaacttatggagtgttttacaaggaactgttttaaaattttgatgacttcagtttttgtctcttaaaacttttttttttttttttgcagacagtctcactgtcgtccacgctggagtgcagtggagtgatcttggctcactgcaacctccgcctcctgggttcaatcagttctgctgccttagcctccaagtagctgggactacaggcatgtgccaccaccgggctaatttttgttatttatttatttatatttgagatcaagtctcgctctgttccccagcctggagtgcagtggtgcgagctcggctcactgcaatctccgcctccctggtttaagcaattctcctggctcagcctcccgagtagctgggattacaggcatgtgccaccatgcccagctaatttttgtagtttttttttttttgagatggagttttgctcttgttgccctggctagagtgcgatggcatgattttggctcactgcagcctctgcctcccgggttcaagtgattattctgtctcagcctcctgagtagctgggattataggcgcacgctgccatgcctggatacttttttgtattttcagtagagatggggtttcaccctgttggccagactcgtctcgaattcctgacctcaggtgatctgcctgcctcagcctcccaaagttctgggattacaagtgtgagccaccatgcccggcctgatttttgtatttttagtagagacagggtttcactgtgttggccaggctgggattgaatttacctcaagtgatctgcccaccttggcttcccacagtgctgggattatagttgtgagccaccgcgcctggccttttgtctgttgaatccacaggaaaaaaatggatctttaaaaaattctggactacttgaataagagaatgataaatcatatttcagaaaggctttttattagcaaattgatttctttaatagcaactttaacattaaggggagggtgggaatggtgccaatattgagaaaaatataagtctaagaatttggttttggagacattgggtactcagaaaggtggaagaatggaggcagcttaagtgatgagagattacctaatgggtacaatgtatactctttggatgatgggtacactgaatgcctagacttcacctctatgcaaaacatccatgtaacaaaactgcatgggtacccgcaaaatctgtttttataaaaagttgattttgggatgagaaatgatgatatagtacctctgaaagtgagagatgatagagaaagttaaatttctcaatacaatattggtttatgcttttaaaataataatgccttgatattttccaagtatatttaagcatcatagaggaaacctaagcttagggaaacattcttttcagtttcctcatttgagtctagtgagtgctattttttaacctctattacagcatctttagattagtgcaatcgttttttttttttttttttttttaaacagtttcgctctagttgcccagactggagtgcagtggcacaatctcggctcaccgcaacctccgcctcctgggttttcaagtgattctcctgcctcagcctcccgagtagcaaggactatargcatgtgccaccacgcccggctaattttgtacttttagtagagacagggtttctccacgttggtcaagctggtctcgaactcccgacctctggtgatccgccctcctcggcctcccaaagtgctaggattacaggcgtgagccaccgcgcccagcctaatcagtgcagtagttttaattggttaatttattctgcatttggatttccaagtttcataatttttttttttttttttgagacagagtcttgccctgtcacccatgctggagtgcagttgcgtgacctcagctcactgcaccttccacctcttggattcaaacaattctcatgcctcagcctcccgagtcgctgggactacaggcgcatgccaccatgcccagctaatttttgtattttggtagagacggggtttcaccatgttggccaggctggtctcgaactcctgacctcatgtgatctgcccgcctcggcctcccaaagtgctgggattacaggcatgagccactgcgcccggcctcataattctttagatatctgctttgctgattggacgcgttggctcatgcctgtaatcccagcactttgggaggtcgaggtgggcagatcacctgaggtcaggagttcgagaccagcctgaccaacatcgtgaaacccccgtctctactgaaaatacaaaaattagcctgtcgtggtgttgtgcgcctctcatcccagccacttgggaggctgaggcaggagaatctcttgaacccgggaggcagaggttgcagtgagccaagatcggccactgcaatccagcctgggggacacagcaagaatccctctcaaaggaaaaaaaaaaaaaagagatatctgctttgcttatttgttgcatgggcagctggtatttaatttgagggataagtcccataaaataattcatattggctcatttagtagcaaacatagtaatttgggttttaaacattgaataatttctaccttgttgaaataactgtggttccatttataagataatattaagaatgagtagagtaggctggtccgagtgcagtggtatttacaacctattgatcacaaccagttacagattgcttagtttcttcttcattccctctgtttcactgaactagcaaaaaaaaaaaaaaaaaaaaaaagaataggtaaagttataaaaacttggaaaatatgtagtagttcttcacagaaacagactggtggctgggtgttgtgcctcacacctgtaatcctagcactttgggaggttgaggctggtggatctcttgagcccaggagttcaagactggccgagcaacgtagtgagacccccatctctacaaagaaaaaagaaacagtggcttaaatcttaaaaaacagatttttaagtttacttgtaatcatacctgatatmtgcaataaggcaaaacaaaagagttttgttattcaaaagaatattttccttcttatgacttaatactttttgtttgtttgtttgagacagagtcttgctctgcctcccaggctggagtgcagtggcgccatctcggctcactgcaacctccacctcccaagttcaagctgttctcttgcctcagcctctggagtagctgggattataggcatgcatcaccacacctggctaatttttgtatttttagtagagatggggtttcaccatgttggccaggcaggtctcgaactcttattttatttattttattttatttgtttgtttttgagacggagtctcactatgtcgcccaggctgaagtgcagaggcgcggtcttggctcactgcaagtttcgcttcccaggttcatgccattctcctgcctcagcctccctagtagttgggactataggtgcctgccaacacgcccggttaattttttgtatttttagtagagatggggtttttccatgttgatcaggctggtctcaaactcccgaactcaggtgatctgcctgcttcagcctcccaaagtgctgggattactggcgtgtgccaccgcgcccgacctgtgacccaggtattcttaagcttgattcattgaatcaacgatagcaatcactaataaattatttaggccgggtgcagtgcctcatgcctgtaatcccagcactttgggaggccgaggtgggcggatcacctgaggttgggagttcgagaccagcctgaccaatatggagaaaccccgtctctactaaaaatacaaaattaggcaggcgtggtggtgcgtgcctgtaatcccagctacttcagaggctgaggcaggagaatcgcttgaacccgggaagcagaggttgcagtgagctgagattgcgccattgcactccagcctgggcaacaagagcgaaaatctatctcaaaaaaaaaaagaaaagaaaagaaattatttaataccctttggttgaactttaatcaaattttttcggccgggcgctgtggctcatgcctgtaatcccagcactttggtaggctgaggtgggcggatcacaaggtcaggagatcgagaccatcctggctaacacggtgaaaccccgtctgtactaaaaatacaaaaaaattagctgcgcttcgcggccagcacctgtagttccagctacttgggaggctgaggcaggagaatgacgtcaacctgggaggcggaggttgcggtgagagccgagattgtgccactgcactccagcctgggcaacaagagtgagactccgtctaaaaaaaaaaaaaagaaagaaagaaagaaattatttaatactctttggttgaactttaattaaattttttcaaggttttttttaatgctctcagaatcaaaactttaattaaattctattatagttttaagtagtcaggtttatggaggtataatttatacattaaaattaatctttttagttacatagttctrtgaattttgataaatgtatagtcacattcagttttttaaagaaaaagatgaccacagcagggcagtttttataccaaatttgtctatgtgagaagaaaatgaagttactcttttttcttaaaatatgaggaaaatggctctgaggactmagagttattatttgtgtggtacaatgagtcctcactaatttggattctactaatttgaaaattatgaggtttttcttttttgagaaaggattttgctgtattgcccaggctggagtgcagtggcacgatctcagctcagtgaaacctccgcctcctgggttcaagtgattctcctgcctcagcctcccgagtagctgggattacaaacacatgccaccgtgcctggctaatttttttttatttttagtacagacggggtttcaccgtgttagccaggatggtcttgatctcctgacctcgtgatccgcctgccttggcctcccaaagtgctggcattacaggcgtgagccaccgcgcccgactaatttttgtgtttttagcagagacgtggtttcaccatgttggccaggttggtcccctgacctcaggtgatccacctgcctcggcctcccaaagtgctgggattacagacatgaaccactgtgcccggctgatatggtcgtttcttgtaagagcttcagcattacttaacaataaaaaatgttctaagtaatggaagattatatgaaaagaaggatttaaactccatctgtcacttctcagttacattttacgacatagcattttattttgattgtggtgaatcatataattaccattttaaccatttttaagagtacagttcagtgacattaagtatattcactgtgaagtgtaaccagcatcatgacctattttctaaactttttcttcattccacactgaaactttgaagctgttaaatagtaactaatttttcccccttgccttcattctctggtaatctcaattctcctttctgtctttatgaatttgtttattctgggcaccttgtagaagtggagtcataaaatatttgtcctttagtgtctgttttatttcacttagtataattatctcaagattcatccatgttgtagcatgtctctgaatttcatcccttttaatggctgaataacattccgttgtttgtataattcatctgttgatggatgcttgggttgttcccacctttgggttattgtgaatcatgccgttctcttttggatgctgtaaatgtttggtagactytagagtcccacagtagttactttagacaattcctaccagctcagtggttgtttaggtgtagtgacggattcttggagcttctttttttttttctttttttttttttggagacagagtctcgctctgttgcccaggctggagtgtgatggctcagtctcggctcactgcaacctccgtctcccgggttcaagtgactctcctgcctcagcctcccaagtagctgtagagtagctggaattataggcacaaaccacctcacccagctgattttttgtatttttagtagagacgggtttcaccgtgttggtcaggctggtctcgcactcctgaccttaggtgatctgcccaccttggcctcccaaagtgttgggattacaggcgtgagccacacgcccagccttcctggagctccttagtccaccatcttccatgaccttgtcacgatattagctgttaaatagctactatttaattatatttataaaacctattcattatataaaaattagaaaatatagacctcgcacggtggctcacacctgtaatcccagcactttgggaggctgaagcaggtggatcacctgaggtcaggagttcgagaccagcctggccaacgtggagaaaccccatctctactaaaaatacaaaattagccggatgtggtgacacatgcctgtaatcccagctactcgggaggctgaggcaggagaatcccttgttcccgggaggtggaggttgcagtaagccgagatcgtgccgttgcactccagcctgggcaacaagaccgaaactctgtctcaggaaaaaaaaaaacaaaagaaaagaaaagaaaagaaaatattgataaacaaatagaaaaagagagaaattacccacaatcacatttcccagagtaatgagtatttcctttttgtccttccagatatgcatgttgggaacatattacataaactggtttgtaatatgttttgaaacttaatatgaatatgttttagctatcttttcatgagagaacatgcatgtctaagtgtaggtttttttttttttttttttttgagacccaatctctttctgttgcctaggctggartttaatggcatgatcttggctcactgcaacctctgtctccaggttcaagtgattctcttgtctcagcctcccgagtagttgggactacaggcacccaccaccatgcctgggtaatttttgtatttttagtagatacaaggtttcatcatattggtcaggctggtcttcagctggtgacctgaggtgatccacctgcctcagcctcccaaagtgctgagattataggcttgagccactgagcccggcctaagtgtagtttttaaatgccgtgtagtgtatatgctgtacttcatttctattgctggacacttaagttgtttcagccttttccttaatacaaaagatgtcgcaggaaactttatatgtccttacaatttttgtttgtttttgagacagagttggccaggcacagtggcttacacctgtaatctgagcactttgggaggctgaggtgtgtggatcacttgagcccacgagttcaagaccagcctgggtgacatagggagatcccgtttctacaaaaaaaaaaacaaaacagccaggcctggtggcacgcacctgtagtcccaactactcaggaggctgaggtgggaggatcatttgagcctgggaattcaaggttacagtgagctatgattgcactactgcactccagcctgggcaacggagtgagaccctttctctaaaaaaggcttgtagaagaaagtaaagatatgagttatttttgtacagctgtatagtgtgatttcgttttaagctaagaagctaagtgttgtttcaaaggtcaaaaagttaaaagtttgtatagtataagaattgtgggctgggcacagtggctcacgcctgttatcccagcactttcgggagggcgaggcagatggatcacctgaggtcaggagtttgagaccagcccggccagcatggtgaaaccctgtctctactaaaaatatagaaaaattagctgggcgtggtgggaggcgcctataatcccagctactcacctacaatattcagtatagtaacatgctgtacaggtttgaagcctaggagcaataggctataccatatagcctagatgtgtaggagcctataccatctaggtacaagtataccatttttgtgtaagcatgctgtatgatgttcacacaatgatgaaattgcctaatgatgcatttctcagaacatattcctgtcattaggcaacatatgactgtaattcagtggtttttagtcagaattktgcaatcatcaccacagtcaattttagaatattttgctgggcttggtggctcatgcctatgatcccagtactttgggaggcagaggcacgcagatcatttgaggtcaggagtttgagagcatcctggccaacatggcaaagccccatctctactaaaaatacaaaaaattagccagacatggtggcacatgcctgtagtcccagctactcgggaggcggaggcaggagaatcacttcaacctgggaggcagaggatgcagtgagccaagatcatgccactgtactccagcctgggcaacagagcaagactcttgtctcaaaaaaaaaawatatatatatatatattcttgaggaagtgtgcctagcaggtaaattttttgaagctttattctaactttatacttgaaattacttggctgggtatagaattctagattggaaatcctgtagctttagaatttcgaggacattactgtattgggttcttagttccaaagatgatgtttgaaattcaagaatgttctaaatcctgtgcatggtatgtgaagagttttttcttctggaagtttgcaggactctgtgtgtccctgatttcttaaatttcacattgctgtaggtacttttaaactcatgtttttcagcattgggaaattttcttgaattatttcaagatattttctcctctatgtttttcctcatgttttttggggagcacccattatctggatatagaacagtctgaattaattcttctaattaacatatctttttctcttttttttcctttatttgtttttgagacagaatcttgctttgtggcttaggctggagtgcaggggtgcgatcaaggctcactgcagcctcagcctcctgggctcaagcgatattcttayctcagccccgaccatgcacagtgctgtgattacaggtatgagccactgtgcccagcctcttattttcagtttaggcagctgctgcttcttttttttttttttttttgagacagggtctgctcttgctctgctgcctaagctggagtgcagtggtgcgaacatagcttactgcaacctctgcctcctgggctcaagagattctcccacctcagcctcctaagtagctgagactgtaggcacctgctaccacacccagctaatttttatatttttagtagagatgggttttgctgtgttgcccaggctgttcttgaactsctgagctcaattgatctacctgccttagcctctcattgtgctaggattacagagccaccacacctggcctgttcttgttttttaatagagacagtgtctcaatatgttgcccaggctggtctcaaactctgggctcaagcattcctcctacagtgttaagattgcaggtgtgatccactgggcttagccaacattctgtttttgatgtcttggttttgatgtcttgatcatggttgtcgtttctcctattaactccctgaagacatcatgtatatacagatatataggtaaatatatatagcttatatagaagtatacatagttttatgtatgtgtaattatatgtctcatatataagccattatttacagttgtccttcagtatccatagggggagttccaaggacccccactgataccaaaatcttgaatggtcaagtcccttatataaaatgatatagtatttacatttaacctgtgcacattctcccatatgctttatttttttaatttatttttttgagatggagttttgctctgttgcccaggctggagtgcagtggcagtctagctgtattttttagtttgtattattttttattgctttttttactgttttttttttcttgttttttttttcgcttgaatatttttgatccactgttggtagaacccagggatatggagggcctactgtgtatacgtatataatgtttatatatatgtatgtacatatatatatacatttttaatacattttacttttcctgcatggactgttttcttcacgttgagttgtattttaagtgtttcatggtaaactttccygagatgtttgctaatgttaatctgcttaatagtttttttttaaattgaggtgtatgtacatacaataaaatgtgtatatcttggctgggcatggtggctcacgcctgtgatcccagaacttcgggaggctgagacaggtggattatggattcttaatttactacagtttagtttatgttagttggttttattacttcccaggaaatgcaagaaccgtacatttagctctttacctccttcttgtcctttgccctattgatggtatattttcttataaamctctaaagcaacagtattattgttttacatagttgctgtggtctggccagtcgtggtggttcacgcctgtaatcccagcactttgggaggccgaggtgggtggatcacctgagatgaagagttcgagaccagctggccaacatggagaaacctggtctatactaaaaatacaaaaactagccgagcatggtggagcgcacctgtaatcccagctactcgggaggataaggcaggagaattgcttgaacctgggagatggaggttgcagtgagctgagatcgaggcactgtactccaacctaggcaacagagcgaggcactgtctcaaaaaaaaaaaaaaaaagttgctgtggtctgaatgtgtatccccaaaagacatatgttgaaacataatccccaatgtgatagtataaggaggtctggcttttgggaggtgattacgtcgtgagggctctggcttcatgaatgaaattagtgtttgtgtttttgtttttgttttgagacggagtttcactcttgttgcccagactggactgcaatggcagggtctctgctcactgcaccctctgcctcccaggttcgagcaattctcctgcctcagcctcccaggtagctgagataacaggctcctgccaccacacctggctaatttttgtatttttagtagagacggagtttcgccatgatggccaggctggtctcgaactcctgacctcaggtgatccacccgcctcagccttccaaagtgctgggagtacaggtgtgagccaccgtgctgggcctgagattagtgttcttatgacagaggccccagagagctagctagtccttttcactacttgagaatgcagcaagaaggcatcgtatatgaagaatgggcccttactagactccagatttgttggtgtcttggtcttcccagtctccagaactgtgagaaataaattactgttgtttaagctaggagtggtggctcatgcctataatcctagcactttgggaggctgaggtgggaagattgcttgagatcaggagtttaagaccagcctgggcaacatagcaagattctgtctctacaaaaaaatctaataagttagccaagtgtggtggtctacctgtaatcttagctacttgggaggctgaggttggaggattgcttgagcacagaagtttgaggctgcagtgagctatgattgtgccattgtactccaatctgggtgacagagtgagaccctgactcttaaaaaaaaaaaattctgttgtttataagccacccagtttatgacttttggtatagcagcttgaatgaactaagtaggtatgttttctaagttgcttttaatatttgtatgtaaaattagcagaaaacgtctctttcacaaacatacagatagtgctttttcccctttttctttttttaaaaaataaggcgaatatccatatccccagttcaagaaacagaacttttcagccatccaggagccatccatgtgttccatttcagttgtaactcacctcccaaaaaagaaaaataaccactacttcactctctctcagtcatttccttttcttttatagttttatcaccgtgtacattcttagacattatattttatttagtgttatgatgtcttttaaaccacagtttatgcctctatccctttttttyccttagtttttatgttgaagaacccagggagagttaaccaaagtttgaattttactgattgtacactcatgttgcatctttcttcattccttgtatattttgcaaattggttactgaactcagagacttggtcagactctggttcggtctctttagcaatactgtaggcagtgttgtgttctttcatggggaggcagaagtctggttttctcttttttttaaatcatgtccgcagttgttgggctcagtgcccagatccattaatttatcaatggtttaaaaatagtgacattctaattgtgtgggtttttttaaaattttttgttggaatacttttattaagagatgcttctgcttacctgctgttcagttatccagtggcacagttatataggaaaggtaggatatatacttgattctttgcctttatttattcttttttcaaaatagtgacttagttccctattattctctaagagaaccagctatttaatttaatttaattaattaatttttttgagatggagtttcactctttcacccaggctggagtgaagtggggccatcgcaactcactgcaacctctgccccccgggttcaagcaattctcctgcctcaacctctcgagtagctggaattataagcacctgccaccacgcctgatttttttttttttgagacgaagtcttgctttatcccccaggctggtgtgcagtggtgcgatctcggctcactgcaacctctgcctcccgggttcaagctattctgattcagcctcccgagtagctgggattacaggcgtgtgccaccatgcctggctaatttttggattattagtagagacggagtttcaccatgttggccaggctggtctcgaactcctgacctcaggtgttccacctgcctcggcctcccaaagtgctgggattacgggcgtgagccactgcgcccagccttatgtctttggccagttggagcttcttcaagttgactcctgaatgacttggtctacttcttgtagttttcgtagcatctttgctatctggtatgaccaggtgttgcaggcttatcttttacagtttctaccccagatttataacctattatttcttcaacaagccctggttttagtggcagaggtatttagggcgcctaatatggaccttagagattattgctgctgtgagttgtcattgtttctaggacagagttatgggtgatatatatgtatatgtgtatatctgtacacatgcttttttataaaacttaaccacttctgtattataatacatcggtgtatatttttccatgttaaaaattctggttctcaaggatagggaataatgaactagaatatcctcattattaattactcrcttgttttctcgtatattacacagtagtctcagaatagcaatactaataataccataaccaatgtgattgctgagaatagttgcataaattgtttcatgtatgctgtcctcatcaccccccgacatcatcatatctgtattatatctatcttgtcagattattcattacatgcaatattctctttcaaccttaatttgtttttattctgtaagtaattatatagttcagtggctggcattctttttctgtaaaaggccaggtagcagatgttttaatttttgcaggcccggaggcaaaattaaagatactatatttagggtgggcaaagtggctcatacttgtaatcccagcactttggaaggccgaggtcagaggatcacttgagcccaggaattctccaccagcctgagtgacatagtgagaccttgtttccacaaaaataaaaaaaaattagctgggcatggtggtgcacacctgtagtcccagatacgcggaaggctgaggtaggaggatcacctgagcctgggaggttgcggctgcagtgagccttatggcactgcactccagcctggggtgacagatttatattacaagagagaagataaatttccaccaatttgtattgacaaaattcaaataaaaataattgaaattttttttttggtaatgcaggtctcattaagaattgaattaattttggagggatggataattgcatcacttaataaggttattgttttcattaaaatggattgctcatgttgatctcgaatgagatttcctctttgaaaatgtcttcatacagattggtactgctaaatgcagatactagtacatgggcatatgattttcattgtgatatttattgcttgggagggagtatatagaattctgttagattcttctcttgatatttgctttttagcatgccattgtagtgtagattaatcacttccaattaaagagtacgtggaagcgctacaattgcacagttaactggattttgatgtatataaatttccttttgtacttggctgaaggtctgaaaaacactgctgaagctgcaatttgagctcaggaaatatattctagccacatgccatgacacatgcctgtagttccagctacttggaaggctgaggtgggaggatggcttgagcccaggctgtgatcgtgctactgcatggcagcctgagtgacagttgtgagaccgtgtttacaaaaaaaaaaaaaacagaccactttttttttaagacagagtcttgctctgtcgcccaggctggagtgcagtggcacgatcttggctcactgcaacctccacctcctgggggtgaagcgattcttctgcctcagcctcccaaatagctgggattacagacatgcgccatcccgcccagctaatttttgtatttttagtagagatggggtttcaccatgttggccaggctggtctcgaactcctaacctcaggtggtttgcccaccttgggcttgcaaagtgctgggattacaggtgtgagccaccatgcccaggcaagcagacctctttttaaaaaaaaaatcactcaacttacttcattagtagtaatgcagcaagtagaaaaaaaggaaaatacattcatagcaaatttgtctggaaatggaggttttacttcttgttttaacttttttgtttttttttttgagatggagtctggctatgtctcccaggctagagggaagtggcatgatctcagctcactgcaacctctgcctcctgggtttgagcgatcctcctgcctcagcccccctagtagctgggattataggctcgcgccaccacacctggctaattttagtatttttggtagagatggggtttcaccatgttgtccaggctgatcttgaactcctgacctcaaatgatctgccttggcctctcagagtgctgggattacaggcrtgagccactgcgcccagcctacttcttgttttaacttttgtttaagacaggaagtttatagagatgtttgacattacttataattcagacaacctttgttttcatccaaatattttgggttttaccactgcataagttttgtacataagtgctatttgtcatataattttagtttaaaaatctattaagaggtattatcaaccttgcagtaaaaaagctgatttccaagkccatttagtattctataatgatagttgaggttacttcttcagaaaaatttgtcttgatcccaagctcaaaaaattgcagttaaaacatcactgccatcagtacctgctgatgaataatacagtgagtaaccataagcttgaaacactttattacattttatattttcataagttttattaatttgtccaattaataagcctttttctgttccacacacacatatatatataagtatttttgagagagtttcactcttgtcgcccaggctggagtgcagtggcgcgatctccgctgactgcaaccttcgcctcccgggttcaagcgattcttctgcctcagcctccccagtagctgggattacaggtgtgcgccaccatgcccagctgattttgtattttcagtagagacaggtcttcaccatgttggtcaggctggtctcgaactcctgacttcagatgatccgcccgactcagcctcccaaagtgctgggattacaggcgtgagccaccacgcctagctgtcccacatctattttttttttttttttttttttaccatcagttgtaatgtttctttagcagattccatttmaggttgaactgaattagtgtttattcaagtttgaaaatattcttggtggtgttgttccaaasattcattagagaggctaattattcagtcacttcgaagtctgtattgactgctcaaataaacaactgagctgtatcagtaacatatgttgagtcctctagagccaaggaaaaccactcraaatcatttgcctttttttttctttttctgagacagtcttgctctgtggcccaggctggagtgtagtggtgtgatcttggctcactgcaacttccacctcccgggttcaagcgattctcttgcctcaccctccggagtagctgggattacaggcgtgtgccaccacgcctggataatttttttgtattgttagtagagacggggtttcaccatgttggtcaggctggtcttgaactcctgacctcaaatgatccgcctgcctcgaccttccaaagtgctgagattataggtgtgagccaccaagccctgccttcattgccttgktttttaatcaactgttgatgttgcttacagtatcctcagcttgctgagcaactgttctcaccaaaaagctaataatcttatttcctctggacacattcctttttttcttttttgtttttgagacggagtttcactcttgttgcccaggctggagtgcagtggcacaatctttttttttttttttagacggagtcttgctctgtcacccaggctggagttcagtggcacgatcttggctcactgcaagctccgcctcccgggttcacgccattctcctgcctcagcctcccgagtagctgtgactacaggcgcccgccaccacacccggctcattttttctatttttttagtagagacggggtttcactgtgttagccagaatgatcttgatctcctgacctcgtgatctgcccacctcggcctcccaaagtgctgggattataggcgtgagccaccgcacccagcttggcctggatacatttctttgactggtataatcaaacatgatttaatgaactaatcattagtaagtggttcttgataggctaacaaatgagccatccacctaatttagttgctgttttattttcattattttatgaagaaattctactgtgataagatacttcatttagaattttctaggccgggtacagtagctcacgcctgtaatcccagcactttgggaggctgagtcgggcagatcatctgaggtcaggagttcgagaccagcctggccaacatggcgaaactctgtctctactaaaaatacaaaaattggctgggcgcggtggctcacgcctgtaattccagcactttgggaggccgaggtgggcggatcacgaggtcaggagatcaagaccatggtgaaaccccgtctctactgaaaatacaaaaaattaggcaaggtggcgggtacctgtagttccagctactcgggaggctgaggcaggaaaatggcgtgaactcgggaggtggagcttgcggtgagccaagatcacgccactgccctccagcctgggtgacagcaagactccgtctcaaaaaaaaaaaaaaaatacaaaaattagccaggtgtggtggcacgagcctgtaatcccaacttcttgggaggctcaggcaggggaatcacttgaacccaggaagcagaggttgctctgagccaagattgcaccactgcactctagcctaggtaacagcgaaactccatctcaaaaataaaataaaatattctaattttttgctactrttttcccgtgagttaggtactgttgtgtgatgagtgtaatttggtaatgtctatgaatagtgtattttttttaggatagttacattgtcattgcataataaagacaatgctttgtcatctaatttgacaaaacattccttgcgcctaaaagtatgacatttcaagtccacttttctctctctctctcttttttggttttaatatgatgggttaagcaatgacaataaaaaataaaatatcccagtacagcattatgtgtggctctcaaaacgttgtcaaatatagctactatatcactgtaattttgtagtatatcatgcagcagtgtgaagtgatgagaacaccacatatggtctcttgcaactgctaaactctgccattgtagcattaaagcagccacagatargttataaatgaatgagtatggttgttttccaataaaactttatttattgagttttatatagtttttatgtgtcacaaatattattcttttgattttaaccacatattttccttaacagtgtttctcatttcttcctgaagtggtacttttatctgagagattttccttcagcttagtgaacttttaataatttttatagtgcagatctgctgtcaacaacccgtctcagtttttatttgcctgaaaacatctttattttgctttttttttttttgaaggtttttttttttctggatataaaattataggctgggtttttttccccctttcagtactatgaagttttcattttattgttttctggctttatttatttatttgagacagagtatcactctgttgcccagtctgaagtgcagtggcatgatcttggctcactgcaacccctgccacccgaattcaggcgattttccttctctgcctcccgagtagctgggattacaggcatgcgccaccatgcccggctaatttttgtatttttagtggaggtggggtttcagcatgttggccaggctggtcttgaactctggcctcaagtgatctcctgcttcagcctcccaaagtgctgggattagaggcgtgtgccactgcgcccggccctggcttgcttaatttcttttagtaatgctattattgctgcatttaaagtaatgtcttttttcttttggctgcttttaatatttactctttgtgtttgttttcaacagttaaactttgatgtgcatgggtgtggttttctttcctgcctttggttcactgagcttctttatctttcattagttttagaaaattcatagccattatcttttcaaatattgctgcttcattctctctctcttcttcattaacctacgtatagtagaatttttgactatgttctgtgtgtctccaacactgtgttctgtcctttttgcccttgttttctgtgcttcagtttggatttgacctgaaatttttttttttttttttttttgagacggagttttgctcttgttgcccaggctggagtgcaatgacgtgatcttggctcactgcaactctgcctcctgtgtttaatccattctgctactgcagcctcccaagtagctgggattacaggcatgtgccaccacactcggctagttttttttgtatttttagtagagacagggtttcaccatgttggtcaggctgttctcaaactcctgacctcaggtgatccacccgcctctgactcccaaagtgctgggattacatgcaggagccactgcgcctggcctgttgacctgaatttaagttaactaattctgttttatactgtctatccaatgagttacagattctaggtactgtatttcaggtttaaatttttaaaatagtttccagtattctgttaaaattcattccaaaaagtcatttcataaattcattttgtgcaattttttcttctattttcttttaatatactaatcatagtcattttaaagtccacgtttgccagctccaatatctgaatcatctgtggatttgtttctgtacttttttctcctcttatcagtcattctccctctttccatacttcttaattttttaaattgtatacagactttgcatacaaaataatcctggagactaagatgatatctttctccctctttcctttgctaggtagataggatgtggggctgttcacctcaaatcagtcaaggattgatttaggttggggctgggttacagttttcaaaagacttagtatatcacctcagtttcaaaagactacagaagattgaattctgtcctctagctctgacaccatacagctataaaatcttttttttttttttaaatggagtcttgctgttgtagcctgggctggagtgcaatggcgtgatctcggctcgctgcaacctctgcctcccaggttctagcaattctcctgccttagcctcccgaatagctgaggttgttataggtgcctgccaccacgcctggcagatttttgtatttttagtagagacaggtttcaccaggttgaccaggctggtctcgagctcttgacctcaggtgatccaaccaccttggcctcccaaagtgctgggattacatgcatgagctaccacacccgccgagtctaatcttaaaatgagaaagttgtttaatttatcagagaactacaaagataataataactcctgtttaggccgggtgccgtggctcacgcctgtaatcccagtactttgggaggccaaggagggcggatcacctgaggttgggagttcgagaccagcctgaccaacatggagaaaccttgtttctaccaaaaatacaaaaattagccgggcgtggtggcacatgcctgtaatcccagctactcgggaggctgagacaggagaatctcttgaacctgggaggcggaggttgcggtgagccgagatctcgccattgcactccagcctgggcaacaagagcaaaacttcgtctcaaaaaaataaataaataaactcctgtttattgagtgattaatatgtgcactgctctgtgctgagtagggaaatatccttatctttttgtgtgtgtaggtgtgtatatacacaaacatatatatgtataccgaatatttaaagaaatatctgttatatataggtatatataaagagatatgtaagtaatatcaaacaaccattagttacttagctgtgtgaccctgtgtaagtttcttaaattctttgtattcattttccttatttgtaatacaggtttgttgataataactgcctcatagggttgttttaagaatcaagagtatggatggacgcctgtaatcccagcactttgggaggctgaggcaggcagggtgcttgagctcaggagttcaagaccagcctggacaacatggtgaaacctcatctctacttaaaaaaaaaaaaaaaagtcaggcggtgtggtggcatgtgctgctagttccagctgcctaggaggctgacatgggagggtgacttgagcccaagaggtggaggttgcagtgagccaagccaagatcttactactgcgctccagcctgggcaacagaaccagaccccctctttgtatttcttacaccaacccaatgagacaagtaccactgacccaattctatatgtataggaaactaaggttcacagggagttgtccaaggtttcagtgattagtttacattcctggttctgcagcctatacaagtttgtctgcctatatctatattttttcctgcctccaaagcaggtgacacttggatatttacacagaaatttgtcaggcagttgtttggtaagaggaccagagaaacgcactgggctggagtctgtgacagagtacagccttgagagaagtacgtggggcatggcaagcagaaactaaatatgctatcagaacaagaattttggaattagagcacacagtggtattcagcttggcgtccagtaattagaccattaaggattggattgaggctgaggatctagagctctaaaaatcaagtcagaatttctcttaggagttagggatgcccagattctgtggatgtgtttaaagtggcagcaactgcaaagaggatcgctgcagagactgggcgtgaggctgccattagttgcttcatttctcagtcacctgtaaccattcttcattccatgatactagatctactattccctgataaatcagctgaacagacgagcctaccaaactcatggtttgatgccctctgcaataccaagtttcatctgtgtccttatggctgataactgacttgcatatctagcttcccgacttctggcttaatcttaacctcttaaatttgcctgcccctacaaatcctgccaatcgggattcctttttgccttcatattactgatttcaaacttgttttgttccttttttacatttaattgtttatttataaaaatagttcacatatatagttttaagagtaacatgtggtgtaagacttacaataaggaacaatcagttccctactcttccccattattcactagcaacccctttcagctcttataaaaatggagagaaagtgagtcttttgtttacttcctatggttacctccagcataaagccacacttcaggtgagccctgcccccagatgcagtcacttaggccaatatttacttaaaccaaattttttggttattgttctagagttcagttcataatcatacttctcattaatacttcttaaacattttggccttccaggccttttcttgcttgttggtatgcatatgtgtattaatttctttttacttccattcccacttctattcccctctgaatccttaggcaaacattgtagtatgtttgttcgtatcctttggtaggcactctttttaaaaacaattaaaataaaaatttttaaacaaccacaaacttacaaattcaaagaactattttcctgaaccatttgagggtgagttgccaacctctgatagtttcaccattcctctgaatattttaaagtgtatttcctacagacaagtgcattccacatcattataattattatcaacaattatgaagttaataattctcagcccccatttagttttgtcagttataataatgttcttcatagcagaaggatctggttcagagccaagtatttgcttttagttatcctgtttgtgtagtctctttcagcctgtaattgttccttagtcatgtcctagactttcatgacctttatagtttcggcagtacaggtcacttactttgtggaatctccttcaatttgggtaaattttccctatgttctttatattctttttaggtggtacatgattttgatttgtctcatttctggtgatgtccacttgggtcacttagaagatgtttgccaagcttctccactatcaagttactttttccttgtaattcatgagtattttgtgaggaggtgctttgaaactacataaacatcctattgctattgaacttctaatttattcatttatttatatctcaatggactcatctcctatttcattaaatgggtagtaatggtatacattcacataaagtgtgttttacatgcatgcatattacattggcataaatagtattattttaatatataactatataaaagtattaaaatattatctacatcgagaaagtcatatctagaagggtcaggataattatctgattggtagtaagactccaccgtaatgagataggtggggttcaacatatttaattaggccgggtgcagtggctcaggcctgtaatcccagcactttgggagggtgagggtgaggactgctgagaccaggagttcgacatcagcctaggcaacatagtgagaccctgtctctacaaaaaataaaaaacattaaccaggtggggtggcatgtgcctatagtcccagccacttgggaggttgaggcaggaggatcgcttgagtccgcgaggttgagggtgcagtgagctatgattgcaccactgcattccagcctgtgtgatagagcagaccccatctcagaaacaaaatttgatcacactagtgttatttctagctggcccggagttacaggaatccagctgcatgatccaaatctgacctggtcctagctgtggtttgctgccacctggtgacagttgtccacttgagtataaatataaatggggacaaatctggctaagactyccacacattggcagcaatttcaggtatggttagttgatgccaagttctttggcacaatcctgggagattgggcgaggagaatgctgtgaatgagaaagacccattctttgcttccttgctttctaagacaggtggcctattttcttcttctaggccttgctttgcctctgtgagggccatactgaatggtaggtaactgcgtttactgttctattgatgattttaattttatcttaagttttcttcatattaacaagtatggggccgggtgcagtggctcaggcactttgggaggccgaggcaggtggatcacttgaggtcaggagttcaagaccagtctggccaatatggtgtaaccctgtctctactaaaagtacaagaattagctgaatacagtggcgcacacctgtaatcccagctacttgggtgactgaggcatgagaattgcttgaacccaggaggcggaggttgcagtgagctgagattgcactgctgcactccagcctaggcaacagagcaagactctgtctcaaataaataaatgaaaattgtaattaatttttaacaaaggaaaaaaaagcagttaagatggaaggcccaactgttttagcagtaagagaaaccatgtggatgatttgtgtagaaactattttccagcacttcagaaatttgtttcaagtatttatttaaggcctactatctgtacttggttctgagtatgtaaaaatattctctctccctctgtctcaaaaaaaaaaaaaaagattctctcttctaaagcaagacttacctggctttaccttttctctctcttttttttttttttttttgagatggagttttgctcttgttgcctaggctggagtgcagtggtgcgaccttggctaactgcaacctctgcctcccgggttcaagcagttctgcctcagcctccygaatagctgggattatggcatgcaccaccatgcccggctaattttgtagttttagtagagacggggtttctccttgttggtcaggctggtctcgaactcccagcctcaggtgatccgcccgccttggcctcccaaagtgctgagattacaggtgtgagccaccgtgcccagcctatcttttctattttaattctattacatattcttaccattttcaaatttctgctgatttatttatccatccacaaacatcttaattctttctagatgtcagacgcagatgattaatcacagtcctcagttttatggcccatgttgtcattggtctgtgcaagcaaccttatttttgttacttccttccaattttttttttttttttttttttgagacagggtctctctctgtcacccagctgggaatattggcacgtgccaccacacctagataattaaaaaaaaatattttgtggagtccagatcttgctgtgtttctcaggctggtctcaagctcttgggctcaagccatcctagcacctcggcctcccaaagtgctgggattacaggcatgagccactgcacccgtcccctaatggtgtaacttttttatraattgttttaactgtgtcccacaaaatgtagtgttttgacaaagtttcttagtttcctttatttttctttttaacacgagtcacttagtatgttttagtttctaaatatattggttttttaacaaaactctacttttgatattaatatctaatttcattatatcatagttaatgtgatctctgtgatactggttatttggattttattgaggcttgctttatggctgtaaacgtgtacttgaaaagacttccttctttatctttgctgtgtacagagttctatatattgtctaattgttgagaatttttttttttttcgagacggcgtttcactcttgtcgtccaggctggagtgcaatggtacaatctcagctcactgcaacttccgcctcctggattcaagcgattctcctgcctcagcctcccaagtagctgtggttacaggtgcccgccaccatgcccggctagtttttgtattttttttgtagagacggggttttaccatgttggccagtttggtcttgaactcctgactttacgtgatccgcctgcttcggcctcccaaggtgctgggattacaggtgtgagccactgtgcccagcccagaattgttaattatattgtttagatcttcagtacttttatttttttctacatgattagtttctgagaagggagtattaaaatctgcaagtgcaatttttttttttttttttccaagacagggtctcactctgtcacccagactggagtgcagtggcatgatcacagcccactgcagctttgacctcccaggctcaggtgatcctcccgccttagcctcctgggtagctgggactacaggcaggcacccacctccacatttttttattttttgtaraagcagtttcactatgttgtccaggttggtcttgaactcctgggctcaagtgatccacccaccktagcctcccaaagtgctaagattatcaccatcaatgatgggcataagycwmcattcctggccatgatagttaattcrtatatttttctctgcattctctcatttgttacttgacatattttgttactgtaatttctaggtcacaaacatgcaggcttgtttgttatggttgtatcttcttgttttattattccttttagcagtacatactgcccctcatggcatttttttgtcttgaatttcattttatcagattgtttcttcagctttccttcagtttatttttttcctgtgatatttttctctcattttttgtgttttgtagataacattgttggattttggaacagatggaccaagaacttaaaataagcatgataatatgtttaagaaacttaggaattcagaatggtatattttatctggtttttgtccatctttgatacagttgtatgtactctttgagtgattaattattttggttcatgagtttgtttttcctggggttttcagctactctgtttggttatgtatattggggaaataatggaaatccaagttcgattcaagttcttgtctgcttctgagaggagggtgatccccaggcaacacaaaatcagcattgatcattcctgattgctgtcattttaccatgtaacaacactggacacagttgtactttgaaactcctagacagtagtggaaggagaccttcttttaaaattataatctaccagccaggaaacttgtaagaggaaaggctggaacagtggatgctgaggatggccagtcagcctgcatctgttttcattgaaaccttacagctaggcaaggtgcctcatgcctgtaatcccagcactttgggaggccaaggtgggcggatcacttgagcccaggagttcgaaatcagcctgggcaacatggcaaaacaaaaaatagctgggcatggtggcatgtgcctgcagccctagctgcttgggaggctgaggtgggaggattgcttgagcctgggaggttgaagctgctgtgagccgagattgtgccactgtactccagcctgggtgatagaacctgcctcaaaaaaccaaacaaaaccttatactagcagggctcttaccctgtcctggttttaccgtgtacacacttggcaagcaagggacagggaatgattttcccaaagcataaatgggtgagaaccaaggacaaaatgtaaatgctttttttcacccttccccacgtagccctcctactcccggtcagtcctcagcaaagcattattttctgaagttttttatttacttgtatcaatgtaatactgtatgtatatgtaattttaaaaattaaaaaactattaatactaggcttatgatgtgaaacagtagtttcttgctttacctattccctcccacatttcctctctctagtcttgtttgttttctggtacattacttaccactagatttctaaatagtgtgctcatattgctagttaatgatttttaaatttttagcattttctattgatttactattgtggaacatgagtttagctctttcataccactcagccttacctttaccaccattttcccttcctttatctttcccattatagtgatagcaatatcaagtgtttatgttattttaactatatataaatactatgttgactcttctcagttgtgtatgattacattacctttcttggaaaatcttttgtttttcctgaagttttctttttttttttctttccattttatgttgtttcctttgtcattctcatctgtaattccagattttctattagaactgtaaaacccctttacttctgtccttccgtccttccatccatccatccgtctgtccgtccttccatccatccatccgtctgtccgtccktccttccttcctttcacttttttttttttttttttttttgagacagagtctcattctgtcacccaggctggagtgcagtggctcaatctcggctcactgcaacctccacctcctgggttcaagtgattctcctgccttagcctcccgagtagctgggattacaggcgcgtgccaccaggccaggctaatttttgtattgttagtagagactggattttgctgtgttggcaggctggtctctaactcttgacctcaggtgatccrcccgtctgagcctcccaaagtgctgggattgcaggcatgagccaccctgcctggccccttatgagtttatatgcttttttttttattccccttactgtcactttagtagggtttcagaagacagtagagatgagtacttatgttcattctaatgttaaactgaaattagtgttgacttttatttatttatttattttgagatggagtctcactctgttgcccaggctrgagtgcggtggcactatctcagctcactacaacctccacctcccaggttcaggctgttctcctgcctcaacttcccaagtagctggaattacaggtgtgcgccaccacacctggctagttttatatttttagttgatggggtttcaccatgttggccaggctggtctggaacttctgacctcaggtgatccacccaccttggccttccaaagtgctgggattacaggcstgagccaccgtgaccaagtgttgacttttaaattttaaattagaaagtgttactatgataaactatacttgaaagtcatatttagttatctgtaggttaataacgttactgtagaataatgtagctgtgtgtgtgaaagagtggctgattagactggcatggttaacctttatgcttttaagtatatagaaattgacagattgttgaayggcatgtgaactgttttgcctatagttctttgagagtttattgttcatttgtccttttttccccctatttcttttttcagctaagcttcttaagatggaagttgttccttaataatggctaaagccctatgggaatatgttctttcatttattacaataagttagaaagtccttattactgtaaggccaagatgctaactttatgaggcaccagtttctcctaatggagagttttttcccccacctcacagaataatcgcatataataaaagctaatttacccactcctgaaggtaaaatacttactcactttcacatatctctatatagtacattactggatgatgtaaataacaattctcttttgttgtatcctgaagtaccctagaatcttctcaggaagagtaagttagattccgaaaggtagcttgccattatcaaaagatagtactccatactctactgtctcaggagagacaggagacaccttctgtcccgtctttacattctgatcagaaattaaagaaaataggaaggtagagaacartaagtgtattttrttaagcacttggttctttgaatatttgtaatctataatagagtatagatgttaattttttttttcctcagacggtgtctcactttgtcagccatgctggaatgcagtggcatgatcttggctagccacagctacgacctcccaggctcaagcagtcttcctgtctcaacccactaagtagctgggatgcaccaccacacctggctttttgtattttgctagagatagggttttgccatgttgcccaggctggtcttgaactcctgatagagctcaagcactccacccaccccagcctcccagggttctgggattacaggcatgagtcaccgttrccaggccaatattaaatattttaattagagtcagtgctaaatcattgcattctactctaggactatgccaggtaatagtgtattctctttacatttcagtttatggaggagtttgttttgttttgttttgttttgttttgtttgagatggagcctcactctgttgcccagggtggagtgcagtggcgcaatctcagctcactgcaacttctgctcccctgggttcaagcagttctcctgcctcagcctcccaagtagctgggattacaggtgcctgccaccacacccggctaatttttgtatttttagtagagacagggtttcaccatgttggccaggctggtcttgaactcctgacctcatgatccacccaccttggccacccaaagtgctgggattacagacatgagccaccatgtccggccggaagagttcattttaatattaaaaaatatatgctatgaattgtggtttctgagcagtaatgcatatactttgaaatcattaaacctttataaaatttttgttttcaaaatgtaattgttactatactctgtgtattttatctttgatagattaaaaatactctgatatctgctcaaagctgacatattcagaaatttatgaaaactaagctaagctgggaagcatagtttatattgaaatttgcttaggctcattgcccaagtttagtttggaatccctaacctgcctgatagttttagatccttgagaatatccctgttttaacatagtaggtcatattttcaaaatgcctacaagaatggtttatgtagagtattaaaatcttaagactgggatggactctgagatactatttttcattacatctttattttggaaaacttactagaactagtatttcccccctaaatagctgaaaatttttacagaagcattgttgtgacgttaggagccttgagactttaaatttctttgttttgtttttcagaataattttggattcaagaaaatatgatttggttatttaaatgtaggtttaatgtttaacatacagtccttgtggttatctaagccttttgtgtgtgtgtgtgtgtgtgtgtgtgtgtgtgtgtgtgtkagagagagagagagagagagagacaggatctctctctatgaccaggctggagtgcagtggcagtggtgcaatcagggctcactacagcttcaacctcctgggctcaagcaatctttctacctcaccttcccaagtagctgagaccacaggcatgaaccaccatgtccagctaatttttaaaatttttataaagacaaggtctccctgtgttgcccggattggtcttgaactcctggcctcaagcagttctcctgccttggcctcccaatgtgctgagattacaggtgtgagccaccttgcctgcccttttttttttttaaaaaaatagcattttaggagggcacgtttctcaagtaattatgtaaaaggaagttcttttgattgggaagaaaaccttcctgacaggcaaaatattgatacacaagcctcttttcctcctgacattttagccttttgtgtaagtttatgtttttattaccatcccctttcctctgattcctagttgctttcccctgacattttctgtcattaattaggttataagtggcagatacatttttggaagagactccagcatcctgtggtagtgacctgttactacgccctaccactctttggctgtgtaaaaacattgctgtcaataccttttcctttgttcattctttgaattcttgtgtgcttgaaatcagaattttcacagattcatggttgtatgacatcagattttcattttttgtttgactttatttgttttatttgtttgaattttcttctttctaggggtggtgtggtaaaatagaatatgagttaactcaaggcctggcatgttggttcacacctgtaatcccaccaattttgggaggctgaggcaggaagatcacttgagtataggagtttgaagccagcctgggcaacatagtgagatcctatctctacaaaaaaattaaataaatattgtgggtgtggtggcctgtagccctagctacttggaaggctgaggtgggatgatctcttgagcccaggagtttaaggctgcagtgaactatgatcatgccactgtactccagactaggtgacagactgagacaccccaccctccccaccccctccccacaatcgttaaccctgtgttaagtttttttttgtttgtttgtttgttttttgtttttttttttgagacggagtctcgctctgtcccccaggctggagtgcagtggcgcgatctcggctcactgcaagctccgcctcctgggttcacgccattctcctgcctcagcctccagagtacctgggactacaggcgcccgccaccacgcccggccaattttttctatttttttagtagatagggggtttcactgtgttagccaggatggtctcgatctcctgacctcatgatccgcccgcctcggcctcccaaagtgctgggattacaggcgtgagccactgcgcctggccaaccttgtgttaagttttaaaaagcaggccggggttggtggctcatgcctctaatcacagcactttgggaggccgaggcgggcagattgcccgaggtcaggagtttgagactagcctggccgacatctctacaaaccccatctctacaaaaaatagaaaatacaaaaatacaaaagttagccacgcatagcctataatcccagctacttatgaggctgaggcacacgaatctcttgaacctgggaggtggaggttgcagtaggtggaggttgcagtgagctgagatcatgccactgcactctagcctaggcgacagagtgagaccctgtctcaaaaaaaaaagtttgaacaagctagtcttcattaattagataatgggaaacaacagtatctgacagtcttctgcaattttaattttaaagggtttattttgtgtactttttcaaaagcagtaacatatttaaggtaaacttgaatgttttttgatggagtaaaatatggattgatgaaagtgttttaaatcttttcagtctgttgtttcttttccaaatgactgtccccagagataccatttgttgatccactttcttttttttttttttttttttttttaagacggagtctcacactgtcgcccgggctggagtgcagtggcacgatcttggctcagtgcaacctctgccttccaggttcaagtgattctcctgcctcagcctcccatgtagctgggattataggcgcctgccaccatgcctgactagttttttttatttttagtagagacagggtttcactatgttggccaggctgatctcgaacgcctgacctcatgattcacctgcctcggcctcccaaagtgctggaattacaggcatgagccaccgtgcccggcctgttgatccactttcatagttggtaataaaactttattgcttatcatttggtatgataaacaaccaaaagttagtgatttcgatgtcttccttattctcttttgcctttgccatcattataacctagacttttgctccttcatatctggtagtttaaccccattcggttgtcatacacacctcatatccagaacttctttcgttatgttagccgcctgcccaagaatttgggagtgtcttttcctgctggctaaattagacagaactgccaaagatagtatataggcaaactgctcatttcttttcttgtcaataagcttgatgtttgacatatatttctctctttggctgaattacatgccgtgtgctctcattttttcccactagtatgcacaaaaaaatgctatcctatattttttaaaagttgctgacacactttgcttataggagtggttttctagctaagcttctcagaatcctcaaaaaatctatgaatagtctggtaagtagtagagtatgtttcttctttttggcttgtgtcctttgcctgttttactgtagaagggtttgtctttatgtcttgatttagaaacactcatataacgctttgaaaaaaattttaaacatttcccccaytttgtggttttgcctttaacatataaacagtatgttttgttatatagaattgtttaacttttattttataaaattcatctattactttctttaaggtttttaatctttggtgtcatgcctaaagaaagtataccagcatggtggctcacatctgctttgggaggcctaggtgggcagatcatgaggtcaggagattgagaccatcctggctaacatggtgaaaccacatctctactaaaaatacaaaaaattagccaggcatggtggcacgcacctgtaatcccagctactcaggaggctgaggcaggagaatcccttgaaccygggaggcagaggttgcagtgagccaaaatcgtgccactgcactcctgcagcctgtgcaacagagcgagactccctcaaaaaaaaaaaaaaaagaagaagaaaagaaagaaagtacatgggtacatggtaagccgggcgtggtggctcacacctgtaatcccagcacttttggagcccagggcagattcatcacctgaggtcccagcctggtcaacatggtgaaaccccatctctactaaaaatacaaaaataagcagggcgtggtggtgcgtgcctgtaatcccagctatttgggaggctcaggcaggagaatcgcctgaacccgggaggcagaggttgcagtgagccgagatcaagattgcgttgccagtgtacttcagcctgggggacagagagaaactccatctccaaaaaacaaaaaaaaaaaaagtgcatggtagatttagtgtttttcgtgaaaaatttagaaagaatataattgatgtttattttgtatgttttggaattattatcattttaaacttatattaaggacattctaatatggggcaaaactgatggctaattttattgggttttgtttgttttttgagatagaatctcgttgtgtcattcactctgctggagtgcagtggcatgatctcggttcactgcatcctccgcctctcggattcaatggattctcctgcctcagcctcctgagtagctggaactactggcatgtaccaccacgcctggccaatttttgtatttttagtagagatgggatttcatcatggctcactgcaacctctgcctcctaggttcaagctattctcatgcctcagcctgctgagtagctgggattacgggcatgtaccaccatggccccgtttaatttttgtgtttttagtaaagatggggtttcaccatgttggccaggctggctttgaactcctggtctcaagcaagcartccttttgcctcagcctcctaaagtgctgggattacaggtrggagccaccatgtctggcctgattactaattttatctgctgatgttcatatatgtaagtatatgaggtgttaaagatacttcatcaataagggcagaaaaaaacggaaaggaaaaacttcttagcactagaatgtctttccttgtggtggaaagcagacaggccatgtagctttgagctcctgtgttcagaagatcagttacccaggatgtcttatcctggctgtcaaggatcccatttcttagattagccataacaaaccattcatgagttatatatatgtaacacatggtaataataatagaaactctgagagcccaaaatgctaaataattctattgttattaacaattgaatcaactatttaaaaagttgttatgaaagtaataacatactttgaaccttttcaactmttctggaattactcccacatttctaaatattcttaatttactttttaagagatggtgtcttgctttgtcgcccagggtggagtgtggtgttgcagtcatagtccactgctgccacgaattcctgggctcaaactattctcccgctgaagcctcctgagtagctgggactgcaggcctgccaccaatctcagctaacttttaattttttttttttttttttttgagacagagtttcactcttgttgcccaggctggagtacaatggcgtgatcttggctcactgcaacctccgcctcctgggttcaagcaattctcccgcctcagcctcccaagtaactgggattacaggcgtgtgccaccacacccgactaatttttgtatttttagtagagatagggtttcgctgtgttggctggctggtcttgaactcctgacctcaggtgatctgcccaccttggcctcccaaagtgctgggattacaggcgtgagccaccacgcccagccaacttttaaaatgtttttgtagagatggggtcttgacatgttgcccaggctggtcttgaactcctgggttcaagtgatcctcccaccttgacctcccaaagtgctgggattgcagtgtgagccactgtgcccaacttacttcctttctgtctgtctctctgtctctctctctatctatctatctatctatttttttaagacagagtcttgctctgttgcccaggctggagtgcagtggtgcgatctcggctcactcaccgcaacctccacctcctgggttcagcgattctcctgcctcagcctcccgagtagctgggagtgcaccaccatgcccggctaatttttgtattttttagtagagacggggtttcaccatattggccaggcttgtcttgatctcctgacctcgtgatctgcctgccttggcctcccaaagtgctgggattacaggcgtgagccaccacgcctggccttctraatattttaaatgccgtttttcatttttaaaatttctagtttgttgttaactatcatacttctactgtggaagatgagratttctctcattactgtaacaccccatcccataaacgtattcattagctctccatatttccagtagttatagttttaatttagactaattttcagtgtttacattaatataactatgtaaataatagttccggttgaaccatgtcatacaccattattaccttttctttcacatgtagtgtagtgttttgttttttgtttttgctggaattcctcttcatccctccacatttagtttttttgtgtgtttttttttgtttttttttttttgagatggagtctcactcttgttgcccaggctagagtgcagtggagtgatgtcggctcactgtaacttccacgtcccaggttctagtgattgtcctgcctcagcctcctgagtagctaggattacgggtgcccaccaccacactcggctaatttttgaatttttagtacagatggggcttcaccatgttggccaggctagtctcgaactcctgacctcaggtgatccacccacctcagcctcccaaagtgctgagattacaggcgtgagtcactggtgcccggctcacatttagttttctaatgtgcttatcagtaattcatccctgaactctgacagagtataaaatctctttaaatacacatggttatcatacttaactgaaatgtaattaacttttttttttttttgagacagagtcttrctccctcacccaggctggagtgcagtggcgtgatctcagctcactgcaacctccacctcccaggttcaagcagttctcctgtctcagcctcccgagtagctgggactacaggtgcctgccaccacgcctggctaatttttgtatttttagtagagacggggtttcaccttgttggtcaggctgatctcgaactcctgacttcaggcgatccacccgcctaggcttcccaaagtactgggattacaggcgtgagtcaccgcacccagccaacatttttaatttgatcaaaacatgtgaaggtagaaagttgtatgtgtcataaatatagcagttggtggattttcacacactggggcatctgtatatctagtcttcagatcatgaaaaaagaaaattgccagtactacaagaagccctttcttgtgttctcttacagaaccatcttcccatctcccaggataatccctatcctaatttctaacagtatgaattaattttgcttattcttgaatttcataatagagtcatactctttattcataggagttctttatatactgtgcatattaaatcatttgttggattgtgtatgtgaatccacatacatgtattgtgaataacttcttccactctgtggcttgcttgttccctgttttaatgattttttcgatgaaacagaagttcttggttttaataaaatcagaattatcaatgttttcttttatggatattactttttgtgtcctattttaaaacttttgtcccctccaatgtcctaaatattcctggtttttttggtggtaaagtatatataacataaaattcaccatttcagtctcaatctgctgaccttgtgatctgcccgcctcggcctccaaaagtgctgggattacaagcgtgaaccaccgtgcccggccataattttttttattttttgaatctcttttgtgtcaggcttctttgtcatatatgttgatgtgatttacccacattatgtgtagttgtagatcatttgttctcatgctaggtagtaatctataaatgactcttccacttcatccattctcctattgagggtcatttgggtagtttcagattttgtctgtatgtatattcctatttatgaacatttcagtttttgtattttggtgaaaatatttattaaggagtggactttttgaaccttaggctacatatatgtacaggtgtagtaagattgccagttttctaagctggttgtacctgttctgcattcctataagcgctatatgagagttatggtagttttgcatctttgctagtctttttcattttaggtattttgcttttaatttgcatttccttgatgactaatgatgttgaacaccatattaactgaatttatttactggcatttagatatcctcttttgtgaaatgcctgttcaagtcttttgctcactgcaagctctgcttcctgggtacacgccattctccttcctcagcctcctgaatccaaaattagctgggcatggtggtatgcgcctgtactcccagctacttgggaggctgaggcaggagaattgcttgaacctgggaggtagaggctacagtgagctgagatcgtgccacgatactccagcctgggtaacagagcaagacagggcctgccaagtgccagccacctcagtggagggtcagtcaggatggtggcccctgtcctctcagcaccctgttcttgttcggtgtccaggaagaatcagctcacacgaactgtttgaaaggtgatgaatgcagaagactttattgagcagtgggtggctctcagcggaaagggaggctggaaaggggatgggaaggtgatctttccctgaagctgggctgtctctggcaggcccctctccgaagccgcactgtctgaagatagccgaatttttcctatgctcagctgcttgtatccttgacactcagccgcttgtgttgctctgccagctgaagtctttttatgggcacaggataggggcggggcaggccaaaaaggcaacatttgggctgaaaaatagggtcagctgttttcacttaggacaaacttaagggtggggcttagccaggatcccagcctttcygtcagtttgaccttaaaacctgcagcacattatatagccttactaggggggatgtgtgtgtgtacacacacttttttttcccacatactattattgaacattttaaagatttgtagttggcagacttttgacactttgagcaagttaataagaaagcatgttttaaccacccttttcttggggttgcgctgctgtccaaggattgcataacaagggcagcactgctaatgcctacacaacactcccgcctcagctagagctttgctttaccttggtgcaatttttggaaaaatgaaaacctgctctaccctccccccaaaaaatatgtcttgattgcttttgctgatgttatgttggaaacatatcctatggcagatgtgatctgatgacgtagcagaaaaactcagcagtgggaatatcctcatttcacactaaatccaggcacaaatccaaatacaacagtaaccactacatttgccatcagctgagctattaccaagtacaattgtatttaggactaggaaactttttcacctacttaatagtatgttaataaataggtagcaggaataattgggatatatttcattattcatatgtaattgttttttggccaggcatggtggctcacgcctataatctcagcactttgggagactggggtgggtggattgcttgagcttgggagctcaagaccagcctgggcaatatggcagaatcctgtctctactaaaaatgaaaaaaactagttgggtgtggtggtgcaggcctctagtcctagctgcttgggaggctgaggtaggaggattgcttgagcccgggaggtcgaggctgcagtgagcccagattgtgccactgtactcccgccagggcaagagaccctgtctcaaaacaaacaaaaacatgtaattttttttgtcattgctgaaattccatctgaaaataattagtaggataacaaaacttatttaatactgcacattgggggttacctaaattttgctccaagtcagtttatacttggttttacmtagttacatatacaatgttttatttatttatttatttatttatttatttattttgagacagagtttcgctcttgttgcccaggctggagtgtaatggtgcagtctcagctcactgcaatctctgaggcctcccgggttcaagtgattctcctgtttcagcctccctagtagctggaattacaggtgcccaccaccacacccggctaattttgtatatttagtagagacggggttttcaccatgttggccaggctcgtctggaactcctgacctcaggtgatctgcccacctcagcctcccaaagtgctgggattacaggtgtgagccaccatgcctggccgggacataatgttttttaatgactttttgcttatgcattttagggtacatctttgcctagatattttttatttttaaattattttttgttttgtttttgtttttttatttttttgagatggagtttcgctcttgttgcccaggctggagtgcaatggcgcgatctcggctcaccgaaacatccgcctcctgggttcaagcgattctcctgcctcagtctcctgagtagctgggattacaggaatgtgctaccacacccagctaatttttgtatttttagtagagactaggtttcacyatattggtcagtctggtcttgaagtcctgacctcgtgatccacccgccttggccttccaaagtgctgagattacaggcatgagccactgtgcccagccttatttttatttttttgagatcgaatctcgctttgtcacctaggctggagtgcagtggcacactctcggytcattgccacctctgcctcctgggttcaagcgattctcctgcctcagactcctcagtagctggaattacaggctcatgccaccattcccagctaatttttgtatttttagtagagatggggtttcaccaagttggccaggctggtctcgaactcctgacctcaggtgatctgcccacctcggcctcccaaaatggtgagattacaggcgtgagttaccatgcccggcttttatttttataatgtactatgtttggggagaataggaaaccaaggaaagttatgatgagggtacattaaattaaaaagaggatcttgggaggagccaagaartatgagaacgagtgagtagaaaagttagagcattaggagacagtgaaattggagaaccccaggaaataaagtggttcaagaagacaaaatgataaatgggaaaatgctttttggtagtcatagatgactggaaaattatctactcctcaataaataggtcatatgcatttatgtctatattttcttaactgttaatttcacaactgagtgaagtgatacagttagctcaatggctgacatatagtaagcacttaatgagtattatttatcactacttggatctgtcattgttcacttattycctcaatatagaaaactgagagttgtccttgaatttttctttctcctcaatcccaatattaaatcaattacagagtctcattgactatacttcctgtgtgtctcaaaaatacgttttgtgtttattccaactgcctctgtctttgctcacatgtgtaagcctttctgcattatttttccctttgcctgtaaggtccctttcaccttggcctcaatacttggctcaagtagtacccctttgtaaattttacctgaatgtctcagccagaattaggcatttatttcactgtgctctttaagcaactartagagatttcatttgaggcacttaatttgtaatcatttatttgcatgcctgtcttttaattaaaacatagccattcaggcatagtgttctaaatatgtttatttcctacctcccatattggtacatggtaacatgtttggttttcagttaacaatatgttgagaaattgaataagtgaaaatatttacataaatagtgtttgtataactaaaaataggtgtctgatgagttcggtgatttcattgagggtacacttagtccattgtcagggtgagttgaaactttaaaaattaatttaaataggatatgcttgtgagtggttcaggcattttagggagaacataygtggtaatggtacagaaatgtattttggaggtacttgttctttttatttatttatttttaattctatttgcgatggactagaggaagtacttgttcttatgagtttgcgtattagtcaaaaaagatgtaaggagttgcccgaaaaagagcctctcaagattgtaattaacttctgtaacaattgcttctattgagtgacgtctcagattcatttccgtatttattttttttgagacggagtctcgctctgtcgcccaggctggagtacagtggcgtgatcttggctcaccgcaacctccacctcctgggttcgagcaattctccagcctcagcctcctgagtagctgggactacaggtgtgtgccaccatgcatggctaattttttgtatttttttagtagagacgtgttttcaccatgttagccaggatggtctccatttcctgacctcgtgatccgcctgcctcagcctcccaaagtgctggcattacaggtgtgagccactgcacccggcctatttcctgtatttcttgagacagctgatatataggtcaaatttaaaactttacctcatgaataatttttttttaattaaagactatttttttagctgggcatggtggctcaagctgggattacaagcatgaggcaccatgggagactgaggcagggggatctcttgagtccaggagttcgagaccagcctggggaacatggggaactatctctaccaaaaaaaaaaaaaagttatccaggcgtggtggtgtatacctgtagttccagctatttgggaggctgaggcaggagattcacttgagcccagaagattgaggctgcagtgagctgtgatcatgccatggcactggtcttggtgacagagtgagaccttgtttcaaaagaagaaaaagaccctctttcagagcagtttttaggttaacagcaaaattgagaggaagttacagatgataatttttttaaatggtaaacttcaatatttaaaaatcgaggcaccaggcatggtggctcacgcctgtaatcccggcactttgggaggccaaggcgggcaaatcacctgaggtcagaaggtcaagaccaacctgaccaacatggagaaaccccgtctctactaaaaatacaagattagcagggcatggtggcacatgcctgtaattccagatactcaggaggctgaggcaggagaatcgcttgaacctgggaggtggaggttgcagtgagccaagaccgcaccactgcactccagcctgggcaacaagagcgaaactccatttcaaaaaaaaaaaaaaagatttggtgtgtgtatgaatttggttagcagataacgctttagtacacttgcttaacggtttcagaaataaatggttaagatttcatatcaggccgggctctgtggctctcacctgtaatcccagcactttaggaggctgaggcagatggatcacttggggtcaggagtttgagagcagcctggccaacatggtgaaacctcatctctactaaaaatacaaaaattagctggatgtggtggcaggcacctgtaatcccagctacttgggtgggtgagacaggagaattgcttgagcctgggaggtggaggttgcagtcagcagagatcacgccactgcactgctgcctgagcgacagagcaagactccgtcttaaaaaaaaaaaaaaaaaaargatctaatatcatagatactactttaacttaattaaatggacctgtaggtaaatgaaagtcatttttctctttaattttgtgctgctgtttttttcccccaccccttagcacagcaatggtaaaatgtctcctaggtcatttagggctggacagccaactgtgacttctagatataatgaactattactaagttattatttttacagtttaacagatagcatgattaagcaaaagtttattgataacttgaataaaaggttactgcagaaagaaccagtgcttatgtatatgcactgtataactgcaaagtaaagatgataattccatatgtgacctaaacataagactccctaaggctatsaaacttcttaaggaagttcagttataactcatagatttcatatgtacacaatttcgaatgaaaaatatcctgtaatttatattaaaacttttttggggaggggccaggtctcgctctgtcacacaggctggaatgcagtggtaccatcatggctcactgcatacttgacctcccaggctcaagcggatactgccacctgagcatcctgagtggtcataggctcaagccatcatgcctggctaagttaaaaaaattacggtgtgtgtggagacggggtttcaccatgttgtccaggctgaacttgaacttctgggctcaagcgatccgcctgccttggcctcccaaagtgctagggtttcaggcatgaaccagccactgtgcctggcctaaatttttttttyttttttggatggaatttcgttctgtcacccaggctggagtgcagtggcacgatctccgctcactgtaacctctgcttcccgagttcaagcaattctcctgtctcagccgcccaagtagctgggattacaggtgcccgctgccatgcccggctaatttttgtatttttagtagagatggggtttcaccatgttggccaggctggtgttgaactcctgacttcaagtgatctgcctgcctcgggctcccaaagtgctgggattacaggcatgaaccaccgtgcccagccttaacttagtttttatattttcaaacttaattgagtgtatcattccagatgtcaattttcagtgcaaagtaggcatagaccattgtatagaagattcacaagtgaaaaatcttcttttttcagttwataaaaataataacatgtttattatatcagtcataaagaagttacaaagttctttaaatgccccattcttcctccgttgccctctgttcctgagctgatcattgttaatggttaggaatgtgtcttttcagtctttttaaatatatacataatgcatatgaagaaatatatatgcacacattgtttttatatatgtatatatattattattatttatcctacccgccccctcctccattttattttgtaattaatttctacttttcatttcatttgtgaaaatttcagaatagttttttgtttgtttgtttgttttgagacagggtctcgacttgtctcccatactggggtgcaatgtcaggatcatagctcactgcagcctgggttcaagcaatcttcccacctcagcctcttgagtagccaggactacaagtgcacaccaccatggctagctaattttaaataatttttttgtagagttgggggtctcgctatgttgctgaggctagttttgaactcctgggctcaagttgatcctcccgcctcagcctcgcaaggtgctgggattataggcatgagccactgtacccggcctcaaaatgtatttttaaaatatgttttgttttacctttttttttttttaattggccaggctggtctcaaactcctgaccttgtgatccacctgcctcgacctcccaaagtgctgggattacaggcgtgagccactgctcctggccaagttttgttttactttttaaaaaactttaaatgaaaattactacagcaccaactaaataacatgtatttttgagacctaactgtaatactattatcacaactataaaagctcataattccttaatatccagtcaatgtttacatttcccttgttctcataaatttagtttgttcaaatcataccctgaaattactaagatctataatgggtaagagcaaattttctaatatattgaactttattttcccttttacttcttgtggaaaatactttaatatttattaatgctcctcaatacaatgataatgatttaacctttgatttgatgatttaagattatcttggagccagtcgtggtgccacacccctgtagtcccagctactcagtaggctgaggtgggaaaatcacttgaggtcttgagtttgggcaacatagtgagaccctgtctctaaaaattaaaaaataattgtgtcttgggatccatttttgaagtttctcttaaaatttgtatatgatcctcatgataactccctagggtcagtgttttttgccattttacataaaaaggaacttgaaatccagagatttaaatgagttgacctaaggtcagaggcctagcaaagacaatgcttagaattgtgcctgacaaataaaagatagaaaaatgtaaattaaatagtcaagaatcatgccagggctacaacacagggctactgattctagtaccttcccttcttcttttaaaatcattatattgttctgtgaatataactgaaatggtatgagatcttatattcatatgttaatagcaagttatatcttatttcataaaatttcaaaaaggraagaaatttcagtgacaagttggctgaagtaggagtattaaatatgtgtatgaggtaatacataggtaactataggtcaccatatacatgtgaaatagtatgtttaaatttttaataagggctgggcatggtgactcacacctgtaatcccagcactttgggaggccaaggcaggtggatcacctgaggtcaggagttcgagaccagcctgaccaacatggtgaaaccctgtctctactaaaaatacaaaaattagccaggtgtggtggcatgcgcctgtagctactcgagagactgaaacaggagaattgcttgaacccgggaggcggaggttgcagtgagccaagattgcgccaatgcactctagcctgggcgacagagcaagactccatctcaaaaataaataagtaaataaacagttaataaggttctgaaaaataagtaaagtaatagagatagagataaaattgtataattgctcagggaagcattacagcaggatattccccctgaatgttaacttcagctgaatagttgaggattgtaaactccgctgaaggagttcttagtacaatttaaatagccttaccagaagcacaccaaccaatgttacctcttctagtggtaatgtaagcatactttaggcatgatgctttaaaaaaatcaatcataaggccgggggcggtggctcacgcctgtaatcccagcactttgagaggccgaggtgggcggatcacgaggtcaggagatcgagaccatcctggctaacatggtgaaaccccgtctctactaaaaatacaaaaaatgtagccgggcatggtggagggcgcctctagtcccagctactcaggaggctgaggcaggagaatggcatgaactcgggaggcggagcttgcagtgagccgagatcgtgcyactgcactccagcctgggcaatagcgagactccatctaaaaaacaaataaaataaataagagttcgagaccagcctgaccaacatggtgaaaccccaagtgtactaaaaataacaaaaattagccaggcatgttggcacatgcctgtaatcccagctactccagaggctgaggcaagagaacagcttgaatttgggaagtggaggttgcagtgagctggacaacagagcgaaactccatcttaaaaaaaaaaactacttctagaataaagtcaaaagggtcacattaaaactacttatgattgaattttttttttttttttttgagacggagtctcactctgttgcccaggctagagtgcagtggcgcgatctcggctcactgcaagctccgcctcccaggttcatgccattctcctgcctcagcctcccgagtagctgggactactggtgcccggcacccatgcccggctaattttttctgtttttagtagagatggggttactccttgttagccaggatggtctcaatctcctgacctcgtgatccgcccgcctcagcctcccaaagtgctgggattacaagcgtgatgaaggtagtatttttaaaagattatatagtagataatggtcaaaaagctgaaagttcaagaataattcaaaatattagatgcttagagaaaatacagaaaccccattaatactactaaccaatatttattaagatttaagtggaatataattaggtttggtaaggctctaagaaaactaattccataatcatcaaggtcttaaggttggtattaatctttccagttgtcttatctaaagctggtagtattataatctaagggcaagtaggtaaaagaggtaaaacagtgaaaattagcaatatataaaacagccttcatgatttttgcccctctctgtctgtctgtctgtctstctktctctctctctctctctctctctctcccactctccctccgtctttcctcagcctcctgaatagctggcattacaggcaactgccatcacgcccagctaatttttgtatttttagtaagtgatggggtttcaccatgttggccaggctggtcttgaactcatgacctcaggtgatccgcccacctcagcctcccaaagtgctaagattacaggcgtgagccactgcacccatccacctatttatatttttatatcttttatttgtcaggcacagttctaaacattgttcaagcattacctcatttaatcctcatacaaacgcattaaataagtactattatcccctttttactggtgaggaaactgagatataaattaagtaattgagcaatacgcagcggctcacatctgtaatctgtccaggagaacgatggctgtttggaccagtggcccaggtccaaacttactgagtaaagtaatttactgaggcagttgtaagtaaaggaaggcaggccaggtgcagtggctcacgcctgtaatcccagcatttagagaggctgaggcaggaggatcattgagcccaggagttcgagaccagtcttggaaacatggtgaaaccctgtccctacaaaaattaaatgaaaaattagccaggcctggtggtgcacgtctgtagtcccagttactctggagactgagatgggaggatcgcttgaatctcggagatggaggttgctatgagccaagattgcaccactgcactccagcctggttgacagagtgagaccccgtctcaaatttacaaaaaaaaggcagatttattagagaacataggaaaatacattgcgagggatgccagcagcctgccagagagaagccaactgcagagaaacaaaggcttggtagagattttataggatagtgtttatgctgtatgctgaagagggctttgtggagtactgaaaatgccaaggttgcagtgagctaacttgcaggtgtgtggtgatagttgggcacaggaagattgtgagttatttacacaggaggacttatgtgtcctggacgatgaagaaaggctgacttgtggcttatctgctttcttttattgcttttccctcggtcccactagcctgactcctttcccctaattaggactacacagagtacccagcattttaggaggccaaagcgggaggattgcttgagcccagaagtttgagaccagcctgggcaaagtggtgaaatctttacaaaaaatcaaaaatttagctgggcatggtgtcatggcctgtggtctcagctgctcaggaggctggggcaggatcgcttgagcctgcgaggtcaaggctggcagtgatccatatttgtgccactgtactctagcctgggtgacagcataaccctgtcttaatcagtcaatcaatcagtcgatcaatataaattaagtaagggtcgcttaagataacagctgagttgtagagtcaggattcaaacccagatagtcctggcttcttgagtcagtgttctttactgctatctgtgctaccttttattatattggtgcatatcatctattctacataaattttcatgcagcactgcaaagatttctcttagtaccctaagtaatcttaacaagacttttttctgagacagggtcttgctctgtcacccaggctggagtgcagtggcgtgatcacagcttactgcagactcgacctcctgggctcaggtgattttcccacctcagcctcctgagtagctgggattacaggcaygtccaccatgcttggcgaatttttgtattttttgtagagatggggtttcaccatttgcccagactagtcttgaactcaagcaacctgcccacctaggcctcccaaagtgctggaattacaggcacaagccacggcgcctggtcacaagacttttttttttttttttttttttgagacgatgttttgtttaattgatttctgcttttatgtcagttctctttcttctgcttgcttctagtttaatttcatagtctgtcctttcctctttattttgtttgtttgtttggttttgtttttttgagacaaggtctcactctgtcacccaggctggagtgcagtggcaaggttatgattcactgcagcctcaacctcccaaacttaagtagtgatccttctacctcagcctcccaagtagctgggacctcaggggtgcaccatcatggctggcaactttttgtattttttgtaaagatgaggtcttaccatgttgctcaggctgccctccaactcctgcgctcaaggaatccacccgcctcggcctccctaagtgctggaattataggtgtgagccactgcacttggcctaattttgtatttttctcatttcttaagtagaagcttatattattgaaatgagacctacattttttccagtgtaggcaattctaaaaatttctatttgagtattgctttaggtgtatgttacagattttcattgtcatttttttcatgttcaattaaacaattttctaagtaactttgtggcttcctctttatactgtgatttgtacagttacgtaatttccaaatgtttggggatttactaaatatctttgaatttagaaaatcagaatttctagcttaattcattgtggccaaagaatatgctatgtattatgtcatttctttaaactttgtagatagatgttgtacgttccagaatatggtatgtcttggtgcgtgttctatgtgtccacaaaaataatttgtatgctgctgttgttcagtggcatattgtcttctatatccttactgagtttttgtctccttgtactttaaaccaggggtgcctacccgatactgatctggtrcaactctgtggcctgttaggaagtaggccgcacagcaggaggtgagctcagcctccagtcagatcagctcaggcattagattctcaaggagtgcgaaccctgttgtgaactgggcatgtgagggatctaggttgagtgttccttatgagaatctgactaatgcctgatgacttgaggtggaacagtttcatcccgaaacacccacctcactacccttcccactcctccgccctcttgtccatggaaaaattgtcttcaatgaaatcagtccctggtgccaaaagggttggggactgctgctttagactgttgagagagaagtgatgatatcttcaactgtaattatgcatttttctatttttccatttggtggcaaaagtttttagttacakcattttgtgttctaaagctctgttgttaccagtgcacacacagttaatattatgtcttctttgtgaattgatccccttatgaaattaccctctttatctgtgataatattttttgttctaaagtatactttctctgttattcagatagccactccagctttattaactaatctccagttagtttagtttagatttcaccagtttctgcactaatgtattaattaaggtataatgcatataccataaaattcacccttttaaagtatatagttcagtggtttttagtatattcagatggttgtacagccatcaccaccatctaactccagaatatttcatcatctcaaaaagaatccccatactcattagcagtcactctgtattctcctgtgcctccatatcatcatcttatttcagagtccagttcaggatatcacactgtatttagttgtcccgtctttttagtctcctccagtctttgatgatttctccgtctttcctcattttttgtgaccttgacaatttttgaagaggatgggtcaggtttggtagaatattcctccatttgggttatctgatgtttttctcatgactagaatggggttatagattttgggggaagaataccacaaagatgaagtgccttacttactacatcatatcagggaggtcatgataccaatatgatttactgctagtgatgttaaccttgatcacttggttaacatgtctgccagatttctctacggtagagctactatttctttccatactttattgttagaaagtgagtcattaaatccagcccacactctaggaaaggggaattcaacttcaccacctgaatgtggattatgattatttgtagtactactgtaaggaagatttgacccttctccaccagtatttttccattcagtaatacttatcagtatgtactcatttatatttatttcatattttgggtaacagtattacattatgtattttgtagcttcgattattctagttttggccattaggagctcttgcagtttggctcctatgctgttttgaaatactccaatttgttttctttagcacttactttttggcattataagatgctctaggcttgtcttttatttttcctgccacagatctagaatcaggtgtttcaccaaagggccctggttccttttattgaataatgatattttatattattttatttatcttttgagatggagtctcattctgtcgcccaggctggagtgcagtggtgcgatctcggctcactgcaacctctcctgcccgggttcaagcaattctcctgcctcagcctcccgagtagctgggattacaggcacctgccactgcacctggctaatttttagttttactagagatggggtttcaccatcttggccaggctggtcttgaactcctgacctcgtgatccacccgcctagggctccaaaagtgctgagattacaggcgtgagccaccataccggccaaataatgatattttagaaatcaagatctttgagggacctgggtgtttgggctccagccttttttccccctaatcagctttattgtgattttaatgcatatgtcatacagttcacccattcattaaagtatatagtttagtggtttctagcatattcacaaagttgtgtaaccatcaccaaaatcaattttagaatacattttgtcatctgaaaaagaaaccttgtgccgaggatagtggctgatacctgtaatcctagcactttgggagtctgaggtggacggatcacctgaggtcaagcgtttgagaccatcctggccaacatggcaaaaccccatctctactaaaaatacaaaaattagccaggagtggtggcacatgcctgtgatcccagctactcgagaggctgaggcaggagaatcgcttgaacccaggaagtggaagttgcagtgagctgagatcatgccactgcacttcagcctgggcaacagagcaaggctccacctcaaaaaaataataataataattttaattgtgtcccatttctttttacttttgttccttgtgtttttggtgtcacgtgtacaaaacttagtgaatgcaaggttatgaagatttacacctatgttttcttttaagaattttatagtttctctcttatcttagtcctccaattcaattcattgttgacactgtctacctggagataacatcagattctataggttaaggactcagtcccacaagaaagactgcctccattttggatgcctatggcagacctatactcctgatgaatcagctataaattgggatttccactactcccccttaaaagaataagatcaataaggccgagtgcggtggctcatgtctgtaatcccagcactttgggaggccgaggcaggcagatcacgaggtcaagagatcaacgccatcctggccaacatggtgaaaccccatctctactaaaaaatacaaaaatttagctgggtgtggtggcatgcccctgtagtcccagctactcaggaggctgaggcaggaggatcacttgagcctggaggtggaggttgcagtgagccgagattgcaccactgccctccagcctggtgacagagcaagactctgtctcaaaaaaaaaaaaaaaaaagaaataaaaaagaataaggtcaataaattgacctatcttcaaattcactattttttctacctgctcaaatctgttgctcagcacttaatttttttttttaatttcagtttttgtacttcttaaatttagtcatcaaaaggaatgaacaggccagctgtggtggctcacatctgtaaatcccagcactttgggaggccgaggcgtggggattgcttgagcccaggagttcgagacccagcctgggcaatatgatgaaacctccagccccacaaaaaaattagctgggcttggagatgcatgcttgtagtcccatctactcaggtggctgaggtgggtgaattacttgagcccagaatgtcagggttgcagtgagctgtaacccagtgtactctgtctagcctgggtgactgacagagcaagaccctgtctcaaagaatcaacagtttttgtacttaacaacttaagaatctctctctctctctctctctctctctctctctctcttccccctctcttccccctcctacccccaacccctttattttttctttttctttctttttttttttttgagacaggctcttcctctgctgcccagccctgagtgcagtggtatgatcatagcccactgcagccccacctcctgggctcaagtgatcctcccacctcagcctcctatgtagctgggaccacagacaccaccatacccgactgatttttaaattttttgtagagtagggtctcgctaccttgcctaggcttgtctgaaattctgggctcaagggatccacctgcctgagccttccaaagtgttgggattacaggcatgagccaccactttttgtggatttttaaaaataatttatctcattattgatattcagtatttatgggtgaaacaccattctcatgctttcctttaagttctttagccatgattttctttagtcctttgaaatgtttaaaggtttaaagataagctgatttagtctttgcctagtaacttgaatacttaggtttccagtttctattgattcttttttttttctcctgttgtatggaccatactttgttcatagcttgtaatattttgctgaaaactagaaatttaaataatatacagtggcacctgcaggaatccaattctcctcttccccagggtttttgttgttgccattgctgctgctgttgtaattactgttgacttcttttacctaattatataatgtcgatattattgttatgtgtggccagtgaattctccactcagcttagtggtcaggtaatgattgaacagagatttccttggttttctagaaccagttagttagctggaatttgtagagaggctctgcgtatgtgtcattgcatgtcttcaacttaattcagacaggcatttgcaaactctttactttcttgttgtatacattctcaagttaagccagaggtataaagttagggccttcttagggctttcctgagcatgcacatagtgctgggcatgtgcatagctctacacattgtcatggtattatagactcacaataatttgtcagagcttttcagaaccataatggacaactcttagcccagcccagcttttccttaacgtttttggttagtctgttttgtattttccactgcctcaggtacctttaagattaaatagttgcctgccattgttttcaacaaagctgccagggaaaatgttttcatattggccaagctccaaatccaatcatatgtagacagccttgcaagtggagttttctagggaaccattagaaaagtaaacttaatgacaattctctgggagtaaggctttggcgaaatgccagcccattctatcctctccagggcctgtcagcttccttggtttttactttgaatgtgttttaaggctgctgcacagctagagtataggagattggattagggtaagttaaaatcacgtagcttgatgttcttactgaatgtcagccattttctttaaatatctactccttgaattgttgcaagcctctggttattttctggaattctgaaaatgatgcttataatttttggcaattttcccattgcttttgtggaagagagaacttttcaggttttctggatttcttcatatataaaatacggggatactgcaaaggacgttcactgcagcaggatttgtaacagcaaaggtgtgagaaacaacccaaatgcccaaaataaggaaatagttttataaaatggttcatgtaggtatacatttgatggagtataatgcagatactgtcagtcatccatgtaaagagaatattttatggtgtaaaaaaaatgtttacaatgtgatacaggtgaaaaaagcagaatacaaaatacagtatgttgaagtttttaaaaatacgttttgtaagggaaatcagcaatgtcagcatttattatttctgggtgatagaatgacagttaaattatgtgagtaaaaagaaaaataccgttgttccatattgtgtactctaaaattagattattttgttataaaaataaaatgtacagagtactgtttttcacttgtgaggcaagttaaaattatatttatgtatgtttgtgtatgtgagtgagtgtgagttttggtgacttaaaatagccttttataggggcagggcacggtggctcacgcctgtaatcccagcactttgggaggccgaggcaggtggatcacaaggtcaagagattgagaccatcctggccaacatggtgaaaccccgtctctactaaaaatacaaaaattagccggacgtggtggcgtgcacctgtagtcccagctactcgggaggctgaggcaggagaatsgcwtgracctgggaggtggaggttgcagtgagctgaggtcacgtcactgcactccagcctgctgacagagtgagactccgtcttaaaaaaaaaaaaaaaaaaaaggcttttataaatatttgaaggggtgctgtaagaacttactaatgaccctggcactggggataacaaagtatgtctgagctactttaatctcaagagtttactctatgaaaggagctttgtttctgtggcgtgtagtagggtgaattattaggcagatgaataagttatagtctcatttattagcatttcattttttttcttttcaggcgcatattaaatttcctattgactacccctattcaccacctaccttcagattcttgaccaaaatgtggcaccccaacatttatgaggtaaggagacatccatcataaatttctctgaagattttttttttwaaatcagtactttaaaatagcctatctcagcacactttgatacttaggcttttgtagccatagagaaatattaatgattttgcacttcagttaacagtttctggattaattatttaacattagtgtagttttataatatcctgtgtatattctacaggataaaggataaagtaaaggatttgggctttagacttttgctgttcattgctagggttataatacacatgtctttaacatgtgcatttaaaaatttagtagataatgtaatataaatttatttgtgtgcctatcctctaacttcacagcaagggtcacctgttcctatgggtgagagattcagcttttggtagggggagcgggatttatcccattacatttggactggcctccttttaggaattgctgctgaacatttgggaggctcttttggaataaattcaaggtgaggttcttgtactagacaagtgcacatgcctgggggaagcatttctagctttgttgatgaaacgtacttagctttgggctaatccataaggatactagaataatgcattctgtttctcaggttgatatatgagggcccgctagtttttttcctttgaggctactcttcactattctataagtgtgcttttttgtttgtttgtttgtttgtttgtttgtttgtttgtttttgagacagtctcgctctgtagcccaggctggagtgcagtggcgcaatctcgctcactgctacctctgctttccggctcccagttcaagcagttctcctgcttcagccttccgagtagctgggattacaggcatgcgccaccatgcccagctaatttttgtatttttagtagagatggggtttcaccatgttggccaggctgttcttgaattcctgacctcgtgatccacccacctcrgcctcccaaagtgccgggattacaggcgtgagccaccgcgcctggcctactattctaaaagtgtgtttttaaatmtccaaatgttttggggattttgcaggtatctttctgttaggaacttccagttaaattccgttgtgatctgaaagcagacattgtatgatttctatttttaaaaatttgtcagtatgtgccttatggcccagaatgtggtatatcttcatgaaagttccatgtgaactcaagaacaatgtgtaatctgcagttacgagtgtagtagtctataatgctcattatatacacttgaagaatggtgttgctgagtccagctatgtctttacttattttctgcctgccagctctgtccatttcaaaaaacaaaaaaacaaacaaaaaaaaattctgtaatcttttatttgcaatatggttttgcagtggtctcattttttcgtagcagcatcccaagcattgaaattgctttagagtcttgccatcttagtcatgcatcagttcttttttttggccctgtggatgttggaagtacctttgctccagaaactgagctaacatcacctttaaattacttttattttatttatttatttgttatttgagatggaatctctgtcacccaggctggagtgsagtggtgcgatttcagctaactgaacctccacctcctgggttcaagcgattctcctgtctcagcttcttgggtagctgggactacaggtgtgcacgaccacacctggctaatttttgtatttttagcagagacagtgtttcaccatgtcggccagagtggcctcgaacttctgaccccaagtratccacctgccttggcctcccaaagtgctgggattacagggtaagccaccatgcccggccacctttaaattgcttttaggcaagaaatggagaactcgctctagggtcttgaatttggagttcattctgtataaatgagcacattggggcagctgtgtcattttccacagtctgtttcttatgtaagatatcttaatttttctttttcagacagaacagactggtactgaaatgatatatagttttctttttagaaataagctttctaaatattgtttaatatttgacataatataaataaacaatagtgactacactgttctgtgtaacaacattatcttccttttgtaggaaagagtctgtagaaataattcattgtttcctaagttcaaactgagttcagtacgcacagcagtattttggtgtctgtcttagtacatttgcttagactggataatatattaacaacagaaatttattgctcacaattctggaggctgggaattccaagaccaagccaccagcacatttggtctgttgagggcttgtttttcaagcctgttttgttgcatctttatgggagaagaggcaaggcagttctctcttgcctctttctttttttttatttttagtagagacagggtttcaccgtgttagccaggatggtctcgattgcctggcctcatgatctgcccaccttggcctcccaaggtgctgggattacaggcgtgagccaccgcacccggccctctcttgcctctttcataagggtgctaatcccattcatgggtgacaccaaaattcagaccataacaatgtccctgtctaataattaaaggtttttgcctttacagttacgtggtgtatatatagattttagatagcaagagagaagtgagaaggagcaaacttttgtcttgcaattgagagctaattacttttgtgtttttgagatggagtctcgttctgtcacccaggctggagtgtggtggcatgatttcagctcactgcaacttctgcctcccttcaaggattcttytgccccagcctcctgagtagctgggactacaggtgtgcaccaccacacccagctaagttttgtatttttagtagagacagtgtttcaccatattggtcaggctggtctctaactcctgattgtgatcctcccacctcggcctcccaaagtgctggggttacaggcgtgagccaccgcacccagcagagagttaattgctcttaaagccatatacatactatttccatctcagttatctaattcccaaacacctctcaaaaaagaaacagaaaaataggataaaggagtcaaagctctacaggaaagaagtgtaggtaggtaattacactcccctttccacttttttttcagtacataggctatttagttctttcaagagataccattagatcatgatataaaattttttccatattcataatgaatttttctacaataaaatgcatgcatatcccataaatgtgtagatatttttcacacacaaatgttttgtttttaaagaagtgataggccgggcgcagtggctcaccctataatcccagcactttggaaggctgagttgaggagttcaagaccagcctggtcaacatggtgaaaccccgtctttactaaaaatacaaacatcagctgggtgtggtggcacgcgcctgtaatcccagctactcagcaggataaggcaggagaatcggcttgaacccgggaggcagaggttgcagtgagctgagatcgagctaaggccgggctcggtggctcacgcctgtagtcccagcactttgggaggccaaggcaggcagaacatgaggtcaggagtttgagaccagcctggccaacatggtggaactccgtctccactaaaaatacaaaaattagccaggcgcagtggcaggtgcctgtaatcccagctactcaggaggctgaggcaagagaattgcttgaacccaggaggcagaggttgcagtgagctgagatcatgccactgtactccagcctgggcgacagagcaagactctgtcttgcagggacggggtggttgggggaagamgtgacaaatcatatttaggaattaaatttgatgttgtcaaaggaatcataagaaactcttctcacgtgactattaaccttcatagcagtatggaaatggtatcagaattgaaatttttgaggaccagtgttggtatttgtggtaatagagatctagagaccccatctggccaaaaatagtttcttatgtcatgttttttgttgttgttgtgtttttttgttttttttttttgagatggagtcttgctctgtcacccaggctagagtgcaatggtgcaatcttggctcactgcaacctccgcctcccgggttcaagctattctcctgcctcagccttctgagtagctgggattacaggtgcctgcccggctaatttttgtatttttagtagagacgccgttttacatcttggccaggctggtctcgaacttctgacttcgtgatccacctgcctcggcctcccaaagtgctgggattacaggagtgagccaccacacccagctcttatgtttttaaaaagacaggtgtggtcaggtgtggtggcttacgcctgtaatcctaacactttgggaggccgaggtaggcggaccacttgaggccaggagttcaggactagcctggccaacwcagtgaaatcccacctctactaaaaatagaaaaaattagctgggcatggtggcacacacctgtaatcccagttgcttgggaggctgaggcatgagaatcgcttgaacccaggaggcagaggttgcagtgagccaagattgcaccactgcactccagcctgggcaacagagtgagactcctgtctcaaaaaataaataaataaataaatcaaaagacaagcgctttggtcacagtttattaaataaatgtatagatatattactgcagcccccaaaagttgtaaataactgttgtgttacatgagtggatttattttaaaattgtcttctccttgagttaaagctgcaaaactttctgttgttgttggctgggcacagtggcttatgcctataatcccagcactttgggaggctgaggcaagttcaccaggcgtagtggcacatgcctgtagtcccagctacttggaaggctgaggtgggagggtcacttgagcctagaaggtcgaggctgcagtgaactgtgtatatgtatgtgtgtgtgcatatatatatttatattttcatcattaccatatttgtgaaattcattagtatcaatggagaactaggaaaactaaggaaatttgataggaatttgtcatcagtgattgtgctgcacaatctatttcctttctgctttgcgaatttgtcatcagtgatggtactgcacaatctatttcctttctgttttgcactgtgtttagtgagccttaatatatatgttactggttacattctggtcatattgttaaaaagtagacaactaatgagcaccatatttttcacaaactgtattacaatgagagttcatataacactttctttactacagacttcacagataaggcaacacatagaatttcactgttcattagtacctaaacattttttataatagacattaatttttagagcagttttgggttcattacaaaattgaggggaaagttcagagaaaaaaattgctgattattttattaatagtgtgttgtagaacacagtatggagctttttataagttcctctatggggwtatacatttataggtttatctatatggtacattaggcatcatttagaatatattagtatttaggccactaaatttgtacttttcagagctgagctctggtttgtaaataacttgtcacaagcaggattttatgcatatttatgtaattcttggatttacagatcttatccattttctcttaacattttaagrtatagggaaaaggtttcctaagtattgacatgcccaaatttggccatatatcagaatcatgtggagaagttattaaaaagaatcctggaaatttttatttaattggatttggatggggtgtaggctagataattcttcattttatcttttagaatccccattctagagtccaataacttccttattaaaaaaaaaagaatttattgagatgaaattcacatacataaaattaaccatttaaagtaaacaatttgcagggagatcccttgagcccaagagttcgaagtttcagtgagctataatcatgctactgcaccagcctgggtgacagagcaagactgtatccttcrttcataaataaataagtaaataaataatcaattcaataacatttagtatgttcataatgttgtacaactattaatacctctatgtagtggtaaagcgtttccatcactccaacttaaaatacactacatatgaagtaatttctctccgttcccatgttccctcaatctctggcaaccactcatctgctgtctctatagatttacatattgcagatatttagtataaatagcgtcatatagtatgtgacattttgtgtctggcttgtttcactcagcacaatattttggagattcatccaccttgtagtatgtatcagtacttcattcctcttcatggctgaagaatattgcattatatagatataccacaatttgtttctacatttatcttttgatggacacatttggattgtttctcccttttgtatatgtgaatagtgctgctctgaacatgcatgtgcatgtagtttttgagtacctgttttcagttctttgggttacatacctaggagtggaattgtggggttaaatgggaattctatgtttaactttttatttatttatttatttattttttgagacagagtctcactctgttgcccaggctgggatgcagtcaggatttcagttcactgcaacctctgctcctggccccaagctattctcgtgcctcaaccacccaagtagctgggattacaggtgtgcaccaccacgcccagctattttttgtatttttagtagagacgggattttgccatgttggccaggctgatctagaactcctggcatcaagtgattcacctgccttggcctcccaaatgctgggattacaggtgtgagccactgtgcccagctgactttttcttccttcttttttctttttttttaaacccattttcctgttagtgctgggattacaggcatgtgagccactgtgcccagccatcttttaaatggactgccaaattttttctcatagcagctgaactgtttacattcccaccagcagtgtgtgtgtgttccagtttctttacatccttaccaacacttgttattttccttttctttaaaaaaggctaggtgcagtggctcacatctgtaatttcagcacttttaaaggccaaggcaggaggattgcttgaggctaggagtttgagaccagcctgggcaacatagcaagatccccatctctatatttaaaaaaaaaggacaaaatatagctatcctaagtgggtgtaaagtggtagctcattgtggttttgctttgcattacccacatggcttatgttgagcatcttttcatgtgcttattggccatttgtataccttctttggagaaatgtctgtcctagctcattttttatttttcatttatttttggggaatggggtcttgctctgttgcccaggctggagtggcccagtcatggctcactgcagcctcaaactcctagacccaagcagtcctcccacatccacctcccaagtagctgggactacaagtgtgtgccactacacctgactagtaaaattttggggggggccacatgtggtggctcacacctgtaatctcagcagtttgtgtggccaaggtagaaggattgcttgagctcagaagtcaggacaatcctgagtaacagcgcaactccatcactataaaaaaaattttaaaattgtccaggtttgctggctgttatctgtggtcccaggtacttgggaggctgaagtggaaggatcacttgaacccgggaggtagaggctgcagtgagctgagattgcaccactgcactccagcctgagagacaaagtgagaccttgtctctttatgtcacccaggctggtctggaactcctggcctcaagcagtcctcccygctcagcctcccacagtggtggaattacaggcatgagccactgtacctggccttccctattattgaaatggatatctttttgttactgagttttaggaattccttatatattatacatattaaacctttatcagatatatgatttgcaaatgttttctcccattctataggttgccttttcactttcttgataatgtcctttagatgcataaaagttttccattttaatgaagtgcagttatttccaagtctttgatctattttcagttaatttttgtatatgacatgaggtaggagttcagttgcatttttttgtttgtagaaatccagttgtcccactaccatttattgaagagtctgttttttccccattgaatggacttggcatccttgtcaaaatcaattggccatcaatgtattggattatttctggactctcaattgtaaattatattccattggtttatatgtctgtcattatgccagtactgaacaacatggttgtctttgtagtaatttttaaaattaggaagtgtgaatcctccaacttttgctttttccacattgttttggctctttgggtcccttaaattgctatataaattttaggattaccttgtcaataactgtaaaatgggaaggtaggatttgataaggattgtgttgaatgaacctgtagatcaaactggggaatagaaccatcttaacatcgtaactctacattttttaagatcttttaaaatttctttgagcaccgttttgtagttttcaacgtacaagtcttttcccttccatgactagatttattctctctctctctcttttttttttttttttttttttgagatggagtctcgctctgttgcctaggctggagtgcagtggctcgtactcagctcactgtaacctctgcctcccgggttcaagcgattctcctgcctcaacctgctgagcagctgggattacaggcatgagccaccatgtctggcaaattttttgtatttttgtagagacggggtttcaccatgttggccaggatggtctcgaactcctggcctcaagtgatctgccagccccggccccccaaagtgctgggattacaggtgtgagccaccccgcctggccagatctrttcttttaaatgacaattatcaatggaattgttttcataatatcctattaggttatttttgctagtttataaaaataaaagtgactgagttttgattatgtatcctataactttcctgaatttattagcttttgtagctttcttatataggatcatgtcatctgtgtataaagatgcttttctccccttcaactcagtttcctttttttcttttccttgtctaaatactctggttagaaatttccagtacaatgttaaatagcagtggtgaaagcaggcatccttgtcaagctcccgatcttaggagtaaagcttttagtctttcaccattgtcaccactgagtatgatgttagctgtgggtttttttggttttttttttttagatggagtcttactctgtcgcccagtctggagtgcagtaatacgatctcggctcactgcaacctccgcctcctgggttcaagcgattctcctgcctcagccttctgagtagctgggactaccggcgctgtgtcatgactggctatttttttttttttttgtatttttagtagagacggggtttcaccgtgttagccaggatggtcttgatctcctgacctggtgatctgcccgccttggccttccaaagtcctggggttacaggcgtgagccaccgtgcctagcaactgagggtttttaataaatgccctttatcatgttaagataattcccatctattcatagctttctgattgtttttatcatgaaagagtgttagattttgtcaaatccattgtctgtgtcaatttggatgcctattttctaatatgtcattttgaaatgcaaatctgttgagttcattccactactaagaaggttgtgttttttgtgtttttttttgttgtttgtttttttaatatatattacgctctgaaccaagtagcatacttctgtggcctaattttttttttttttttttttttttttttttgagacggagtctcgctctgttgcccaggctggagtgcagtggcgcgatctcagctcactgcaagctccgcctcctgggttcacgccattctcttgcctcagcctcctgagtagctgggactacaggcgtctgccaccacgcccggctaattttttgtatttttagtagagacggggtttcaccatgttagccaggatggtctcaatctcctgacctcgtgatccgctggcctcggcctcccaaagtgctgggattcagaaaaactctttttttttttggagacaagagtttcgcttttgttgcccaggctggagtacaatggtgtgatctcggctcaccgcaacctccgcctcccgggttcaagtgattctcctgtctcagcctcccgagtagctgggattacaggtgcgtgccaccacgcccggctaatttttgtatttttagtagagatggggtttcatcatattggtcaggctggtctcgaactcctgacctcaagtgatctgccygcctcggcctcccaaagtgctgggattacaggcgtgagccactgcacctggccagaaaaactcatttctacatttcccataggttgtttaaattgttattattaaaggaaagctcatctcaaagcttcctcaacaacaaagccttttatcttccaccccacctcccacgcattcactgcccaaatataccaagtttctcttttcttttttctttttttttttttttttgagatggagttttggtcttgttgcccaagctggagtgcaatggcacaatctcggttcaccacaacctccacctcccaggttcaagtgattctcctgcctcagcctctcgagtagctaggattacaggcatgcaccaccacgcctggctaattttgtatttttagtagagatgggttttctccatgttagtcaggctggtctcgaactcctgacctcaggtgatctgcccgccttggcttcccaaagtgctgaggttacaggcgtgagccaccacgcccggctctcttctttttgttttttgtttttgttttgagatggagtctcgctctgccgcccaggctggagtgcagtggcgtgatctcagctcactgtaacctctgcctcccgggttcaagggattctcctgcctcagcctcctgagtagctgcgattacaggtgccaccacgcccagttaatttttgtatttttagtagagatggggtttcatcatactggccaggctggtcttaaactcttgaccttgtgctctgcctgcctcagcctcccaaagtgctgggattacagatgtgagccaccatgcctggcctctctcttcttttatctgtagtaactttttacatgccttatggtatctaaccataaggcagtgtgttagaatataatattttgtattaattttattttaaaaatattttatattgataatggttacatatatattcatatagtttctatgtgtctaaatttgggttgtatatgtaagatttttgcactttatatagttatacctccagttttttaaaaatataaatcttaagtcgtgtgtggtagcacaccctagagtcccagctatgggactactgaggtgtgaggatcacttgaggccaggagttagtggctgcagtgcaccatggttgtcttatgcataatcactgcactacagcctaggtaacatagtgagactcccatctctaaagacagaaagaagttaaataaataaataaatcttaccttccatgttaggctaagtccaagagataagtcactgtattttacctaactttatcttttctattgaattgtgttctgtattgcacatggtgggcaatccatatgtgtatgaattaacctaaatgtacttgtggattaagttgtgttaagtttatgaagcaaaatataatagccatagtgggaagtcattctaaccataccttgaggatgttaacatttgctgcgaggcatatttttggtttatataagtcatggttattgacatagcatctatctgagtagatattaagcaaggttagatattttttcttcctttttatgtactctaggtacacagatatatctgaaaacaaagggatatatatttggctgcttctaagacaattgagtcttgatttattatgtttgtcttttttttttwaagatggagtctcattgtgttgcccaggccggagcactatcttggctcactgcaacctccgcctcccgggttcaagcgattctcytgcctcagcctcctgagtagctgggattacaggcgcgtgccaccacgcccggctaatttttgtcttttgtttttgtttttttgagacggagtctccctctgttgcccaggatggagtgcattggcgcgatcttggctccctgcaacccccacctcccaggttcaagcgattctcctgccccagcctcctgagtagctgggattacaggggagtgctaccacgcccggctaatttttgtatttttagtagagacggggtttcaccatgttgttcaggctggtctcgaactcctgaccttgtgatctgcccaccttggtctcccaaagtgctgggattacaggcgtgagccaccgcgcccagccaatttttgtatttttggtagagatggggtttcgccatgctggtctcaaactcctgacctcaggtggtccacccgccttggcctcccaagtgctaggattacaggcgtgagacacygcgcccagccccagtcaattttttatcaggattgtactataggaatagtaagtcttctcactagaaaatataccttggagattggtcgaaataaatattatattttaatgttcctaagtaaacatagggatcgtttgtttcatcaggattgttctataggaatagtaagtcttctcactagaaaatataccttggagattggtcaaaataaatacttttaaaatgcttaattattatttatctttgatgttgaacataaaaagcagaattgttttctcctttgatgaagaaacagtttctaggaataaaggaaactttagaaccgatgtccctttttgtacatcactttttgagtatttactgaatgtaatgtttgtgtcttgtagaatggagatgtatgcatttcgattcttcatccgcctgtagatgacccacagagtggagaactgccttctgaaaggtggaatcctactcagaatgtgaggtaaggaggaatctggttttggagttattcttaatctccttattgtctttgctcctagtaaaataaaattatgtattgtcttttaacatgtaaaaaatcatctttcttatattcagtttctttgtctttagctagagctttaagaaatatgtatgcgtcattttgaagagctgtatttactaaacaataatgtatatgattctcatttccctatgttcacttaggaatagattttcaagcctgaatccctactcttaacttatcctagttctactctggttctttattaccacctaacattagtgtcattcaytggttgcagttaataaacaatgttaattcattataastaactgaagtccatacgctttcacatttcctttgtttttacctgtcgttgttttgctccaaaatatttcatacatataaatatatatctatatatgtacgtgtatacatatatgtatttaaattttttgtagagatggggtctcactaagttgcccagctggtctcaaactcctggcctcaagcagtcctccccacttggcctcccaaagcgctgggattataggcatgagccactgtgccctgctcatcacattatatttaatagtcatgtcttcatgggcaactcctctctctctctgtctctgtctctstctctctctctgtttctgtctgtgtctctgtctcttgtctttgagacagtgtcttcccgtcacccagactggtgtgcagcggtgtgatcacaggtcactgcagcctcgacctcctgggctcaagtgagcctttcacctcagcctcccaagtagctgtgactataggtgtatgccaccatacctagctattaagcaactcttgattataaattttcttgtttttgatgacaattttggggggtactgatcaggtattttgtgcaatgtcccccagttgagatttttcttatgtgttttctcatgrttagtctagggttataggtttgggagagaaagaccagagaagtaatgtgccattttcattatgtcatatctgaagtatttactatcagtgtggcttatccctgttgatgggatacctttcatcacctgcctgaaataatatttttagcttttctccactgtaaagttgctctttcctgaacttttcattctgtactccttggaaggaatatgcatagcccacaactaaggagagggtggctatacctccttgaagccagggtatctatataaattattttgaattcttctgcatggattgatctattcttcccctttatttgtttattcaatcatttgttaaacatttttactgatacaaaaactaataacttgattagaatctccaggtttatcaaaagtgaagaattggaagcttcctgacttgtaatagaagctcttcaagatgtgtcaaatgactgttgattatgtttgttactcattcctttgggtaccttgttccatccaatttatttagaaagagttgagaaaatagatatattaaagatttcagcatatcttaccaatatattttttaagacaaaaaatgttactttctttctaaattcaaataaatgtgtttttacacctcaccttgacaaccatcatccctctgaatgtttttttctyatatttctttttttttttttttttttaagacaggatcttgctctgtcgcccaggctggaatgaagcggcgcggtcacggctcagcacagcctcaacctcccgggcttgagcaatccttccactttagtctctcgggtagctgggaccacaggcatgcatcacggtgtctgctcaagattttgtattttttttgtagagagatggggttttgctttgtttcccaggccagtctcaaactactgggctcaagcaatccacttggcctcccagaatgctcagattataggtgtgccccaaagcacctggactaatttttaagttttttgtaaagatggggtctcaccatgttgcccaggctggtctgaaacccatgggctcaagtgatgcccctgcctcagcctcccaaagtgttgggattacaggtgctcacactacacccgccttctgaatctcttatctatacaagaataatacctacctcagtaggttgttgatagaatttaagtgaataatgcatgtaaacctactagaatggtggatattacctggctggcttgggttgcagctattattttcaaggaattttttgggtctaatgtgaagcagtcatttgctatctattagaagagaaacacatttcttagttcctcatatttatttcattttgctacagggagacataattgctagatgcctgtatcgtaaccagttcaagtagtacataatttatcttgggttctaaatacatgaaaagaactaaaataattgttttgagctgtttttgagatattctgtaattgagaatacgctttctttttttgaggggaaaagtgtcctacgtagcaaattatgtatacatgaattatctcgatagactcaattttaaattagtattaaaaattctgagttgtaggccrggcgcagtggctcacgcctgtaatcccagcactttgggaggccaaggtgggcagatcacctgaggtcgggagttcaagactagcctgaccaacatgaagaaaccctgtctctactaaaaatacaaaattagctgggcatggtggcacctgcctgtaatcccagctactygggaggctgaggcaggagaattgcttgaacctgggaggcggaggttgcggtgagccaggatcgtgccactgcactccagcctgggcaacaagagtgaaacgctgtctcaaaaaaaaaaaaagtctgagttttatgtattctatattactcaagagtatgtttgagggtgctacgtcttcagaagtaattgtagcrcattattttgacattataattagacaatgtgtataaaagtttttaaaaaatattttggatgatttgttgaaaaaattgcatccaaaaaaatccccagttgtactttaataatgattctggtgcatggattttcaggacgagtaataaccctagattagaggaagtggtagctataatactggtgattcttggttttgctggttgaacgttgaatcaaatgcttacaccctctccctatttgagaaaataagcttcccctttcctcaaatacaaagccccaaacaagattttcctcattgcatttttatgctgcttggctggataatgtattgccaccacccatgggaattcaggctttttatcctttacttctcttgcatttacacgcaaatgatgtcatttgccttatctcagcttaaagtattatgaacattttttcttttaaaataggcctacttctcatgtaatccagtcttttggaggcagaggattccttttatacttatctgcccatctgaaactgcctttgttactttgggtactagcatcattttgtttcctcacacttgagtccccaggccacctgagccacaatttagggacattccccatactcaaatcaagattgttttccctgcttttatgctgctttgtttagaagcttcccaactacaactagttatgtggagttacacctaacatcttcacacagctctacaaggtatttgggttggaaattgtttaccttcttagactttttatcacttagttctatgtaatcattgggtagtccttcaacattttgatcttattggtgttttcgggggctgtgggatgttttgtacactttttggaacctcacctgtctggaatacctggtggtgctcaraactctgagcggaagtcaggaaagcactacctaatgagcagatgtggaatactttcgcttatcccttttgtttctgtgttcacttggttgtgagacaagggaggttttaaagtagtaaactgttatattttctaacaggtcatttatggcactgaaatattaagagggaagatacaagatgtagtggaaatgggcaactattttccttcttgtacctctctgctgctaaattatctagggccagcaactgtctaagggttctgggctccatgtccagtttatgggtggctgtagtaagacagcagtggagatggcatagggttcatctcatcctgttttggagtcttatctgctgcctctcactggcatctgaaagtgattccatattcacgtatttggttttcttctccataaccacgtgtactcaagactattgttcagcacctcaatggacatatttataacataaagtggcaaatggagcacttttgtaacttgaagaataagggactccagttaccttcaagagtctaagtcagtctgtattatcagatctggtgagtagtgagagttagccaacctgaaaaggaagaattttagggatgcagagaatcagccaactggtgttcactaaaggctcggtagcttgctacctcttgggaaaaccagcatacttcttttgaaagaaaacatccacaggcctcctcctcccagaggcccaggattaaattggtggggctrgaggtggtggggagagtttcttcctgaattggaaagttttaaggagtaggcatttgtcagcaagaatggagttgggagttgccacacgtctttgattagaagttcacagcattatgcctcttcctgatggaggaaacaaaatgtgccttaatacatgatttgtctagaatgatgtgggagctttggggatagggtagggtgggagtgggagtagcaaagccctcagactttgctatagagttcacagctgctttctgtgagacaccatccccagaactactatctgctataggctctgggatggtgaagtggtcttggtgtggatttgctttatgttgaaagaggcatacataatgttttctttttcaatttcaaaaataaagcgtgaaaccaaatttattaacccaatcaagagaggctgttgtttggtataaaagagtctgtctcagaagtggggtaggatatttttctgtctagtcttaagaacagagagccagagacatcacccctagcattgggtgccaaagtaagcacagtcaggggaaacaggcataaccatgctgttcctaaagctcttttaaacccaattctggaacagtgtggttttatttatttgcttccttggtttttgtgcatggggtcccactgccctcaacctgccaattccattctctgcagatgatacataatttgggcatttaaaaactgtasttgtattcctaccttgcattctcagggatacatcagtcagcagcagatccagcactgcacagaaggaggtgttatatttgttggttgctttagcagcctaaagagaaactttataataatgtaaacccgttaagctactatattttaccatcagttgccctgttttccctatcataacaggcttctttattctttgtcatgatgtcctctttaaatccctcccccacattgaaacatgcaatgaggactgagctttaactagtcatctgtagttactggcccatcctttgatagagtggaaatgagagattttaaggacccaggacaactagaaaggtcagggtagaacccagagtcagtaagagtggtagtaacagtatgcaggatttaggtttggctccagagacctggacttcacacatcaactgtcatcacattacgctgggtctataaaactcaatatctaaatcaatctgcgtgtgtgtttgtgtgtgtgcacatgtgcatacatgcatgcttgcccatgattatggcgtgaagtaagttcaggttttgttgttgttgttgtcgtcgtcgtcgttgttgctgttgttgttgttgttgttgttgttttgaaatggagttttgctcttgttgcccagctggagtgcaatggtgcgatctcagctcactgcaaactccgtctcctgggttcaagcaattctcctgcctcagcctcccaagtacttgggattacaggcatgcaccaccatgcccagctgattttgtatttttagtagagacaggatttttccgtgttagtcgggctgatcttgaactcccaacctcaggtgatccgcccacctcggcctcccaaagtgctgggattayacttgtgagccaccacacctggcataagcttagattttttggtttttaggaataagccctttctacttctcccatgctgtctggagggatgatatatacatgggaggtgggaccaggggaaggtgccagtctgtaatccttcaaaattatgaacttttcttgcttggtttccaggcagaccctcgagccaggtcttatttgtgatgctagggctatcacaaccctgttaaagttatgcttatggtgacatagtagctaacagagaaagggttatcgacatgttgaaaatgggcaaatggagtattacgcattgggtcatacaatcctaatttccaatttcccttaaatacttctttaggccaggcgcagtggctcatgtccttaatcctagcaacttgggaggccaaggcaggtggattgcttgagcccaggagttcaaaaccagcctgggcaacatgacgagattccatctctaccaaaaaaattagccaggcatggtagtgtgcacctgtagtcccagctactcaggaggctgaggtgcaaagatcacttgagcccaagtggtcaaggcttcagtgagctgtaattctgccactgcactggagcctgggggccgggtgagacccaagtttgctttgtcttttaaacacatatgagctctgcagaacttcacagcttgatttgctgttggctagtctgcaatatatattatatatgatgtgttggtcttcattttctttgagggtttttattgtttacaaacttattttttattcagaacaagatagctaaataacctctgaccaaagataactgaagcaggcaaaaggatctgaaatatgaacctcaagactgtaaagtgaggtgcttttgcctgtcctttttttctgtgtttcctttctcttcttagcatttttctcttttggcctagatcctctatcctgaaaagacctatcttattgcctcgctgtggcataaagaggggcagaaggagcacatttatttctgggagtatctctaactccttgaatggtggcagtgggaattgtgtaatgaaccacagagactaagaactctctggccctcattcttatcccaaattccctctaggtctgttctttgttgtaataaatgttaaacatgtattctgctggattgagatagatcagatctgttcctctagacgtggagtagagaagggtggtgcaccagtgtgttcttgtggaggggcggggaaagcaaagggtactacagttattctttataggaaccgagagtctggggatgatgggccctcagggtctattttgctagtccaacctcttgtttctcctgagaaaatacagtaaatgaataaggattttaaacacttaaactcattttttaaacaaaaaaatgagctagcagttgaaatagttttttgttttgttttgttgttgtttttttttaagacagagtttcgctcttgttgcccaggctggagtgcaatggcacgatctcggctcattgcaacctccacctcccgggttcaaacgattctcctgcctcagccttccgagtagctgggattataggcatgtgccactacacctggctaatttttagtagagacggggtttcaccatgttgcttggtcaggctggtcttgaactcccgacctcaggtgatccgcctgcctcggcctcccaaagtactggggttacaggtgtgagccaccgcaccccgcctgaaatagttcttaaattcaaattcaattttgtgtattccaacagtattatctcagcagtttagttttttccagttcacatccatccatctgcctgaggagaccaatgctgtcagctttccttattctcacaggtgtccatctaatcaagaatagttcccaccaggcttctgattggcccaggttaggtcacatgcatatcctcaaatgcatcgccataacaacagggatggaatcctttcagcacttgcttggtcttatgtctactgctgtaggtaggtaggttgtttgtataggaggtgtggcacaatggtaggagaaggagattattccccatacaaaaaagaaaaagaaagattctgctcttcagacagaaaaaagatcctgctcttcagacagaagaaaacttactgggttgacagttaccactatattagtctgctgtattactcagtgcctcttaaaacatcctggatttttaacttaggaggacatggaattagaatttctcattttgttagatatggatgatttaccatttaaaaatttgtttcccaatatacacatcatcttaatacacaagatgtaagaaaaccaactaggtgaaagtacttgtgggaattttttcttaattcaagtaataggattcatctagatctgtgttgtccaatgtggtagcctctaactacatgaggctttttacatttgaattaaaattaaatactagtctggcacagtggcatgcacctgtagtcccagctacttgggaggatgaggcaggattatcacttcagcccaggagtttgaggctgtagtgtgctatgatcacgcctataaatagcctctgtattccagccggggcaacatagtgagaccctgtctttaaataaataaataaataaatattaaaattcacttcctcatttgtgcaggatacatttcaaagtgcttagtagctgcatgtggctagtggttactgtattgcacagcataggttatacattatcatcatcatcatcgtcgtcgtcattgaaagttattagtacacagtactgatctagacaattaaacctatttttctggctgggcaaggtggctcacgcctgtagtcccacaatttgggaggctgaggcaggtgaataacctaaggtcaggagtttgagaccaccctggccaacatggtgaaacccatctctactaaagatacaaaaaaatttggccaactgtggtggcgcgcacctgtaatcctagctacttgggaggctgaggcagggaaatcgcttgaacccgggaggcggaggttgcagtgagccaagatcacaccattgcactccagcctgggcgacgagtgaaaccccatctcaacaatcaataaataaaaatttaaaagcactgtttttccagctaggagcagtggctcacacctgaaatcccagtacttaaggagtccaaggcaggaatattgcttgagcccaggagtagagacggggtttcaccatgttagccaggatggtctcgatctccttaccttgtgatctgcccacctcggcctcccaaagtgctggcattacaggcgtgagccaccacgcctgggcttcttcgattctttttaatgtaattactgaagaaatccagaaagctcttgagggaggaaggccaaggagttatccttaacctaataggagcatgtgtgatcaatggattttaattagatagaaatgttttctttgaaaatgcctttgtcataatcttgtataaaatcatgtaacagaaattcttcgcctttttaaggaaaagttttcatcaaatcaaacatctaattgcctggtttcctccctttatttttggcttggggcccagagcaaaagggtattttacaacaacacaatctctaacctttcatcaatgagaaaagatagagaaatttcatttttcctcccattttctcctaatgcacataatttttagggggaaaaagcctaggagtaatttggaacagttttggagcctattacgcttttatttatttatttatttttgagatggagtcttgctctgttgcccatgctggagtacagtggcgtgatctcagctcactgcagcctccgcctcccgtgcccaagcaattctcttgcctgtctcagcctcccgagtagctgggattacaggcgcctgctaccacacctggctaatttttgtatttttagtagagacggggtttcaccgtgttggccaggatggtctcaaactcctgacctcatgatctgcctgcctcagcctcccaaagtgctgggattacaggtgtgagccactgcacctggcccctattatgctttctaacataaactttattccctgattatttggaatgtctaatttttatctgtggatgaaaattggccgtttgtaacacccactagatttgtaagccatgggagaccagggatggcatctaacttgctcaccattgtacatccagcatctcacttggtgcctctggcacacagtaggtacatagtaaatacttttgaataaagatttctattattcagagactctagttcttctgtttgaaggattttgcttttcctccattctcctgcattactctgtcttccttccaagtatggaaaaaatacatttggatgtagcactgtttttcaggttaagaggccacaataaaaactggttatatagggccaggtgcggtggctcatgcctgtaatcccagcactttgggaggccaaggcgggcagttcacttaaggccaggagttcatgaccagcctggccaacatggcgaaaccctgtccctactaaaaatacaaaaattagccaggcgtggtagtacaatgcctgtaatcccagctactcaggaggctgagacaggagaattacttgaacccaggaggcagaggttacagtgagctgagayggcaccactgcactccagcctgggtgacagagcaagaccctgtcaaaaaacaaaacaaaacaaaaaaacggccgggcgtagtggctcatgcttttaatcgtagcactttgggaggttgaggagggcggatcacctgaggtcaggagttcaagaccagtctgaccaacatggagaaaccccatctctactaaaaatacaaaattagcagggcatggtggcaggcgcctgtaatcccagctactcgggaggctgaggcaggcaggagaatcgcttgaacctgggatgtggaggttgcgatcacaccattgcactccagcctggggaacaagagtgaaactccatctcaaaaaaaaaaaaaaaaaaaaaaaaaaaaaaaaacctggttatatagaatagcatcatttttaccagctcccacatcaagattgccttgaaactaaatattttaagctttttcccccatgccatttaatttgtaatttttaaaataaacagtatttgaaagcttctaagacatctgctttctgtaggttggaacatgtgaccagttgaaacagggccttctatcaagttcatttttatgctttgtgcattacccttatactagaatcacttgtgcattacccttatactagaatcacagatttcctctgctttgcctgccagttagcagcttgtttcttagtgctgaaaaaaatttttttttatttttcttaaatgccttttatgaaaactatcaataaaaaatttatctctctattcccccaaggtcttaaatttaattgtatcagaaaaattttaagggagggagaatttgaaatctgattgtactatcttaaaaagcagaatacttttaaatactgtaaatatgggtattcatagctgatccttttttcctgtttctaggactatcctattaagtgtaatctcactgcttaatgagcccaacaccttctccccagccaatgtcgatgcttcagttatgttcaggaaatggagagacagtaaaggaaaagacaaagaatatgctgaaattattaggtaaggtttttttttttattacctcaagttatacaaaaccaaaatatattctggaaccaagggtttaaatcaaacttaaatatcctgtccattccaggataattttcctctattagatttatagtgtgggaagagaagatttctgcctgagcctaaagaactttgctgtttaccgagagaacagccactagaagataaggcagtagcagacctgattttctaggaaccagaacttctaggttctggccaggcatggtggctcatgcctgtaatcccagcactttgggaggctgaggcaggcggatcacctgaggtcaggagttcgagaccggctggccaacatggtgaaaccctgtctctactaaaaatacaaaaattagccaggtgtggtggtgcacacctgtcatcccagctactcaggaggctgaggcaggagaattgcttgaacccgggagttgaatgttgcagtgagctgagatcacaccactgcactccagcctgggcgacagtgcgagactccatctcaaaaaaaaaaaaaaattgaataaataaagccttccagtttattggcattcctgaccatagcagcaaggattgtttggaaatcctcattatcagcaacactaatgtatggtataacagagccctagaataagattcaggggacttggaatctactcatgggaccatttatcagataatttttggggtcttttactttctcctctgtataaaatggaaaaaagcttaacctttaatctcttaggacatcaggttcttataatagtacccaagaaatttgcaataaatacaaaccctacacttcccctaccctccacctcttttttatttgtttctaattaattttttttttctttttgagatggagtcttactctgtcatccaggccggagtgcagtggtgtgatctcggctcactgcagcctctatctcctgggttcaagcaattctcctgcctcagcctcccgagtagctgggattataggcgcctaccaccatgcccagctaatttttggatttttagtagtgacagggtttcaccatgttggccaagctagtctcgaactcctgacctcatgatccacccgccttggcctcccaaagtgctggaattacaggcgtgagccactgcactcagcctcctccacctctttttaaagaaacagacatggtcttactctgttgcctgggctggagtgcaatggtgtgattacatggtaacttcaaattcccgggctcaggcagtcctcccacctgggcctcccgagtaactaagactataggcatgcaccaccacacccagctaatttctattattatttttgtagagatgaggtcttgctgtgttgcccagcctggtcttgaactcttggcctcaagtgatcctcctgcctcagcctcccaaagctctgggattataggtgtgagccaccgtgcctggcctccaccccccttgatattacatttttatttcttaaaatagagaccccaaatacagttacagcttcctctgtgcataggagttgactaagcattggcatttatacaaataagaataaaatctagttggcttgagaccatgtgatatgaaaaaagttaaaacaatgctgggaaaggacatgaggtgactgctgagtaatataaaatcagcagttctaagttttctgcccattgggatcacttttaaactgtccctaaacaatagctgtcttttatgggattacaaggacagagtttgggcatctgtgtgtgtatatatatctcacctaggtgactgatgtgtaccaaacattgaagataattagtagaaatattaagatcctacagaaatttagaggagtgggagtgtactaaggattgaaagatcagaaagcttaggtatacatattcccaaggtacttctatatatttcttaatttgtttaagggtccgtttatctcattctatctattccttaatgacctagtacagtacctgacactaagcaacagctttgtgttaggtactcattaaggcatagcctgtctccttagggagctcactttattagcatttgaaaacaaatgaccatgtagtattatacctatagaagcctaaacaagatacactgggagaaatatataatgtaatagatttcctagcagagataattccttataaccaatactttttcaggtgaaaaaagggaaaayacccatgtttgctaaaatacaggagtataacagcatgacatgttaagggrattacaaatgcttgagtgtaaattctgatgtgggaaatattagaaaattaagcaagagaggcaccagggtcttcaaagacattgaagtcatgataagagtatggttcttaatgtaagaagtgatggggtaccacttaaatatttttgggagggaagaggtgatgctatttgagttctgataaaagaattggctgcctggtgtggtagctcacacctgtaatcccaacattttgaggcgggtggatcacctgaggtcaagagttcgagaccaacctggccaacatggtgaaatcccatctctaccaaaaaatataaaagttagttgggcatagtggcacacacctgtaatcccagctactcgggaggctgaaggcaagagaattgcttgaacccgggaggcagaggttgcagtgagctgagatcgcgccactgcactccagcctgggaaacaaagcaagacaccatctcaaaagaaaaaaaaaaaaaagacagtcagctgggcacagtggctcacgcctgtaatcccaggactttgggaggccgaggcgggcagattgcttgagcccaggagtttgagacaagcctgggcaacatggcaaaataccatctctacaaaaaaattagccaggagaggtggcttatacctgtaatcccagctacttgggagtctgaggtgggaggattgcttgagctctggagccagaggttgcaatgagctgagattgcgtcactgtgctctagcctgggtgacagtgggagaccttgtctcaaaaaaaaaaaaaaaatcaaatagttggccaggggaccaacatggactaaactgaggtagtagtaatggggatgaggggacagatataaaaatatttaagctgtaaagcaataggtctttggagtgagatttattattttaagaagcaatgctcatttattcagagaagtaaaatgggagaaactgtccatagaggtagaaaatgcatatgcagtctacctctgcatatggaacattaggacagaggcttccaaaaggcatttgtttatataagccaagagctgtcagcataaagggagtggtggttaaaattatgggaacagagatgatgtcccagggagagtgctgagagtgtggagattgaagcccagaagcctcaggaccatcaatattcaaagcaaggcaacagaagaaaagcttcaagcacaactaagagattgacattaggaagatcaggaagagtggtctagtcttgatgactcaaatttttataattgttgaaggaaacaatttattgtttgttcattcatacaatcagtatttattgcacacctcttatgtgccaggctatgtgctaggcactgactggggaaatgggactaagaaagacatttacgctcacattcaaatatgtggagacagaagagtgagcaagcaaaaaatactagatagtgctaagtaggataatgtgaaagaatgactagatggctgctttaaattgggttgtcaggccaggccttctctaaggtgatatttaagccttaatatctgaggccktgattctgagtgacaggaaggagccaggcatgtgtggggcaggggaagagcaactggtccagacagaaaaatcaacaaggtgtgtccgagatgccaaaaaaagaccagggtgaatgtgttgaagggctggagaaaatacaagagtgggtcatgtggccgggtgcagtggctcatgcctgtaatcccaacactttgggaagccgaggtgggcagatcatgaggccaggagttcgagaccagcctggccaacatggtgaaaccccatctctactaaaaatacaaaatttagcccggtggggtggcgggagcctgtaatctcagctacttgggaggctgaggcaggagaattgcttgaacctgggagatggaggttgcagtgggccgagatcacgccgctgcactccagcctgggtgacagagcaagactccgtcttgggtggggaagagtgggtcgtgcaagacactggaatctggcataggcatttgaattttactgtcagtgaaaattaagaggataattaaattaagaattgttggggcacttgagtttggtggtgaggtgactaggccaaaaccctagccaatcccctaagcaccccaccccacattaaaccagagtgggacgttttattcacatatgcaacctttatgatctagccccaagaaactaggaggcgtattagcccttctattatctattcttattctggcagttatccctgtgcttcacacatgcaaacaacaaagcatgacattccgcccactaagtcaatacctgttctgattcttaagtcgccgacctattggcccttacatgaatcggaggacagccagttgacgaggtgattctggctataattgatccactgctttaaactcccttgatattaacagtgtatttcccctcctaaaaagtcaaagtttacttcaaaattgtacccagtgggttgaaagcatttggtgtagtacagggtatctgtcagatgctttcaggcaggtactgaagtttggagagctgagtcataagtaatattgattatttaaggccaattataaatctgtcttaaaaaaagacttaccgtaaaccatttctgtgtcaacctcccttcaggaaacaagtttcagccactaaggccgaagcagaaaaggatggagtgaaggtccccacaaccctggcggaatactgcatcaaaactaaagtgccttccaatgacaacagctcagatttgctttacgacgacttgtatgatgacgacattgatgatgaagatgaggaggaggaagatgccgactgttatgatgatgatgattctgggaatgaggagtcgtgacgtgytccttcagtgcccctgtactgccctgccatctcaggccaaagggaggggagcaagtggggaccyggccatggcccctcagcaaaaacctattcacagcgggtggggaaacacacacagctcctgctgactccccttatggatctcagtttgctcctttttatggacctttaatggagagagagtaaccctccacagaatgtctgaattcttgcattctttacccttccatcactatattgattctttttttaaaaaayatgaacccaaactcccgcctcacttcgtctctacagaatgttcacagcaaaacacgtttggtctgtttttagattcttgaagaattcaatagtctttcaagatgtttaatgtgtttaaagctgggaacctgttgggagttcacaagtgctgcatatactgggtagcaaaagaaaatggaaaaaaacccacaaaacaaactttaaaaaaaaaaaaaaacaaatttgccaaggtttagctgctcatttacattagtgtgtgtgcattcgttcagccccatggtggtgaattctgtttctttcctttcctaaggctgggacatggtgggcatcagggactttgtgctaagcctgatgaaatgtgctccttcaatctccatgaaaccatcgtaacatggaggcctcagctgctctgaggagagaaatcagactttgttttttgaaatcgattgggatcgaaagcctgaaataaatattcatactttccatagaactgagcacttggttgctatttattttaaaggcagggttatttccccccagggagtggggcaagcggggaagttgggatgagtgcgtgtgggagcaaagagttaaaaatcactatgctaagtttggttgatgctactggggggaaaaagttgaaactactggtgaccactgttgggagaggaaacatctgttttatagatttagcatggccttcccatcaaaaatacactcgtaccatgacgttttgtttttgttttttaagtagccacttttaattactcagtattaatcctaggtgcatgtgttaagatttcggttttcatcgagctgcttatactgatagtgaaaaacttggatgtgtgtgagacgagttaccgccttcttcattggatgtgatctgaactttttttctcctttcaacatacttaggctgtggagtgcaagcagaattatgcatagaaattgtggcagggctgagggagttgactgcaggcagtttttaggccagataaggctagatcttcctgcaatgcacttgctgcagctttgattttccagatctcaatcgtgttgcttcaatcaatattgagatccagcagccttcaccatccaggagacttcagaacttgaaggtaatttttggttgttatgggggtgcaccagatcataggagggcattatttggaggaaaccgctataatgtaaaatcagatttcagaaggaaaatgcagcaaggactgactgtagtcctatttcagacccctgggcactagtgtcaactcctcctttggctcgtaactcagaaagaaccaaagggcagattagggacggggcaggagggatcctaggatggccagagtaggtgacgcttacttccttagctcctccttccattctgatctcagggttttcactcttcaaactcccaaacacatgacttcttcccagcagcccttcccggcctctaaagtttggtcccagcagcccttcccagcctctaaagtttggtctggtatgaaatgggactgtttaacaagcaaggctcttaggggacactgttgagcctggtcccagaatctgtgatctccacagggccagggttgctacttgcacccagaatctagtgattttagtcagatccatggaacagagcagcttcgtaatacattgtcaagttacctgattacaaactctcatagatgttggaactacctttttactccccatactttgtaagtaatgcttccagattaacctgcaaatcttgtggagccaaagcctctcacagtgctgatttacctcccccaaaatgcccccaaacccccatgcaagtttacagccagtagcttggtcttattctcttggagccctaaaattaagcctttcattcccctttgctaaagcatctcactcccagggcagccccagcaccctggcattgcgggaggtgctctgctgcacagctgttccatcaggccctattggcctctgttagacattgactcagggagccggagcgccaagtggaggttgtacctttcagccctttggggtgttaaaagtgtcaagggctgggtttgcctctgatgagtacaatcagttccagaagactgggtaagtctcttgctagcaggtggacattctggtattttagactgactgaacgaaacccagaggctggttccagagctctgtccctgagaacacatccctgtggaaaatacttgagtttgtaattttttttcccccttctgggagtggaggtctcaggctcaatccggaaccatgtacgtacagttttgcttattatttgatgtgacatgaactcaaaatcctgcatttttagattccttttagttctaattgaggcctcactagatgctcttcagttctgtgtattttgaggctgggtggagaagtatatgattctgctgttgattctttcagtcttccccccttctccttttatcaatcattccagagttattttctattagtcaaacttttttgtagaaccttctttcccttaccctggcaaattgcttctttacttgctggtttccttacgtttggggcacatgttgtaagaaactgattggaaggggaaatgtgcagctctccactggaaaggaactctccacccctcccatcctgataaaacaaacaaggtttacatttacaactaaaaggattcagatgcaattttcaactattctgaaaccagcaggacacacctgactttaatagttttagctgaaattgtagatgttttgcttcagtttaacttatgagaaaagattatctgacggattttgtgttgacttcccctttagtggtttattttgtctttttctgcccatctgtctactaataaaatgtgaaataaaatacctgtattgctacttccccatgaaatgaccctcttctttttttaccttgtgttaaagaaaactaaaaggtggtctcattatcactgttaagtttgcagattacgctggggctcagctgaaaaattagacaaaaaccaaaactggggaatctgcctttctaactaactcacctccctggtgtatccccagtcccttcaagctccttatagacgtagccatttgttaaacttgattctgaaaacgggagctgatacaagtaggtcagtgaaggattgaggggtgctctgctgctttccttaggcaaacattttcactgtcatttgttttcctaacttactgctgctaatagcagggatcaggcagatcaccctatttaataaaagtcctaattttacctgtagacacttaccttttttctaggtaaggtcccaagctgtgggttaataggagtatcggtcccatctgatgacaggaccatcgctctcaattgtagaggccaaaagcagaaaaagtagattgtgaccccaggctggttctgacacaatcaatcaatcaatcacctgactagccattttatttcctcctttaacctgatctgaagcagcgatttaggagtgaaaagagaggctgtagcaccttgggcaacacttctaggccctgagcttcctgcctgctggattggagcacagttgtggttggccaacaggagatctgcctccttcctatggcccttggttactccctggcttctgacctgacacaaggtgaatggttggttgggcttttctggagcagatatgtagccccggatccaccagcctacctcatgacaccctcactagtcacgtgttctaccatagcttttgactgccaatcaagattatgttcagttgatgacaagcaaaagacaggtatacctgttcatactctcccttaaggcctagaaccctgctctcagttcttggctttgcttcagattgtaaaagtccactgagatttggaaaagaaattaccctgccctggtatccagtggacagggctctgtgggacactgccctatccctaagtctcttaaggagctataagaaaagccaggttaactttgatcaacatggcctgggccctgtaaggaggtttagctgtccttacagccattgtgatttgggccaagagggtccagtaaaaaggaaaaccatttcaagcctttatagcctgtgtcagaagactatgaccatgtgggatctcctttagccctgtgaagtccagggcttctgccctgagctgcccttcagtcacaccacacagagaccatgcatgctctcagaactttattaggtggggattgggcaagagaaaacccctgaaacagttgcccacgtggttcaagacaactagaatggagatgtgttgcttggagataccttagatttttaaaggggagctgactggctgaataactcagattatttttttttttttcatggtcagccagtctctagtaagtctctagggacatgaccagaccagaagcccctgttctatatgaagacaaacaggtggccatacttgggtggagggataccgctgctattcccagatsaagatttggtggaaggagaccatgacagatgacaaacggaacagtttctcaaaaacagaggtatgaagtaattacacaggaaagaaaacaatttccaaaggagtgagacaagtcgtgattcttcattggtacctgacccctatacccaaacagccttgaaccagcccttccagagactgcccctagtggcccactgggcagtgcaggctgtgaagaagacctgaaggcagatggggtgggggtgcttattttgctacagtggagaaggggcttgaatggggagggcagacctggctaacatctgccgccatcccccaactcccccccagacttctatcacatttacaaatacatacataaatacattacatacagtagccagtctgggaggcagactccccacagaggcatggctgacacatgtcgggaattctaggaaagggcactgggctcccaaatacgtgctcgtgtgttctctcctgcccaggataagccttgccccagcccacccctctcttctgggtttagtttgtccagtatggagagttgccgtaggcaggtttggaggcttgagacttgggctgcagggagctgggctggctgcgctgacccgagccactctgaggaagaggagaagggaaggctgtcraggctggagcagaacccctggcccagartagggtggctgcctccatcactgtactcacctgtgcatcctgcggaaggtggtggtgcagcagctgtgagtggggctgctggtgggctggcaagatgtgtaggaatggtgggggtgcatagccaggggccgctcccgaggccaggggcccrgtggagcccaagaccgagggcaggctgaaaggtggaggcgtccctgcatgaaatccctgcttgtcaaaagtctacagggcaaagaagacaatggtgaaggtcaggttgggctgtaacctctcaaaaacctatacacccaacccacctttgtccctcacctgtgtcttattgtagacagaaccagtcatatcaggtagaccagtggtgcttgaagacactgatactcctaggaggaaaagcagttgttccccacagcagttgttcccagctccaggctccccacctccaggatcactcaggggttgccctgcctgagaggggatcaggcaggagcccaccactccaggccttatcctggaaaggagaggtaaacactacctttgccaggcccagaacctgcagacttgtttggtgcctgygatgatccagcatagccacctttggagtagtctcctgctgctgtcccctgggtcagrtcgtcataacctagcrtggcagggtacaagaggcaagtgtgagccaggcaagcctgtctaaccccatgtgtctctgtctgggaagtacccctcacctgtactgtagccgtgctggccataaccactggcctgctggaagggaggtgtgggagtgctgaggttcaccccatgttgcttggctgaggctggagggacctggggggrcaagcagatgaggtattagtgtaggaagaggcaagctgaggctggtcaggtacccctgccagagcctaaggcagcaggtgacatacccacaaccacaggggacctgtgttttcattagtgcaacacatgctggatctaaacacagcaggggaaaagtgaccttgtccccagcctgaacagtttctgaagaccaggtaagacggagtggaatcacaaccctccctccctgctggaagataggtcccaggtttccacctgccagcaacccaaggccaggagacacagtcacaccctctgaaatactcacaaacatggtgggsccatactggaaggcactgggcatgcctgtgtagtagggaagaccagtgtagctatagccaggtggcagtgcaggattcacgaagggctgctgggctgtgtggtgggtctgtgattggctctgctgtggctgagctggtgtggtagcgggtgcaggggatgcagagtccccacggccaaactttgtgacatcacctaggaaagagcactgactccagccactgcccttcctccaaccagagaaaggccacactggcttctgcaaacaggaacaggtctggctgccagctcagcacaggctactaagaggcctctctcagcttgctgttgctgcttcccagctcctggagttcgcgctaggccggccccgggctactcctcatccattgagcaaactcacctggatatggattattagctaggctcccatctcggctggcaagcgctgtgggtgcagcaaagggaattccatagtagtcctaggagagaccagggaggcttgatcagcgactggccctgcttgactcccaggagagcagaaccagcacatggaagtggtgacgccacactcctgaaacagactccatgcctgagagccagcagtcccagggaacgccaagtaaatggtgcccctcggaagagtgtgcaactaggcggcctgcctaacacataagcacacagaccggccaaccctgcagcttcaccaggcagagctgctggagaccaagcctcacacatccatttgacaccacaggcaggtgcttgtgtgaatgcctcgggctgaaccaacttcgctggcttttctgtgtgagagactagagcagctaggaaagctgactaaacagagcagacctgaaaaaggaggcaacagaagtgcaggggcctgaaaggtttaaggggggacagggggcagtgccaggtaggcacgggaataagcaggaccccaggtgaagcccagaactggcctgtcaccacctacactgctctcaaaacactgacatggcctaggacaagcttgtccaacccacggcccatgacagctttgaatgtggcccaacacaaattcgtctttcttaaaacatgaaatttgtttgcaatttttttaagctcatcagctatctttaatgttagtgtattttatgtgtggcccaagacaattattctttcaatgtggcccaaggaagccaaaacattggacacccctggcccaggacttgggggaagtatggcagatacaacaaagtgtggagacagagacggcaaagcacagtggagcttcgtggaggaggggaggtctgacctgaccctcactcaccatccagggcctcgcactcctggacacacctggcccctgaggaaaggcaaagcccttgggctgtgcccgatcccagaaaggagccatcctgkctgggaatggcactcacaccctccaggaaacctcccggaaacccatagcagcctagaacccccggaagaggcagagctgggaacacacagagctgcacaactgaggacgggagcagagaaagcccagaagggggagcactttcacagaacacgagaattctccaggcaggaactaggctcacaagcagcagaggtgaacaaacaacccgagggatagaaagagcaacatatctcaaaaggtgggctccagagggtgttttctctaaggcacaaagtgataaaagccaaaagagtgctgtgaataagtgtggagaccacggagagcccctgaagcagaatgaatcccggggctcagcaccacctcctgcagtttgggcctttggccggcagattaaagggctgctggtttgcacagtggggagaagccgctccgctcccaggctaggcctctgcttctggaaatacggccagccagtggaaagggctactcttctgaaacaagagcagctccgtcagctctttgtggtgcagcagagaagggagcaacacccacggggaagaaggcatcactgcacaagggagaaagcctcttcctccagcaacaggaaagactgtatccagcagaggtggtgtccaaactgcctgcaactctctgacaagtgccctgggaaatggcagagcaagaagacagtggctcccaggaggaagtcctgcccatgggcagggcaaggagcgggcctattcccctctgtccccacagttctgttcatgtggctatcccaggaaaggcccacactgcattctggcaccaacggtcagaagaaagaggcaaccctggtctcagagtaaggctgcaaccaccagggacgtcccagggcaggcattctcacaaatctagatgggaggccagacccagaagagaccttaaagaccatcagctcaagccactcactcagctgattgcagaagagcagtcactggccatctcagaccaaagacactatatggtactctgaggaagaggaagacagtataaaactccagggccacgtargcaacctccatgtcttgtgtcatatggtttttctttttaaaaaagagagagaaaacaagatggaggagggaagataaggaccaacatttaacaggggacatggcctaccagggccccaggtcccaaaggccttc

SEQ ID NO: 94786 - DNA, 23908 bp, Homo sapiens
tccatgtgaagagcgcggaaaccgccccaggcctagctgctgcaaaccaccgcttccaaacttcccgccggtctctaggctccgggtgcccaccgccccttccttccttcctttgcgcaatcaacaagctccaactccagatgggatttcgcaggccctgccctgtgtataaactctcttcgtcctggggttgtcaacaaaatttttttttggagacggagtctcgctgtcgcccaggctggagtgcagtggcgcgatctccgctcactcactgcaacctctgattccctggttcaaacaattctcccgccttagcctcctgagtagctgggattacaggcaagcgccaccacgcccggcaacaaactcttctaattggccggactcgcaggccccgcccccacagagtgtgccactgcgtggagcgcgccgctcctcatagggcgcttgcgcaggctccgctccctgagcggccgctttcctggtctccaggcaacgcgtacggcgctgtccactgtgctgaagccgcacaccaagcgccgcctctagctgcaggctcacggcgcccccagctctcctaagtgggcggtgccaacaccctaaagcagggaccactaagcctcctttgcgccctatccccagtttatctcttggtaataggtagagcccacttccctccacgttggctgagaaagccctaccgtcccatccagctcagaggaaagcccaaggcttcccgcgatttcatgccgtcacctccacaccctcatccgctcacctccagccacactgacctccgcgctcacaacagacaatccagacacattcccacctccaggcctttgctcttaactgttcacgaggcctggagtgctctctccgattccgcatgactcctccatcctcctttcaggctcaaatcccaccgtctcagtgagcccagccctgactatcctgtcctactgaacacattgacctctctctatatgtatgtatgtatataattttatttttagttttttcgagacaggatcttgctctgttgcccaggctggagtgcagtggtgcgatcatagctcactgcagcttccacctcccgggctcaagctatcctcctgcctcagcctcccgagtagctgggactacaggtgtgcagcactgcgcccgtataatttttgtatttttagtacagcagaggttttcgccgtgttgcccaggctggtctccaactcctgggctcaagcgatctacctgcctcagcctcccaaggtgctggaattacaggcgtgagccactgcatccggactagaatatatttgtttaagtgggtggattaagcctcttttgataattgttgaagctgggtcattggttacaaggtgataactatgcaattctctgtccgtttgtctatgcttgaaaagtgtgtaatgaagaatgtcaggtggcacagtgatctccaggaggggcagagaaccagcatcaggggctacacagctagtggtggtaccccaacgccaaccccacacatagcccaatctcacaatgactaagtacagagactgtagttgatgctacaaggattactgtggctggagaccagatgtgcaaccacctataaacttcctgagtgtagcttcagttttgacataaactgttcttattttcatgaatctctgtgacatggatgtagctgcctccaactcctgtccctagtgttttcgagcccaagggcctgtttctccttatcattggcttttttctttttctttttctttttttttttttttttgagacggagtttcactcttcttgcccaggctggagtgcaatggcacgatctcggatcaccacaacctccatctcccaggttcaaccaattctccttcctcagcctccttagtatctgggattataggtatatgccaccatgcccggctaattttgtatttttagtagagatggggtttctccatgttggccaggctggtctcaaactcccgacctcaggtgatccgcccgcctcagcctcccaaagtgctgggattacaagtgtgagccactgtgcccggccaccaccactggcttttgatccaaattgtgaatggcagaacctgagccttgtgcagcctggctgcagggcaggctgggaaagtaactgtcaattataacttctatggaaaggcaggcttagccttaaaaaatatgacattctctcaatgcaggggtgtatgagcggggtcaggtgttaggtggccaagaaaagaaggggctatactagcttcagaacagcaaatccaggcaacccttaatccaatcagccattcatccaatcatggtgattgcattctaaaatgcagaggattccctccaacatcccagaagctttggataaccaagaattgcaggcaggtcagagctccaagataaggtcacccagaaaagaaagagactcactttggataagataatgaaatgctgtttttggaacctaaaccactgagaggcaacattggctgcacacagaaattccttgaggcttaaaacaaaaaacaaaagaaaattgatgactgagtctcatccccatagatttttttttttaagagatgatcggccaggtgcagtggatcacacctgtaaccccagcactttgggagactgaggcaggtggatcacctgaggtcaggagttcgagaccaacctggccaacattgcaaaaccctgtctctactaaaaatacaaaaaattagctgggcatggtggtgggcgcctgtaatcccagctactttaggaggctgaggcaggagaatttcttgaacccgggaggtggaggttgcagtgagccgagatcgcaccattgcaccctagcctgggcgactctaatttctggcctcaagcaatcctcctacttcatcgtcccaaagtacataagctactcaccatagattttagtttaagttgtctgggcatagagatagttaaaaactccacaggtaattctatgtgcagccaagagtgaaaaacagtggttctgaaacgagtgggcatcagaataacacagaaagcttggcaagaagcagacttaaacacatattggccaggcgctgtggcaatcctcctgcttcagtctcccaagtaactggaattatgggtaattttttaactttttttttttttttttttttgccatgttgcccaggctggtctctaactcgtgggctcatatgatccacccaccttggcctcccaaagtgctggaattacaggcgtgagccactgcgcctggtaaacattttgaaaaatagaaatattagctgggcacggtggctcacacctgtatcctagcactttgggaggcctagatgggtggatcgcttgaggtcaggagtttgagaccagcctggccatcatggtgaaaccttatctctactaaaaacaaaaattagccggacgcggtggctcacacctgtaatcccagcactttgggaggccaaggtgggaggatcacctgaggtcaggagttcgagaccagactggccaatatggagaaaccctgtcgctactaaaaatacaaaaaaattagccaggcgtggtggcgtatgcctgtaatcccagctactcaggaggctgaggcaggagaatcacttgaacccaggaggtggaggttgtagtgagccaagattgcactattgcactctccagcctgggcaacaagagcaaaactccgtctcaaaaaaaaaaaaaacaaaaaacggccgagtgcggtggctcacgcctgtaatcccagcactttgggaggccaaggcaggtggatcaccaggtcaggagatcaagaccatcctggctaacatggtgaacaccggtctctactaaaaatacaaaaaattagctgggcgtggtggcaggcgcctgtagtcccagctactcaggaggctgaggcaggaaaatggcgtggacctggcaggcagagctttcagtgagcagagattgtgccactgcactccagcctgggaagcagagcaagactccatctcaaaaataaaaaaaaaattagccgggtgtggcagcaggcacctgtaatcccggttgcttgggaggctgacgtaggagaatcgcttgaacctgagaggcggaggttgcagtgagctgagactgtgccactacactccagcctgggcaacagagtgagattctgtctcaaaaaaaaaaaagaagaaaagaaaagaaagaaaagaaatagaaaagaaaggatgagtgttgtagacaaaggcaggtgcaaaggccctgaggttggcttgctggtgggcaggggtgttttccaggcgggttttccgggtgtggccttactaaggatgccccaccatctgggcaaccggcatccttagcctttcttacaggatagggggcttgaggctcccttagacaccctcttggccagagtagctcagtttaagacaattgaaaggacatcttctgggacaatagcgctctctgctggccaggacagatatcagatccagttgtaatgataacaattactatataatattgtatattattattatctttttttttagggtttcggtctcactctgttgcccagcctggtgtacagtagcccaatcatagctcactgcagcctccaactcttcagctcaagtgatcctcctgcctcagcttcttgagtagctgagactacaggggcgtgccaccacaccatgttaatgtttttgttttgattttgtttttgtttttgttttttagatgaagtctcgctttgtcgcccaggctggagtgcagtggcgcaatcgtggctcgacctccgcctcccgggttcaagcgattctcctgcctcagcctcccgaatagctgggactacaggcacgcacccccacgcccggctaatttttgtatttttttagtagagacggggtttcaccatactggccaggctggtcttgaactcctgacatcgtgatccgcccgccttggcctcccaaagtgctgggattacaggcgtgagccaccgtgcctggctcacaacctgttaattttttaatttttaaaacttttttttctttttgacacagagttttgctcctgttacccaggctggggtgcaatggcacgatctcggctcactgcaaactccgcctcccaggttcaagcaattatcctgcctcagccttcggagtagctgggattacaggcatgcaccaccatgcctggctaattttgtatttttagtagagacggggtttctccacattggtcaggctggtctcgaactcccaacatcaggtcatccgcccgcctcagcctctcaaagcgctgggattacaggcgtgagccaccgcacccagccacaccagcttaatttttttttttttttttttttgagatggagtctcgctctgtcacccaggctggagtgcagtggcacgatctcggctcactgcaagctctgcctcccaggttcacgccattctcctgcctcggcctccggagtagctgggactacaggtgcctgccactgtgcccggctaattttttgtatttttagtagagacggggtttcactgtgttagccaggatggtctccatcccatgacctcgtgatcctccctcctcggcctcccaaagtgctgggattacaggcgtgagccaccacccccggccctttattcaatctttacaaagtctttatgccgagatgctgtaattcgccacattttatccaagagaaaattatggctaagagagtctctgattgtagctcgaaagtgctagggatgggattcgttcccagttcaattctgattcttcgctttagcgtgttgtgggtaggagttaaatgggcccccagccaggaccaggggttcaaatccgttgccatggtcccccgacgctttcccgggctccagaacggatcgcgtggtcacgtgacagcggccaacatggcgccgcccactgtgtggtacggcccacgtggttccgacagtcaagatggcgggagcagctacccaggcttccctggagtcggccccacggatcatgcggctggtggccgaatgcagccgctccagggcccgggcaggcgagctgtggctgccgcatgggacagtggccactcctgtgttcatgccagtgggcacgcaggccaccatgaagggcatcacgaccgaacagctggacgctctgggttgccgcatctgcctgggcaatacctaccatctgggtctaaggccggtgggtgggctctgcccgcgcggggaggcggcgaggcggcgaggcgtggggagccatggagcgtcctccaggcccggacactcctcccaaagtcaatcgaccagctgtattgagcgcccccaatgaccaggccttgtactgggcgtgaaagagcagcagggactaaagctggccagatctgtctcccaagaagggcccccagggacgcggtcacccctaacctgacactttcttccatcaacccagggacccgagctgatccagaaagccaacggtctccacggcttcatgaattggcctcataatctgctaacggtgagctgaggagagagccgacgttctagggcccttctctggagtgaagggtccccatctccaccccctgacagctttgcggtggggtttcccttaggacagcggcggtttccagatggtgtcgctggtgtctctgtccgaggtgacggaggagggcgtccgcttccgctccccctacgacggcaatgagaccctgctgagcccggagaaatccgtgcagatccagaatgcgctgggtgagaggaccctggggagccgcctccttaccctgtctgtcagggggtgaagtttacacggggcctgttttttagctgttgtgtggctttgagcaggtcactcctcgctgagcttcagttgaaccaactcaaagcgggggtaaatagtagcaggtctttggtagaattgttgacaagtacatatgagatgatgtcagtaaatctccatcccagccatgtagtagcttaagtattattattgcagtttttctctcattagcaaattaagactggacgtggaagctcatgcctgtaatcccagcaatttgggaaactgaggcgggaagatcacttgaggccgggagttggagaccagcttgggcaatacagggagaccctgtctctaccaaaataaaaaataaaaaataaaaaaaacaaattaattggacaaatacctgttgaaataatggtggcaacaagaggattggggaggctttaggcttctcccatatcctcaatatccttcttttttttttttttttttttttttttgagacagaattttgctcttgttgcccaggctggagtgcaattttgcgatctgagctcactgcaacctctgcctcccgggttcaagtgattctcctgactcagcctcccgagtagctgggattacaggtgtgcgccaccacacctggctaattttgtatttttagtagagacagggtttctccatgttggttaggctactctcaaactcctgagctcaggtgatccgcctgcctcggcctcccaragtgctgggattccaggcgtgagccaccacacctggcttttttttttttttttttttttgagacagagtcgcccaggctggagtgcartggtgtgatatccagtcactgcaacctccacctcctgggttcaagtgattctcctgcctcagcctgctgagtagctgggattacaactgcttgccaccatgcccagctaatttttgtattttttgtagagacgggtttcactatgttggcaaggctggtctcaaactccggacctcaggtgatccacctgcttcggcctcgcagagtgctgggattataggtgtgagccaccacgcctggcccaatatccccatttcttgataaagaaccatggcaacacagggtsaaaacccctcttcccctcatcattctaatagattgatgctgtagggaggaagaaatattttttcttcttagattcatggctgaagcccctataacaaaaacccttataagaaaagaagccacgtgctgggtgcggtggccacgcctgtaatcccagcactttgggaggcggaggcgcgatcatgactcactgcaacagctgcctcctggttcaagcaattcgcctgccttagcctcccaagtagctgggattacaggtgcccgctaccacacccagctaatttttgtattttcagtagagatggggtttcaccatgttggccaggctggttacgaactcctgacctcaagtgatctgcccatcttggtcccccaaagtgctgggattacaggtatgagccactgtgcccggcctataagtttatttttttatgtttatttatttttatgtattattttgagacagagtctcactctgtcacccaggctagagtacagtggcacaatctcaggtcactgcaacctctgcctcctggcctcaagcaattctcctgcctcagcctcccaagtagctgggattacaggtgcatgccaccacgcccagctagttttttgtatttttagtagagacagggtttcgccatgttggccaggctggtcttgaactcctgacctcaagcgatctgcccgccttggcctcccaaagtgctgggattacaggtgtgagccaccatgcccggccaaatattttttgtagagattagagtctcactacattatctgggctggtcttgaactcctggctacaaacagtcctttgccttgaccattcaaagtgctcatgttacaagcatgagccactgtgccagcccccatgtgttttttgtttgtttgtttgttttttctggagatggagtcttgcttagtctcccaggctggagtgcggtggcgcgatctcggctcactgcaagctccgcctcctgggttcatgccattctcctgcctcagcctccggagtagctgggactacaggcacccgccattacgcccagctaatttttttgtacttttactagagacggggtttcatcgtgttagccaggatggtctcgatctcctgacctcgtgattcgcccatctcggccttccaaagtgctgggattacaggcgtgagccaccgcacccggcctctttttttttgaaaccgagtttcgctcttgttgcccaggctggagtgcaatggcgcaatctcggctcacagcaacctctgcctcctgggttcaagcgattctcctgcctcagcctcccgagtagctgggatgacaggcatgcgccaccatgcccggctaattttgtatttttggtagagacggggtttctccatgttggtcaggctggtcttgaactcccgacctcaggtgatccgcctgcctcagcctcccaaagtgctggcattacaggtgtgagccaccatgcccagctaaagttctagctttttaatgaatgtcgtaatttttttttttttttttgatgtggaatctcgctctgtcacctaggctggagtgcagtggctcgatcttggctcactgcaacctctgctgcccgggtttaagctattctcctgcctcagcctccccagcagctgggactacaggtgcctgccaccacgcctggtaatttttgtacttttagtagagacggggtttcaccttgttggtcaggctggtcttgaactcctgacttcaggtggtccacctgcctcagcctcccaaagggctgggattacaggcgtgagccaccgcacccagccccatatttatttttcgtcttttctttttttttttcttttttgagaaggagtctcactctttgaccaaggctggagtgcagtggcactgtgttggcttactgcaacctctgtcttctgggttcaagcacttctcctgctgcagcctcccgagtagctgggattataggtgcccatcaccacacctggctagtttttatatttttagtagagacggggtttcaccatgttggccaggccggtctcgaactcctgacctaaggtgatccacccgtctcggcctcccaaagtgctgggactacaggcgtgagtcaccgcgcctgcccctttttttcttttttgagacacaatctcgctctgtcacccgggctggagtactgtggtgcaatctcggctcactgcaacctttgcttcctgggttcaagcgattctcctgcctcagcctcccaagtagctgggacttcaggtgcatgccaccatgccgggctaatttttgtatttgttgtagagacagggtttcaccatattggccagggtggtcttgaactcccgatctcaagtgattgacctgctttggcctcccaaagtgctggggttacaggcgcaagccaccaggcctggcctgttctttttttttttttttttttttttttttttttgtggagacagagtctcgctctgtcactcaggctggagtgtagtggtgcgatctcggctcactgcaagcttcacctcccgggtgcacaccattctcctgcctcagttcccgagtagctgggactacaggtgaccgccaccacgcccggctaattttttgtatttttagcagagacagggtttcactgtgttcgccaggatggtgtcaatctcctgacctggtgatccacacgccttggcctcccaaagtgctgggattacaggcgtgagccactgcgcccggctgtggcctgttcttttttattttaaattgttttcatctatttattttcttaataatggagatggggtctctctgtgttgcccagggtggtctcgaactcctgggctctagtgatccttccgcctgggccttccaaagtgtttggattataggtcatcaagtttcattttatgccactaaaccactatgctgtgcaccgtggctcatgcctataatcttagcacttttgttttgtttttgagacggtgtctcgctctgtcgccttggctggagtacagtggtgcaatcttagctcaccgcaacctccgtcttccgggttcaagcgattctcctgcctcagcctcttgagtagctgggattacaggaatataccaccacgcccggctaatttttgtatttttagtagagacggggtttcaccaccttggccaggctggtctcgaactcctgacctcaaatgatccacctgggttggccttccaaagtgctgagatgacaagcgtgagccatcgcgcctgtttttttttttttaacctttttttttttttttaacacagccttgctctgtcatccaggctggagtgcagtggcacaatcttggctcactgctacctctgtctcccagattcaagctattctcctgtctctgccttccaagcagctgggaatacaggcacgtgccatcatacctggctaatttttgtgtttttaggagagatggggtttcaccatgttggcgaggctggtcttgaactcctgacctcagatgacctgcctgcctcggcgtccccaagtgctgggattacaggcgtagtcactgcgcccagycagcagagccctgctgatggacgtttggtttcccggtcttgctgtggcacgccacatagcaagggatccctttgtatattttaggattttattttgtgtaacaggataggattttaagctggggagaggcaggatcaaaggcacattctgtaaagctccttctggctgctgtataaacagaccgggaaagtcacgtgggagttagcaagacgggggatggggggatgctcttggggaagtccaacttgtccccatgtgacggcaggctttccccaagcattgcgggctttcccagtgatgttgcccccatctcaccatcaggctcggacatcatcatgcagctggacgacgtggttagcagtactgtgactgggccacgtgtggaggaggccatgtacaggtgtgtatatgctgtgtgcatgtgtgggatatgtgrtgggaggggatcctggtccctgtasccttgtctcctaccccctcaccaggcccctggggcttgtgactggggccctgttgcaggtcaatccgctggctggaccggtgcattgcagcccatcagcggccggacaagcagaacctcttcgccattatccagggtgggctggacgcagatctccgggccacctgccttgaaggtagagccatgcgctggcaggcccagggcttggccatcgcggaggtccccacatgggcctggcgtatggcgggactggattgctaatgtgtagaagggcactgcgctagaaaaaatagccggagcaaaggctctcgggccacgtgcagtagaatgtattgagagaatggccatgattccagtagttaatgatcttctaggttttttgtttgtttgtttttgttttttttttgagacggagtctcaggtgatccaccccccttggcctcccaaagtgctgggattatagtcatgagccaccgcgcccagcctatttatgtatttatttattttactttttttttttttggagggtggagtcttgcactgtcgcccaggctggagtgctgtggcgcgatctcggctcactgcaacctctgcctccctgcaacctccgcctcccgggttcaatctattctcctgcctcagcctcctgagtagctgggactacaggcacccgccaccaggcccggctaatttttgtatttttagtagagacagggtttcaccattttggccaggctggtttcaaactcctgaccktgtgatctgcctgcctcggcctcccaaagtgctgggattacaggcgtgagccaccgtacctggcctctttatttatttttgagacacggtcttactctgttgctcctcctggagtgcagtggctaggtcaaagctcactgcagcctcaaactcctgggatcaagcagtcctgcttcagctttccaaagtgcttggaatataggtgcacgccggtgtgtccagccatgcattaccttttacatgcaatgctttctggtgttttcttttctctttcatttaaaaacaacgacaacaacccgtgcgtcatcaaagtcatttctcaaccacctgcagtttgacaagcaccgccccatggggtgcttctcaaagtgctctgaggcttacctgccccagcacaaactactgaaagtcctggtaaaatgcagctccccttcccatgatccgaccagagttggagctagggaaggcctaggaatctgcatgtaaacaccctgtgtccagttggaggatgctcacattaccttcaaaacctggccccagacaacgcctgcattcctttttttttttttctttttttttttttttgagacggagtttcgctcttgttgcccaggctggagtgcagtggcgtgatctcaggtcactgcaacctccaccttccggtttcaagtgattctcctgcctcagcctcctgagtagctgagattacaggcatgcaccaccatgcctggctaatttttgtatttttagtagggacagggtttcaccatgttggctaggctggtcttgaactcctgacctcgtgatccacccccaccttggcctccagagtgctgggattacaggcttgagccactgcacctggccaacacctgcgttcttgatggcatggcctcttcgggttgaactgggcagctggggcacaagataagcctggacttggaggccagacccaggtttgaatccagcctttggcatatgtagccttggactagtggtttaagctctgcaagcctcaatttcctcttgtttcaggcaagttgaacaatagcacaattctgcagccccttctgtgtcatccaggtcctcagagcgaaagtctaaaatccagaacattggccgggtaccatagctcacacctgaatcccagcactttaggaggccaaggcaagaggattgcttgagaccagtctgggtgacatagtgagatcccatctctaaaaaaagagaattgggccaggcacgctggctcacgcctgtaatcccagtactttgtgaggccaaggcgggcagatcacgtggtcaggagttcgagaccagcctggccaacatggtaaaaccccgtttctactaaaaatacaaaaattaggccgggcgtggtggctcgcgcctgtaatcccagcactttgggaggctgaggcgggcaaatcattgaggtcgggagatcgagaccaacctggctaacacggtgaaaccccatctctactaaaaaatagaaaaaattagctgggcgtggtggcgggcgcctgtagtctcagctactcgggaggccgaggcaggagaatggcgtgaacctgggagacagagcttgcagtgagccgagattgtgccactgcactccagcctgggcaacaaagtgagactccatctcaaaaaaaaaaaaattagccaggcatggtggtgggcacctgtaatcttagctactcgggaggctgaggcaggagaatcatttgaacccgggaggtggaggttacagtgagctgagatcacaccactgcactccagcctgggcgacagagcaagaatctgtctcaaaaaaaaagaaaaaaagaaaattagcacgcaagcatgggagtgtgtgcctgtgatcctagatacttgggaggctgaggtgggaggatcgcttgagcccaggggttggtggctgcagtgagctatgatgacatcactgtactgcagtctgggtaacacagtgagaccctgtctcaaaaaaaaagaagaaaagaaaagagaaaaaacttagaatgccctgaaaaatttgcaactcatttcatggctaacttagatctctcattttttatcccagttgttacaagtattcacatatttttatttttatttattttttatttttttgagatggagttttgctcttgttgtccaggctggagtgcagtggcgccatctcggctcactgcaacctctgccttctggtttcaagcgattctcctgcttcagcctcccgagtagctgggattacaggcaccagccaccacgcctggccaatttttgtatttttagtagggatggggtttcaccatgttggccaggctggtctcgaactcctgacctcgtgatccacctgccttggcctcccaaagtgctgggattacaggcgtgagccatgtgcccagcctatttttattttttaaattttactttggccgggcgtggtggctcatgcctgtaatcctggcactttgggaggctgcagtgggcggattacctgaggtcaggagttcaagaccagcctgcccaacatggcggaaccctgtctctattaaaaatacaaaaaattagccgggcatggtggtgggcgactgtagtcccagctactcggggggctgaggcaggagaatcacttgaacccgggaggcgagggttgcagtgagccaagatggtgccattgcactccagcctggatgacaagagcaaaactccatctcaaaaaaaaaaaaaaaaaaattaagttctgggatacatgtgcagaacgtgcaagtttgttacacagctatgaatgtgccatggtggtttctgcacacatcagcccgtcatctaggttttaagccccgcatgcgttatgtatttgtcctaatgctctcactcccctttcctccaccaagtcttaacatattttgttgtacaaatattacagtgtttgatgacaggctattgggtgttttgttgttgttgttgtttcgttttgttttgtgagacggagtctcgctctgtcgcccaggctggagtgcagtcatctgatctcggctcactgcaacctccacctcccgggttcaagcgattcttctgcctcagcctcctgtgtagctgggactgcgggtgcccatcaccacacctggctaatttttgtattttttagtagagacaggatttaaccacgttggttagcctgctttcgaactcctgacctcgtaatctgcctgccttggcctcccaaagtgctgggattgaaggcatgagtcaccgcgcccggcccttttttttgagatggagtctcactttgtcacccaggctggagtgcagtggtgtgatcttggctcactacaacctctgcctcccaggttcaagcgattctcctgcctcagcctcctgtgtagctgggaccamaggcgtgcaccaccacgcctggctacttttcatatttttagtagagacagggtttcaccatgttggccagattgttcttcaacaccagacttcaagtgatctgcttgcctcggcctcccacagtgctgggatgacaggcgtgagccactgcgcctaacatgacagctgttactcagcatgtgggatgtttactgttctcacatctggaaaactctgaattctgaaacacatctggttccaacagtttcagctaagggactgtgggctgtgcctcttctgagtactgaaggaaaaggtcttgcatacagcaggcactcaataaatgttagctgagatcagcagtagtcccagcccctagacagacagacaaactgatggaccctctcctctgtctccctctccgtctccctctccgtctctggctctgtctgtctgtctctgtctgtttctctgactctctccctgagcgactctggaagtctgggcagggtgtgttctgggattgaagaccaggcgcatttcctcttctgtggccctcaccttaccctgtaccctcagagatgaccaagcgagacgtgcctggcttcgccatcgggggcctgagcgggggtgagagcaagtcgcagttctggcggatggtggcgctgagcacctctcggctgccgaaggacaagccccgatatctgatgggggttgggtatgttgtggatagggaagccagagccctacctgtgggaagtggattcctggggaccccctaccctgcttggggaggtggcatttgggggaaacggacacaggtctgatctgaggagactaggaagacatggctgtcccttgggggccattctgagggaatatggcccagtctggggcagtgtgagggttgggaggggccctgggaagcccctgaggttctctgccccctcccgtcatggctgcaaccccagctatgccactgatctggtagtctgcgtggctcttggatgtgacatgttcgactgcgtcttccccacacggacagcggtgaggctctggcagaaggaggtcagggcgggagacgggtgggggactagggaggcaaggttaggggtggggggtggggagaatgaagccctgggtgacgcccctttccctgcccttcctctcccacagcgctttggctctgccctggtgcccactgggaacctgcagttgaggaagaaggtgtttgagaaggacttcggccccatagacccggagtgcacctgccccacgtgccaaaagtaggcaggatggcactgggagctggggcagggcatggaggggacagggcctggccgtgmtgagctgtcccctgccgctctacaggcacagccgcgccttcctgcacgcactgctgcacagtgacaacacggccgcgctgcaccacctcacggtccacaacatcgcctaccaggtgagccagtgcccggggcaaggtgggcgggggtgtcctaggtgcgtatgccccacgctgacctcccctccccgcagctgcagctcatgagcgccgtccgcaccagcatcgtggagaagcgcttcccggacttcgtgcgggacttcatgggcgccatgtacggggatcccaccctctgtcccacctgggccactgacgctctggcctctgtgggaatcacactkggctgacctggcattgggagagggagggaggaaggaagggagggaggggctggaagatactgaaggattcctttttgaaaggttttttttattgtaacttacagagtgtgtctgtgtcttcttgaggaagtggcctgtctgggtccccctcccagtctgagcgtcattgcagtggaatatctccccttctcaccaatcataacacgtcactgtggcagcagcggatagctggaaaccacctgccagtgcccagcatgtagggcgtgcccctagagcgggagctgccacctgcttcctggggcccaggccccccagccaccttggagggaggtactgttggcctctccttttttacagctgaggaagcaggcccagggaagggagggaacttgcccaaggtcatcaccatcaaagaaatggtatcttggctttaaggcatacactcctagtctgacttttataaatatgaggcttaatctcctatttttttctttcttttttttttttttccgagactgagtctcgctctgtcacccaggctggagtgcagtggtaggatctcggatcactgccacctccgcctcccgggttcaaacgattctcctgcctcagcctcccgagtagctgagactacaggcgcgtgccagcacgcctggctaatttttgtatttttaatagagatggggtttcaccatgttggccaggctggtctcaaactcctgacctcaagtgatctgcctgcctcagcctcccaaagtgttgggattacaggcatgagccacagtgcccagcctcttttttttttttttttttttttttttgagactgtctccctttgtcatccaggctggagtgcattggttcaaacacggctcactgtagcctcgatctggagccgccacacccggtctactcttgcaacttgatgttgcatgtacagtcgtgttccattttacggaggaggacactgaggcgcagaggaatgaagtttacatggtcactgtcactttcttagtccgttctggctgccatatataacaaaataccatcaactgggtggcttataaacagcagaaatttatttatcacagttctagaagctgggaaattcaagatcaaggtaccagcagattcagtgtctgttgagggcaaacttcctagatggcgatcttttctctaatctcacatggcgggaggggcaaggcagctctctggggtctcttttatgaaggcgcagtgagaagctcagcaggtttgtgaaaagaaaaaaaaatacataagggcacaaatcccattcacctaatcacctaatcgccttccaaaggctccacctccaattaccatcatgttggggattaggtttcatcatgtcaatcttggtgtggtgggtgatggggtagagggctggtctataaacattcagaccataataatcagtaaataaacaggcccaggatctaacccagatatgatcagttacagagctagtgatcttcaccagcctgggcaacacggtgaaactccttctttacaaaaaatacaggtggtgtgcatctgtgctcccagctactgaggaagctgaggtgggaggattgcttgagcccaggaggttgaggctgcaattgcaccactgcactccagcctgggcagcggagtgagactctgtctcaaaaacaaaaaccagtgctcttcaaaaatgaagtttttgaaatggaaaaagtaggccaggtgcagtggctcacacctgtaatcccagtgctttgggaggccaaggcgggcatagtgcaactcctgtctctactaaaaatacaaaagttagctgggcatggtggcacgtgcctgtaatcccagctactctggaggctgaggcaggagaatcacttgaacccaggacgtggaggtggcagtgagccgagatcgcaccactgcacgccaccctgagagacagcgagatttcgtctaaaaaaaaaaaaaaaaaggttggacgtggtggtggctcacacctgtaatcctagcactttgggaggccaaggagggcagatcatgaggtcaggagttcaagaccagcctggccaacatggtgaaaccccatctctactaaatatacaaaaattagctgggtgtggtggcacgtgcctgtaatcccagctactctggaggctgaggcaggaatatcgcttgaagccaggacttggaggttgcagtgagccaagatcgcactactgtactccagcctgggagacagagcaagcctccatctcaaaaaaagaaaagaaaagaaaaaaaaagtccaagcgcggtggctcacacctgcaatcccagcactttgggaggccaaggagggagggtcatctgggtcaggagttcgagaccagcctggccaacatggtgaaaccccatctctactaaaaatacaaaaattagccaggtatggtggcaggcgcctgtagtcccagctacttgaaaggctgaggcaggagaatcatttgaacccgggaggcggaggttgcagtgagctgagattgcatcactgcactccagcctgggctacagagcaagactctgtttcaaaaaaaaaaaaaagtgaaaaagtaatacatgtatgtaatccacaattcaaatcacatcaaaagtgcaactacttttatcaatttatgtatttttccagcaattttccgtgtgtacatatggttttcatgcatgtcagcatccttcacacacagttctgtaccttgcttgttttttcctcttagtatatctcaaattatttatacttcagtacatgaagagtttcctcaacgtttttgtttgtttgtttatttgtttttgagacggggttttgctcttgttgcccaggctggagtgcagcggtgcgatctcagctcaccgcaacttctgcgtcccgtgttcaagcgattctcctgcctcagcctctcgagtagctgggattacaggcacgcaccaccacgcctggctaattttttgtatttttagtagaaacgtggtttcactatgttagccaagctggtttcgaacctctaacctcaggtgatctgccctccttggcctcccaaagtgctgggattacaggcatgagccaccgcacctggcgctttttgcctatttctttgagacctggggttttgggtcacaaaacaggcaaatgccatgagccaccctcctcctctttctccatcttcttgtgctgcctcaggtcagagcacttacctgctcctgccttctcactgggtttccttgtctctggcctatttgtctccagaggggtcaaaacacttcaaatcctcctatttgtctctgtccactgtcaggagttccagttcccagaaccccaattttgcctacaaaatagcgtgtcttttcacggggagaggatttgttgagttttagtgggtactcaaaaagatctaaagccagttgggggggttcacacatgtaatcccagcacttttgggaggccggcctgtgagggtcgtttgggcgcaggagtttgagaccagcctggacaacacagcaagaccctgtctctataaaaaataaaataaaaataattagctgggcatagttgcgcacgtctgtggttccagctactcgggacgctgaggcgggaggatcgtttgagcccaggtgcttgttgaattgagctatgagtgcactactgcaccccagcctgggcaacagagtaaggacccagtttctaagaaaagaagattcattagctagacgcggtggctcacacctgtaattccaacactttgggaggccaagacgggcggatcacttgaggccaggcgttcgagaccagcctggccaatatggtgaaaccccgtctactaaaaatacaaaattagctgggcgtggtggctcacacttgtaatcccagctattcgggaggctgaggcaggagaattggttgaaccggggaggcggaggttgcagtgagccaagatcgcgctactgcactccagcctgggtgacagagtgagtaccccgcctcaaaaaaaagaaaagaaaaaagattcatgatctgctaaagttgaagaagtgggggaaaacattggagtgttagcggcgtcaagatcgggcgtgagcagaaagggcacagcatttgcaaaggcgtggaggagtgattttattgcgttctatccctaggaagcaatgacttggcctctaccatttgcagagcgcattgggaccctgctcccagagctggtttgcagtctgggaactgagatgcgctctgggacttgtagttttccccagtgccaggaaactcaaaaatcgagacatcggatcccaccacgaggtgtcgcccttgagcgagtacggtgggatctatcctatacttcagaaggctgttgcagacatccaacaatcacaaggaagaacgggagtttttctgattgacagatatggttctcaatgatagtcaagattcggatgttaaagcccgccctcttttgcctggttggctggagcaacgaagtgatatttatatgaaccaatgggaaattcttagggaacgaggtagtagctcaatccccaacaccattggtccacattgtctactggcacgtctgcctgccaataagatggtggaacttcgccaatgggcagagccaacgtgcctttttcggaaacacccccttcctctcttgacaacttgctttctgccgctattggctgttgcacaacagtgacggttcttttgtccaataagtcagcaagacggtccccagggggaaggtttactcaaccataggcccgtgcctagtttttattggctagtgtatccgagtggcggtgcagcaggccagtcgcgtgcggcgcgagtgctttgggcgcagcccccggggccggggcgggaggtcgctcgggtcgggtgtcgcctgagaaccggatgaggcggcgaccgtgaggccgagccgggagcgggcgtcttgccgaggcccgggcgggcggggagcaacggctacagacgccgcggggccaggtcgttgagggtcggcggcgggcgaggagcgcagggcgctcgggccgggggccgccggcgccatgggcaaccgcgggatggaagagctgatcccgctggtcaacaaactgcaggacgccttcagctccatcggccagagctgccacctggacctgccgcagatcgctgtagtgggcggccagagcgccggcaagagctcggtgctggagaacttcgtgggccggtgagcgggcgcggcagggatcgcgggcgggtggcggcctagggcgcggagggcggaccgggaatggcgcgccgtgcgccgccggcgtaactgcggcgcttgcgtgcccgcggcggggaaccggacggggtcggggaggcgggccctgtgggacgccctgggcagaggactccctgcaggggctccggagcaggcccgggccccaggggcggtgtcacgggccagggcgccgtaggacaggaggtgcgctggaaccctgcggtccatctggtcccagctttcgtgggtgaagtctgccatctggttggccgtgggtctggggtagatccctcttctgctctttcgggctgtccatcagaggtgaaaccggccatctagatatctattggggcgaccgctgcggtctggctggcttgttcttgtatctggagctgcccccgccgtctggttggctgtctctctgtcctgggcaagcctccctgccaccaccatttggttgtccatctgtccagtcccacctggcagccccctgctgtctggctagctgtccagggtgacctctgctgtctggccgcccatccgtgcccctcacagactttaacactgagcagtccctctgttgggtgacaccagctggcctctactgtctgactggctagctgactcctaggggaccctgtttgattctctctggctgactcttacagcttgattcctggctagcgctggctcctctcttccgtgtgaattcttctgtctgtctggccatctcctagtctgcccatgactacccctgagtgtctggcacaacggctctggaaaggggtggtaggagggtagaggggagaacagagctgaaggaggaggt

SEQ ID NO: 94787 - DNA, 32321 bp, Homo sapiens
tataatcccagcactttgggaggccgaggtgggtggatcacctgaggtcgggagttcgagaccagcctgactaacatggagaaaccgcatctctactaaaaatacaaaattagtcaggtatggtggtacatgtctgtaagctcagctacttgggaggctgaggcaggagaatcgcttgaacccaggaggtggaggttgcagtgagctgagatcgcgtcattgcactccagcctgggcaacaagagtgaaactctgtctcaaaacataaaaaataaaataataataataataaaatacatttaaaaataaaaagaatttggccaggcgtggtggctcatgcctataatcccagcactttgggaggccgaggcaggcagatcacctgaggttaagagttcaagaccagcctgaccaacatggtgaagccctatctctactaaaaatacaaaaattagccaggcatgggggtgtgcacgtgtaatcccagctactcaggagtctgagacaggagaatcacttgaacccaggaggcagaggttgcagtgagctgagattgcgccactgccctccagcctgggtgacagtgagactctgactcaaaaaaaagtaagtaaataaaaagaatttgatcagaaacttgaatgtaacaaatagagtatagtaaatatagagtaggtgtggattttactttaaggatcaaatccttagtttgagagcaggacagatgagcatagtttgtcttgtatttgatggtctggtagtaactgtcagtatggatccatataactgagtaacctcttccattgagaacaattgacaagtacacaggtgctcaacaaatatttgtaacatatttggggaaaaagacactcagactgccatattttgatgttgtaaataattgcattttggataactgtgattttgaaataattccttaatttttttagaagtcagttttctgattcagcaaattggatactaatacaggacgtttcaatggtgagggagaaagatggttgtattgggttttaaccctagaattatgaccttgggcaagtcacattttcttctctgctccccatatacaagcagaatggacttggctgtacccagtgaatctttaaggtttcttttaaaaatctttgcttctactttgggaggctgaggcaggaggatcagttgaggccaggagttcaagaccaacttgggcaacatagcaagaccctttctctacaaaaacagaaaaaattagtcaaatgggctggtgcatacctgtactcccagctactcaggaggctgaggtggcaggattgcttgagtacagttcaaggttgcagtgaactatgattgtgtcatggcattccagcctgggcaacagagcaaacaaaaaagtctttgctttggagtatgttgagttgcttggagacaaaagtatttagagtataggtgacccataggttacaatgacttcacttagaaattttcagctttatgatggtgcaaaagtgatgtgcattcagaagaaactgagcatcaagtacccatgcaaccattctgttttttactttcagtgcagtgttcactaacttgataaataaaatagaaaataataataaaatgcagtttaacgtgtatgagatacacaacactttattataaaataatctttgtgttgttagatgcttttgctcaactgtaggctaatgtaagtgttctgatcgtgttttacgtaggctaggctaagctatgatgtttgctaggttaggtgtattaaatatatttttgacttatgtattttcaacataagctgggtttattgggatgtaaccccatcgtaagttgaggaacatctattctatgagtggtgtacacaatattactttcacacagagtgaagactaaaatatttatgatgcctatgtctttttgggggagaattgttaaattttgtttgtttgttttgtcctcaacagtcaacgacaacacaaacagcagagtggtcctttggtccttctttgaagctcttgttctagttgccatgacattgggacagatctactacctgaagagattttttgaagtccggagagttgtttaaaaagcctcttcctgatgatcccaactcagaattcactgtttaccaaacaccttggtcataataatgtcattagtttctccatttttattttctgaactgtacattcacaacttatgtttctttgagattaatagatattgggggaaaaacgcctttttaggaaaattatagtgaaaatttgacagttgattggcataatttcttgtttgaatgctgcctccattatataggtccttccaggaactcaaacactgtaagtgaaatatgggagtatagtttttattatttcttcttttccttttgttttcataatataatgcagtttgttcaggaaatcagcacaaagcctgatagtactttactaaaatgactgcattctttggattccttcagtctatggttcaagtcactaaagattcatttttgttgagtccttatgagaaacagcagtatgaatcttgacggtttctgcccgtcctaatggcagagctctctgacttgggtgtatgctgccaggctgggtactttcatactttgttttcttgttttgctttaaaactacgactcagcatacattttcccacatacatttttacattgtaccttaggactcagtcatctccacttaaattgatgacacaagcagctaataaccatttctgggtttctgcctaaccccctaattgtctgttaaagccaattctctgggtgtcccagtgagtggtggctttttttctttccacattggcacattcacttctcccactcttggcatgtaagaaataagcatttacataattggaaaaatctggatttctgatgccaaagggttaaagcttcttggatttcatttcattgatatacagccactattttatttttgatcagtggcctttgggccactgttcagggtactgaccatcagtgtcagcattagggttttggtttttgtttcttttgggtatttcttttttggcacatgtgaatcttgttttgtgtaaaatgaaattactttctcttgttctctgatgatgggtttaaaattaaaagagcatccggttttggtatggggatgatccaggattatgttgtgactgatacatattagttacttgtgctttttttttttttttttggatctttgcaagggcaaaactacaagtaacgagttttatataattaatttaaatttgttacaggttttcatgttcaggataaaccatacttccaccttgggtgagaacacttgcaacagtttattaatgaggtgactttcaccttaggacaactgttgcatgccaagttttttgtgtgtgtgaaacacttcaaaactgatttaaaagatgtaaatttaaaattggttgtatctaatatgccccaggttcggtaaataaacaattctttttaaaaacagtattctgtgttttatatattgacagctaatccacattttttacacaccaactttctgttcttatttgacatgagacatgttcatgttttctgagtatttatacctattacgtctgttactttttaattctataaacttgaggatagtgaatggtaccaagttttagtttctgcataggttttccagtgtggcttctctgatggatcagtgctaaaatcttaagtatttttctatttgggaaaaaagggttgaattattttcacttgcccacgtagtttatgaatgtgggaaatagcttcaaagacagattaaatgatttgcccaaggccacagaaaagagtgaaaggtggaaccggagactagatcaccacctgtagaaactgttcttcctctgtgaaactaacggcctgctggtaataaaagtagctaccatttcttgagtactgtgtaatgtctcgatctagtactaagcactttacttggtctgtcttattcatgcttcaaaactgccattaccttgggtaaaaccattttggaagtgaggaggaaaacaggcttggaaagggtcttaaggtcagaaaactagtaggtagtagagcccagaagacacacacagatatgtaatttccctgtgcctttgctttcagaactgtctgtgaagtctcccaccttttctttttttggagacaggatctcactctgttcccaggttggcttgatctctgctcactgaagcctcaacctcccgggctcaagtgatcctaccacctcagctctccaagtagctgggactacattttttgttttttaaagacagggtcttgctttgttacctggactggagtgcagtggcacaaacatggctcactggaaccttaacctctcaagtgatcctctcatctcagcctcccgagtagctgggaccacaggcatgcaccaccacgcctagctaattaaaaaattatttttgtagaggcagagtctcctgtatgttgcccaggctggcctcattctcctgggctcaagtgatcctcctgcctcagcctcccaaagtgttgggattgcagacatgagccaccgtgcctagccgaagtcccattttataaaagttgtcaaaggtgttttgagaatgtgatgatcatttcactgaaaatgtggcttcaggctgttgtcttttacttaatttgagatgactgcagtctgcatgaattgtattcccatttatcaatcccacaaatatttgagtgattgctgtgtgctacagtgatagtccttgggataaagaagatagagaaaagaccctattagtgtgggttttacattttggtggcagagatgaacctaataagttttgtgtgtgtgtgtgtgtgtttgtgtgtgtgtggcgagaaagagataatggtaaatgctaagaagggaacataaatcaaggtaggagtttcagtgatacagaaaggaaggtaacagaagttgatttcaaaagtccaagtggaatgtaagggagtgtaagggaaaacttcccctttgctctcaggtttctctaaaaattcaactgaaaataggcagattaataggaggaaagtgatacaaatttattcggtcatgcttttacatgacaaaggaaccttcagaattaagacccaaagttacagggaaaactatttttatgcttaggctcaacaaaatatgcacagctgagtagaaataggactggacaagaagggcatgatctaatgctcatagactgagtggggaagcccagcgaggcctgtctggattctttccttctggataggggaaagaacccttcctggaatggggtcttacaacctaccagcaaaacaaaggaggtcagatacattttttttttttttggagacagtctctctctgtcacccagggtggagtgcggtggcgcgatcttggctcactgcagcctccgcctcccgggttcaagcaattctcctgcctcagcctcccaagtagctgggaatacaggcgcacgctgccacatctggctaattttttttgtatttttagtagagacgggatttcaccgtctggtctcgaactcctgagctcaggcaatctgcccgccttggcctccaaaagtgctaggattacaggtgtgagccaccacgtctggcctttttttgtttgtttgtttgtttgtttgtttgttttttgagactgagtctcactctgtcgcccaggctggaatgcagtggtgcgatctaggattactgcagcctccacttctcaggttcaagcgatgcttgtagctcagcctccggagtagctgcaggcacctgccaccacacctggctaattttttgtatttttagtagacagggtttcactacgttggccaggctggtctcaaactccttaccttaggtgatccgcctgcctcagcctcccaaagtgctgggattacaggcatgagccaccgcacctagcccagataatttctttttctttttttttttgagactgagtctcgctttgtcacccacgctggagtgcagtggcgcaacctccacctccctggttcaagcgattcttctgcctcaggctcctgagtagctgggactacaggcatgcgccaccacgcctggctaatttctgtatttttagtagagacggggtttcaccatattggccaggctggtctcgaactcctgaccttgagatctgcccgctttggcctcccaaagtggtgagattacaggcgtgagccaccgtgccaggccaataatttctttatggccagttttttcacagaaaggtggagagagagtaatatttttargttttatggctgactgtggagaaaagggattcctgtttctatgctccgtcatgggcaagagggattcttgagtttctatggctagcctcagagaatcagagatcagagagggagcagaaggtcagagagaaacttgcttctgaggctgcctctggggccttcattttggggtttcgttttcagagcctcaacaggagcaagccatgcacataggtggaggagataggccctcatagagggcacataatgagtggtcaataaaagtttgctgagtgaaggccgggcgcggtggctcacgcctgtaatcccagcactttgggaggccgaggcgggcggatcacgaggtcaggaaatcgagaccatcctggctaacacggtgaaaccccgtctctactaaaaatacaaaaaattagccgggcgtggtggagggcgcctgcagtcccaggtactcgggaggctgaggcaggagaagggcgtgaacccgggaggcggagcttgcagtgaaccgttatagcgcccagcctccagcctgggcaacagagcgagactccgtctcaaacaacaacaacaacaacaacaamaamaaaaacagctttctgagtgaagttgtatgtggacatgaatggcccaggcaaacagtgaacagaggaatgggacagtgttcttagttaggactctgaccctaacttccgggaaagtaaaccaacattcaggacgtaccggccatcggaccgcaacattcaggacgtaccggccatcagcgggtgcctgttttgcagggctgctaacccgggtccccgacacgtttctctgcccacggtagccagccccgctgtccttcggcctggacgcggtcctgtgctgccacctgcctccgaggggcagagaaagtgggagggccgggccagaatccctcccgccaaaactcctgcccggtgcggagagrygcccggagcccagggcgctgtgcggagcgggtgtaactccccaggcctgccccgccgcctgcctccaccgtcccgcggacgcctttcctccctcccgcggcgtgggagccttcgccgcgctccggaactctgctgctccagcgaagttcccggccggccgctggagctgcsggaagcggaagtgctcgttgggggtgcacaaggcgcgttcgagcagcggcgaccgacgcggcgaaggagcgcgccatggagcatgtgacagagggctcctgggagtcgctgcctgtgccgctgcacccgcaggtgctgggcgcgctgcgggagctgggcttcccgtacatgacgccggtgcaggtatcggttccctggcgtgggggagtgaggctgggagaggggcaggcacccgctgcatcggacccacaggaggtgatcggacagatctgagccctggggcgctcatccctccagctggggctcttgccttgtctccagctgcccagactggcggaatgcggagctgcccggccagcgagccggcagaggggccgsgacccaccccgccctcgggtgctgtggtctcaagcctggttctcatcctggccctgctcgctgtagctgtgagacctcgggcaaatggcttaacctctccgtgcttcattttccttctctgtgaaatgacgaaaaaataacaccctccttatggggttgctgtggggactaaataaaccagtcggcacactatgggagctcagtaagggttaccgttgttatgcatctcttcaagaatatttcttgaggacctgctatgtgtcaggaactcttctaggctctggggagtttgcagtattggcatctgctcatagccttactttctagtgcaagagctagagaaaggataatttcagctgctggtaagtgttatgaaagaactaagacggttgtgawagtgtcgcgcgaggactgcagaggaggtgagatagggtgttaaggaaggcctctctgaggaggtgcattgagctgagacctcagtgattgagaaggagctggctctgaggtgactagggggagattattccactggagagaaataccagtgcacataaatgccctgcggcaggctgcaaatagtttgagcagcagaaaggaggcctttgtggctgaacatcaagagtagtgtaagagatggattgtgcagggtcttgtaggcgcttggatttcattctaaatgtagtgggaagccatcttatctgggaggatgtttaggaagggaagggctgtgatttctctgtagagagtggcctttccaggcataagagatgaagcaggcaggtcgcttaggaggccattgtcaggtaagagatgatggtgacttggagtagggtggaaccagtggatactgagaagtcacatttgggatagctttaaggttgctaagggactggaagtggaggttaggaaagaaaagactacagggacctgaggtttttattctttttttttttttttttgagatggagtctcgctctgttgcccaggctgsagtgcagtggcgcgatctcggctcactgcaacctccgcctcctgggttcaagcaattctctgcctgaacctcccamgtagctgagatcacaggtgcctgccaccatgcccggctaattttttgtatttttagtagatacggggtttcaccatctcggccaggttggtcttgaactcctgacctcctgatccacccgccttggcctcccaaagtgctgggattacaggctgagctaccgcacccggctgatttttattagtagctgagtgaatggtgttaccatttcccaagaatgactggcgtgcgtatcaggtttcagagggaaagtcaagagttcttttttttgttttttgtttgtttgtttgtttttaacttttytgagacggaatctttctctgttgcccaggttggagtgcaatgacacgatctcggctcactgcaacttctgcctcccgggttcaagctattctcccatctcagccttccaagtagctggggttacaggcatacaccaccacgcctggctaatttttgtgtttttagkagagacgggatttcgccatgttggccagactggtcttgaactcctgacctcaggtacgcccgccttggcctcccaaagtgctgggattacaggagtgagccactgcgcctgaccacaagagtcctgtttttaaacactgagctgggtacagtggcacccgcctgtagtaccatttgtttggaaggctgaggtgggaggatcccttgagcccaggagttcaagaccagcctgagcaacatagtgagacccgcatcttcgaaattaaaataaataatggccgggcacggtggctcacgcctgtaatcctagcacttttggagaccaaggtgggaggatcacttgagatcaggagttcaagaccagcctgggcaacatagggaggccctgtcatcacaaaaattttttttaaataaatgaagtcttgagtttgagatgcccataagattcccgggaatgtggagaatgtatttccagcaggcagggctggagatgaaaactgggagtgctatgtgccctgcctagggaatgtagtgcgagcaagacccaatctctggcctcagagctcattgtctagacctgtcatccactacacagtcatcagacatggctatcaagtgcttgaaatacactttgtccaaatcaaagtgtactctgagtatcaaataacacactagattttgaagacctagtatgaaaaaagaatggaaaatgctgatttttaaatattgactaaatgtgaagggacaatatttttgatatattgggttaaataaaatattaaaatttatttcacccatttctttttacttttcttactatggctattagaaaatttaaaattgtttatgtggttcacattttatttctattggacagcaatggcctgaagcagggtcctcactgttggcactattgacattttgtgctggaaaattttttgttatggggctgtcctgggcattgtaggatgtttaacaacatcactggaatctgtccatcagaggacatcacctcccaaccctggttgtattttatttatttatttatttwttgaggcagggttttgctctgttacccgggctggagtgcagtggcacagtcacagctcacagtagcctcgacctccctgggcmtaggtgatcctcttaccttagcctcctgagtagctgggactgcaggcatgcaccaccacacccacataattaaaaaaattttctttgtagagacagagtctccctgtgttgcctggctggtctggaaytcctggccttaagggatctacccacctgggcctcccaaagtgctgtgattatagatgtgagccaccacgcctggcccaccctgggttttgacaaccaaaaatgtctccttacattgtcaaatgttccctcaggggttgagcagggggatagcaatcactgtgtagaggcagttagaataatattacacctgctgtgatttaagtgagctcaggccctggggaccagggctgaatcctggagggagcagcctccaggccaaggcctgaatctaattgaggttttttttgattgctaaaaccaggtttcttttaaagtctggcaacctctacagtgcttaaaatgagagggtttatttgaatcatgattctgtgatactagagctggaagggaccctaaaacccaatgtcttcaacsccttcctggttcagagaggaaagtaggagcgacagggctagaattcaggactcccacctcccagctcagctcactgtccccacacgccgtccacatagacacagttgccacgtttgattcaacttctctatggtgacttggttactcagagccccttttgtggtgggacccactgtgaccttagctgcccattatgttcctagggcttcgggtctcacctgtgaattgatggcatcctttaaccrgtgctttgcaatctctctctttagtccgcaaccatccctctgttcatgcgaaacaaagatgtcgctgcagaagcggtgagtgcctcgggtatgtgcagcctgtcctcgtgttctccctcagatgaactctgaggaagaaagggaaaccaaaactctgtttgcaggtcacaggtagtggcaaaacactcgcttttgtcatccccatcctggaaattcttctgagaagagaagagaagttaaaaaagagtcaggtgaggacaacaaaagtgatttattttcacctagtcatcagagagttcacattggattaagaagctggctacaaatgtgaaaaaataggccagaakccgtggctcacrcctgtaatcccagcactttgggagactgagtctggaggatcactggagtccaggagtttgagaccagcctgggcaacacagtgagacttcatctctacaaataatgaatgaatgaaacttgaaaaaaaaagacagttaatcctcattatttgtggattctgtatttgtgaatttgcctgctcgttaaaatttagaacaccccagtggatcctcggtgcttctgtggtcatgggcgtgggcagagctgcctttgttttcactgctcaggtgtaaacagtgtccttttcgtcatttatttagtgccatgttttttaccttttttttttttttcttttttccctgagacagggttttgctctgtcacccaggctggagtgcagtggtgtgatctcatctcactgcarcctccacctcccaggcttaagctgtcctcctgcctcagccttccaagtagctgggactacaggtgtggaccatcatgtctgggtcattttttgtattttttgacatgttacccaggctggtcttaaactcctgggctcaagtgatccttccgcctcggcctcccaaagtgctgggattacaggtgtgagctacygcgcccggccattttgcacatttttgtgctttatgttggtgattttgrtttttgaaatggccccgtgatgtagtgcagtctagtgttcctgggtgcaagaaggttatgacgtgcagagaaaatcccygtgctagagaagcacaagctaaggcatgagttaatgtgctgttggccacgagttcaatgagaatgaatcaatagtatatgttaaatagagtcttttaagcacaaacagacataaaataggtttatgtattgattggttgacaaaaatgtcatgcccaaagactggcaggaacctaaccctgtgtttcccctgtgagcagtggttcagcattgactaattcactgttcttcatgacttgaaagagcataactgcagtatatgatgacgagtaaccgtaattcaaagtagttgatatgtgctcagagatgctgctgagaaagtctgggaactactgtttctctggaactttcctttgtgtggtagagggcggagggcctatgagttcctctctgggagtcccttgtgctgctgactgtgtcccttccttccatgtgggtaggttggagccataatcatcacccccactcgagagctggccattcaaatagacgaggtcctgtcgcatttcacgaagcacttccccgagttcaggtgaattggatgcagtgtccctgttagtcatgggctgttttgtcgaacttaatcaaaggctgttttcttgttgtagccagattctttggatcggaggcaggaatcctggagaagatgttgagaggtttaagcaacaagggtgagtttgctcgtgtctgcttgtttctttgcttgcttttggcattgaacctaagaatcgatgtgtgatctcagcctaactgtgggtccccctttcagcagcctcctccccctgcaaaaaggtgttttctccaggccagcttcccattgtgctttgctggctccttcccataaggccctgatgagaacttcacaaactcaggttcttacagaggtcaagagaacgacgtgaagataaatgagtggtcaggggctgggggatggtgaggaactggccagcagctgccttgaatactcagctccagctggtagttgcctgggaggactcggctcagtagtggcaggttttgaattttttaaaaagaagatggaattccagatttgtgtgtgtaatctcctgattttttaactgttggcgtgtaatccacatttgaaaaacatatcttgtaggtgagccagtctgagggagccacatctggccctgagtctgccagtttgtgatctttacataggattctctaattctgtcaacatttccattttacaagtgagttacctgggacctacaatggttgagtaacttgcgtaagtcagaggttggtaagctttttttttataaaggagcagatggtaaatgttttcggctttgtgaaccatatggtctccatcgcacttactcaactgctgttgtagtgtgaaggcagcgatagacaacatgtgaataaatgggcgtggttttctgccaataaaatacttggcaaggacaggcagcagcccaggtttggtccgggagctggagtttgccaaccttgcctaggtcatagcccagaacccagatcccgtctcaccacagccctcagtctttctaccctgcagcactcttctactctcatgctcttcgttctcttcactagggcttaaatgactttggggggatataaaacttggtattttggtaatcatcaaccacattcccaagatccagagagtttggtaaatgttaactttctttccaaagtgggaacatcattgtggccactccaggccgcttggaggacatgttccggaggaaggccgaaggcttggatctggccagctgtgtgcgatccctggatgtcctggtgttggatgaggcagacagacttctggacatggggtttgaggcaaggtactggactttggacttcactggcttgagtgggcagatgatactaatacaaaaggggagcaaaatggagtttactgtttcatgactaggtatttttattttttattttcatttttatttattttttatttatttgtttattagagacagggtcttgtgctgtcacccaggctggagtgcagtggtgtgattatgttcactgcagcctcaacctctcgggctcaggtgatcctcctgcatcagcctcccgggtagctgggattacaggtgcacaccaccatgcctggatggtttttttattttttgcagatgaggttttgccatgttgcccagtctgttctcaaactcctggacttaagtgatcctcctacctagggtacccaaagtgctaggattacaggtgccagccaccatgcctggcctaagtatttttattaaccacattttaatttcaaatcattaagtagtttgagctttcaaattctaccacgtgattttattccagttctatctttgatcttaaaatgcactttccttcaagttttktttttttttttttttttgagacagggtctcactctgtcatccaggctagaatgcagtggcatgatttcgggtcattgcgacctttacttcctgggcttaagtgatcctcccacctcagcctcctgagtcatctgggactacaggcacatgccatcatgcttttttttttwaatttttggcagagacaagatcccattatgttgcccaggttggtctcaaactcctgggctcaagagatcttcccatcccagtctcccgaagtgctgggattacaagcatgagccatcacacctggcagttttgttgttttttaataaacagctttatgggatataattcacatatcattataattgtatgctaaaatttgaggaaccttggaaaaatgaaagtataaagaagaaacaaagaatcacctataatctcacctcccagtgtatgtgctataaatattttgatggcttcactttcagtctttttgaatacctgtttagtatcgtgaagcactgtgtgttgattctgctggcaagtgagcggttaagtgtgagccctctttttatcagcatcaacaccattctggagtttttgccaaagcagaggagaacaggccttttctctgccactcagacgcaggaagtggagaacctggtgagagcgggcctccggaaccctgtccgggtctcagtgaaggagaagggcgtggcagccagcagtgcccagaagaccccctcccgcctggaaaactactacatggtaagcgcctgggcttgcttcttactcagcgataatgaccagtgctcattttatggaaattgtactggtagaataaatatgtgagaccctgtagcacctatgaaatgcatttggggacagagctagctagggcaaatggcctgagtggtcctactcattgaatgaataagttaaattggacataaatgtattttaagcacagtctctaaggacagagtctctgaacctcctaccctcaagtgaccaaatgtttctattgtacatgcttggggtgtgctgggtgcagccatgactaagctctgtagttcctgggcccgtcagaacagcctgtctgacagagaagggcatagttagatgtgcaggtggaacacagaaaatcaaatgacagactcactcctaaggagactttgtggggtggaaatgttytgctccgtaaatgttgtgtatttttgacctgcatcaaatatgctgagtttcttttttttttttttttttttttttgagacagagtctggctctgtcgcccaggctggagtgcagtggcgcgatctcagctcactgcaagctccgcctcctgggttcatgccattctcctgcctcagcctcccgaatagctgggactacaggcgcccgccaccacgcccggctaattttttgttagccctgttagccaggatggtctccatctcctgacctggtgatccacctgcctcggcctcccaaagtgctgggattacaggtgtgagccaccgcgcccggccgtttttttttgtttgtttttttttgttttgagacggggtctcaccctgtcacccaggctggagtgcaatggcacgatctcggctcactgcaacctctgcctcctggttcaagcaattcttctgcctcagtctcccgagtagctgggattacaggcatgtgccaccatgcccagctaattttttgtatctttagtagaggtggggtttcaccacattggacaggctggtcttgaactcctgacctcatgatcctcctgcctcagcctcccaaagtgctgggattacaagaatgagccatcatgcctggcccaaatatgctgaatttctagtagtaaatactggctgctggcttctgtagtttcttcacaaagaagtagatgggcttttggcaacttgattgtttagtaatgaggccactcctcacccctgttctgttctgtcccattgctgggatgggccaggaggcacaaatgtagagagcacaggctgcaggggaggcagcaccatcagggcgaggaggcacccacaggccagtgccactgctgacggtacactggcccaccagcccggggctggggcttttctttctcttttgcaataagctttctcaggttaaatttttcgttaggcctggaggggttccctagctcctgaacatgtctgctgttcaaaatgaaggaggctggtctcgaaaccagaatgttcctattgctgcagactgtgaggttgtcgaggctgctctccggtttgtgtcaatttgtaggcagattaaaggtagaatgagtttgcaaatgagaaactgcacctagtgtaactggagagtgttgtcaaaatcagataggctcatcagaagtgggagttgtagttgccattgatgtttctgacaagctggactgggtgagggaggaggctagctcttcccaagcagagggaaggactctgcatagggtagtgtggagagcatgggcgctagagcaggactgcctggtgcatatcttggctttggcccctaccagatttaaccgatgaacttagaggtccttacttgtcaaatgggggccacagtagtatacagcttcgtagggttgctgcaggattaattaattaatccatgcaaaaatgttcatgatagtgcttagtacacaataagtatgggttgagcattcctaacttgaaattccaaaatccaaaatcctccaaaatctgaagcttttttgagtgccaacatgatgctgaraggaaatactcggagcattttggatttcggatttccagattagggatgctcagctggtaagtatagtgcagctattccaaaatctgaaaaaattcaaaagccaaaaaacacttcgggtcctaaggaccttggatgagggatacttgtactactgttagctttggacacactgtggctactgttgcattctgttattttgcattcgttttgcatttagagatggctgagtacatgagaaaaaattccaaactggggatttggttttggtaaaaataggatgaatgcattcaggtgaatttaatgtctctaatttgggagtttgaatggaggacttgattgcattatgaagaaaagcagtggggtctgcgtccatggaggccttttaaataatgatgtacattgctttctggaaatcagtattcaccttagagcagtgacttctgaacttggcatcagaatttcctgggggaactcttaaataatagggattcttaggttcaatctcagacctactgaatcagaatctgtatgtcgtacccaagaatctgcatttaaaaaaaaaaaatctatcctttggctgggcgaggtggctcacgcctgtaatcccagcactttagagttgaggtgggaggatcgccggatgccaggccaggagttcgataccagtctgggcaacatattgagagtctgtctcttgaaaaaaaaaaaagaagaaaaaaaaaggtaaataaataaaaatctaccctggagatggtgtaatggctggcatgtatattgggattgggagttgggaactgttgcctgttggatgactgtgtttctctgagctatatgattttgtgacatacaaattarcttttacaggcagcagcacatgttgatatttattctgagctaggtagaccagttaacattccgactaaagtctgtcctacccatgggggaaatgacattccttaaaatttaatgctgaaactgaaaatagccatggggattattattgccaaatatgttttttattagtttccctttttattttgcaggtatgcaaggcagatgagaaatttaatcagctggtccattttcttcgcartcataagcaggagaaacacctggtcttcttcaggtactcctctggtctctgtggtagrggcatcagggattcagccagaatgtgcaggtgcatgcggcctttgggttttggattccatctagcatggttctctccggaatgcttttggctgcaaataactgaaaacccaacttttgttgtccgaacaaggttggctttatttttctcccgtaaaaagtcgtccaaaggcaggcagtttctcacatgggtttcatgtgtcagtcatgtcaaggtcaatgttgatgtgattggtcttctcttcctatgtgtcacctcatggattctggatgaccactattacaccctgtcatgtctccactgaagaaagataaggggggaaaggcagagggggcttakggcaatgttagctatatccatgccttttaatcaggagagcaaagagcttcytcagaaacccctctgccctagttgacttcagctgtgaattcatcttaggggccaaaagtgggtcacgtggtggcccctcacttcaagagcagcagagaaaatgagtgcgcagcttttctgcctctgtagtagtggccagtgaagcaagaagtggttgggaatagtgtttatcagccacccatggagtccgccacagtggggttttgtcctgtggtcagaaggcagcgtagggacagatgcatatgttctttggactggttggttcttttccccttttctccagagataaatgtgttgatctttagtagtacataaaaaataattttatatttatttatatatttatatttataatttcttttctatctgttatcctacaaataaaatgcaatattgacsatgacccacagtaagaagtacaatttggtacacacccaaacaagacaataaaacaaaggttttcatgaaactgcaccctgctaggtgggatgttttctattctgttctactccagctgttaatttttttaaaatgctggtcgagacccactaaattgatttcagaacycaccaggtctgtgggttgtgaggcttagtgtgtgaaacaccacttcattacatactatgtgactcaaggtggaaaagagcggtcacagcacaggtggagggactgaagtagacaagagttagcccaaactggaatgcagtagtgcagtagtctggtctagtgggaggagcattagacctgggttctggttctgccacttactctgtgtctctggtaagttttagttccctcatctgcaaaaggatgggaagtcacttgggaatgcttccagttaaggaaaagggtccagggtgaactttattagaagggtgcygggtaaggagctcacagattcagagaatgttgagtgtccagctcccagggaaggaggctccctggcaggagttcatgggccatctctttagggcatatctttattgggatgactgccaacccctttttgtctttggatgactcagctccaagtcccaaatatctgggagaagggatctgactggcctagcttgggttatttgctgagcccttgggaatcctgctaattgggaaagaagcagttccctaaacggaaagcagaaatgtttttaaatcttgtaacactatttgtggctaagatgtcattgcttttgttctgaatgactgtttcactttaattcctttctcggggtcagggagatttcccgtgagaacatctttagacagtaaaatatgtccttgggggttttaattcatgtttaagggattttgtcaaaagattggcctttcattggctgagaggattacagattgagaactcagttgtggatgatttccactgccattttccttgtcattcccctagggagggcttgtagttaggttgcgtctgctgcagctattgctcactgttcccctctcccggttgtagaaggaccaaagtggccaatsactctaagccctctgtccctcttgcagcacctgtgcctgtgtggaatactatgggaaggctctggaagtgctggtgaagggcgtgaagattatgtgcattcayggaaagatgaaatataaacgcaataagatcttcatggagttccgcaaattgcaaaggtgggtgggcttcattgaaggtagcagctctcctgccacactgctctttcaggtccccaaaygccccattctctagtagcctgtgctgtccgcatgtgttgtctttcctgcctggaaccctcttccctctctaatctggttatcacatctctgtaaacaccccgagcctccattgccctgttccaattgctttgccttttgctatgtcatttccctagttactgaacttctgtgctagacagcaggctccgtgacacaggagtcctgtgtattgtcttcactcccagattgccctgtgcccggtccagggaaaggttgtgatgactgtcaagcagcaaggagcaaatccatttgtcctgtctgggtagaaactgtctgtggcttaaggccggacacggtggctcacgcctgtaatcccagcactttgggaggccraggcgggtggatcacgaggtcaggagatcaagaccatcctggctaacgtggtgaaaccctgtctctactaaaaacaaaaaattagtcgggcatggtggctggcgcctgtagtcccagctactccrgaggctgaggcaggagaatggtgtgaacccaggaggcggagcttgcagtgagccgagactgcgccagtgcactccagcctgggtgacagagtgagactccatctcaaaaacaaacaaacaaagaaacaaaaaaacaaaaaactgtctgtggcttattaggcttgtgactatacagcaggcaacttgtgtctaccaatgaccataacttgtatctgcttgtgctgacaaataatagttttctgtttttcttaatcattgaacatctgactatattaaaagtcttcttttggacaaagtgatatacctgactgctaggcctcagttatggagtgaattgtccgttgtttttcagatggctacaaaggattagacccatacagttttggttttcaaatggcagtgctgtaatttttaaaatccctttgctgtctctcacctccctccaatttttattggaatttatgaagtcccagagatttgtagaaagaagaaaaaatcaaaatattaccttaaacatttgcttctgtgagaagctccagcacctgtgtgtcactgtcatcgagatcagtaggctgtttgatggtgatgaagatggtggcctccttactcagaatgcttttttctcatttcctagtgggattttagtgtgcactgatgtgatggcccggggaattgatattcctgaagtcaactgggttttgcagtatgaccctcccagcaatgcaaggtatggtacgaggctgccacccactctctgttgaggaatttagcctaataaaggaggaatcccgaagaagataaacagataatgatgttcactgaaacattttatagcaagcctccagcgtgcttgggtctgcagtgaccccgtggattcctacagggcttgccagaacagttttgaaatggtttgaggccttgccctgctccatgtagagcaaggttatagaaatttcagacaatgagagaaaacaaaaaacaacaacattatttgaggctgggcgcggtggctcacgcctgtaattccagcactttggggaggccgaggcaggtgaatcgtttgagcccaggaattcaccagcttgggcaacaggacaaaaccctgtctctacaaaaaatatatatacagattagccaggcgtgtgttcctgtagtcccagctacttgagaggctgaggcaggagaatcgcttgagcgcaggaggcagaggtggcaatggattgtgccacttcactccagcctgggcaacagtgtgagactctgtctcaaaacaaaaacccgttgttttaagtagcaaaaataggcaaatggatgaataacccattcatggtgaaatcgtgatactgtattggtagcaattaaaagtactttcaaatattatcagttcttgcagaaacacacaatagaatgtctaaatgaaaaaagcaatacatamcaccacatgtgaaaattacaattactttcttcaaagtcagcatatattcctaatacatgcttccacgcataggaaaatgcctataaacccccaagtgttgatgattactcctgaggttattgstcattttcattttattctttgtatttttcattgtttcccagattttccactggggactatgtcccacctgtatgatcagagagaaagatacaagttttacttaagagttcacattaaatgtttcttacagaatcgtatctgtttgcagtgttggtttaattgccagttctatttctcacactagtaagtggccgagtccacactgagctgtggaggctagaggctccccagagcgttttagctgcagcagccatgtggctggagcctgagctctgttcagctgtcatcacctgggtacccatttccaccctgtgttctcacagtgccttcgtgcatcgctgcggtcgcacagctcgcattggccacgggggcagcgctctggtgttcctcctgcccatggaagagtcatacatcaatttccttgcaattaaccaaaaagtaagctgccgtccgttttcagatagaatgcctagtgacggggtagctggaaaagttctccagcatgtggtcagcaattgaaattacgaattgcaaactcactggggctgggctggtggtggcagtggggggccctggtggggttttttttttttttttttgagacggagtttcactcttgttgcccaggctggagtgcaatggcactatctcggttcaccgcaacctccacctcccgggttcaatggattctcctgcctcagcctcccaagtagctgggattacaggcatgcgccaccccagctaattttgtatttttagtagagatggggtttctccatgttggtcaggctggtcttgaactcccgacctcaggtgatccgcccacctcggcctcccaaagtgctgggatgacaggcgtgagccaccgtgcccggccaccctggtgggctttaaggctgtggaggcacctcggtcatggagtgaccaagtctcctgtgtggtagcatgccctgctgggacccaggcaagggttacttcttgtgaatagagacccagtgttgccatactttgctaccagattaggattgtcatgtgaaatctgatttttaaattttcttttaaaaatttaacatactttmcagagcatgtgaaatatttgggttggagttgggcttcagacctcaacagttgaaaaggaattgtttcgcttttgtttttcttggttgtgatggggagccctggggatatgatgccagccagggaaggtgagaatgtggtatgtgtgtgtgtgtagtgccccctgcaggagatgaagccccagagaaacacagcggaccttctgccaaaactcaagtccatggccctggctgacagagctgtgtttgaaaagggcatgaaagcttttgtgtcatatgtccaagcttatgcaaagcatgaatgcaacctgattttcagattaaagggtaagttggacttcttcatgtgataatgtctccatcttaactatgtggtggtcttacaagtatgagattgctttgtctcataaaaggaagtgttcccaggttttgagtagacacagaataaactggccactggctgctgagtattccttttaactttgtaaaaatgtaatttttttaatttttgagacagagtcgcgctttgtcacccagcctggagcgcagtggcgcgatctcggctcactgtaagctctgcctcccaggttcacgccattctcctgtctcagcctcccgagtagctgggactacaggcgcccgccaccacgcccagctaattttttgtattttttagtagagacggggtttcaccgtgttagccaggatggtctcgatctcctgacctcgtgatccgcccacctcggcctcgcaaagtgctgggattacaggcgtgagccactgcacccggcctcaattattttcattctaaytaaaatgaatgcattaaaccctttggttagaaaaaaattatattgtaagccattactgattgttctaatcctgttgagtgcgctaactctgatcttctgattgaatcagatcttgattttgccagccttgctcgaggttttgccctgctgaggatgcccaagatgccagaattgagaggraagcagtttccagattttgtgcccgtggacgttaataccgacacgattccatttaaagataaaatcagagaaaagcagaggcagaaactcctggagcaacaaagaagagagaaaacagaaaatgaagggagaagaaaattcataaaaaataaagcttggtcaaagcagaaggccaaaaaaraaaaraaraaaaaaatgaatgagaaaaggaaaagggaagaggtaaagtttacttttacttacattaacttagaatcttgaacaaatttattgtagtagttctttaaataggaattgtgtggggctgtcagatttctgttacgttggcgaccagggtggggaatttgctctatttgcagaagccaatctgagagcttatagttcttgagttaaaactgctggtttcactasaacactattgctgaaaaatttagtagtttattggtttcttctgcacttagggttctgatattgaagatgaggacatggaagaacttcttaatgacacaagactcttgaaaaaacttaagaaaggcaaaataactgaagaagaatttgagaagggcttgttgacaactggcaaaagaacaatcaagacagtggatttagggatctcagatttggaagatgactgctrattccagtgccacagatgaacccacaaggacatagctgttccctaacttggtggatggctccagtttgcttttaacgaaaatcacaacttcaggagacatctgaaaagaatgatgtctctgaaagctgtcctttcagatgagggagaaatgaaggatttcacacttcagaatattttactaaaaacattccagtcttggccgggtgcggtggctcctgcctataatcccagcactttgggaggctgaggcaggaggatcacttgagcccaggagttcaagaccagcctgggaacacagcgagaccctctcattaaaaacaacaaaacaaaacaattccagtcttggagtagtctaacagaagaaaatgtaaaattatttgagtgtaaataatagatgtcagtatttatcatgatgggtcacatatagacatatgtacatattatatatatatatatatatatatatatatatatatatatatatatataagctcttttttctgaggctattttatagttatttttaaacataaagatacwgaagtcttcttgacttctgattttcaaaaccattcctcagtatcttcaggcatttgacctcctgaatgtgcttggccctgggcttcagttatcctttgatgycctgcaggggtggctaatgtgctggggtttttctgtgttaatagtcacagtattgttttattggtgaatagctgaaaaacagagggattaagtcatattccgggaaagagaattatagtttttatgcctcctgttgaataaatggtgtcctgattgcctgggtcttaagtgtgtaaatgtagctggacagtgttttcccctagatggcctggtcagcttgcagtattgatgcaacaccacatcagcgtctttcatagagtttatttgaaaagatgctgaatttattcccaagtataattttaaaaagctgtttaggacccaaacatatttaaacatctcttacacatacagaatttcagtttacaaatattccagaaggcattttcttaagcagtgaaccatgcagaatactgttgctaaacatcgtttctgccttcctcgtgttctcttggtagtttttactgtttggcttgatcctgctgaggaatgtgcttaccactggaagccagatgcagattcggcaagtgtttcttgcctcttacaaggcaccgcgtgtaacgtcctgaccagctgttggtcatttgtggcagaggggtgtggctgcttttcgcctgcatctcgcgtgctttaggcagatcagtctggagtgcaggggaggatgaagacaggtggacttgggctcatctttcatcagttaagtagccaattatctaacttgtatttctggaaactgaaaaggaaagtttctagaaaccgtaagaacaatttaagttgggatttagaatagctgacacatttttagatgggactgaaatgagtaagaaaggttctccaagatgtatgattttaagtccttactccataaatcttcattaaacacatctcagttttggcctgactcactggggtgtcaagcagctactcaccctgcctcaactacgtaagctgcaccttggcaggaaagggctcacaggttacagatagagcttgatgagctcatcgctgactgctgagggtgtcagcacgcccaggtctgtaaacagcagagtgattaaggaaggggcagtgtagtcgacccacggatgctcctctttgaggtcttgtccagtctgcgcgaccttgagagtgtctgccttatactgaggagagaagtacacattagtcggcactgaatatttagtgctctgacctggtagggccttggtgtgagtgatcagtgtgctacttcctgagactgctctctgaaaatgggagaaactaagctatgcaggacactagagacgagggcagagttgtggccatgagccagatcatggcagtgtgctggctgagagctgtagtgtaacaaacttaaatcccatgtcccctcattctcatgccggattaacttctccagacctctcaagggaagatcgagagtcacaatagagagcttgcagcgtgccagggactgtgctaagattatcttagaatcctcatgaccctgtcagatactgctatgccattttacagacaagaaaaccggttcagaggttgaaatgaaaggacttgcctcaactcgcacagtttgtaagttgtggtgatgggagctgagctcagttaagcccaaagctgggacttacccaccagcttcgggcttcctctccacccatctatggtgctacttaaagagactgaaagactgaagttctagggacaaatgtgtgagtccaatcaccaatttatctttgtattccaagtgttggggaaagtagcaataggaagtgaaaaaattactggaacattcttaggactacaatttccaaaggtttctgtttagactttagtaccccttcaaatatgtaaaactcttgccttaaacttatctgggacgtcttgctggtttagtggaaagagccggacaaacttgaaactttctgcaaccacatagaaaggtttgttctgtgctttggcacacacagccatctggttggttccaatctgggaaggcagaaaatggaatggatgagctctagagtgcatctgaagtagaagccacagaaaagcgggccgggcacagtggtgcatgcctgtattccagcattttgggaggccgaggtgggtggatcacctgaacccatgagtttgggaccagcctaggcaacacggtgagacctcgtctcaattacaataaaggaacaattaaaaaacagcaatagaaagttatgtatataatatagatatacatatatctaatacatatattagatatatctaattctgactttggaatcaaaaaaataaatgtttctcaaaggatatagaaacagccactagaggctggatgtggtggctcacgcctgtaatcccagcactttgggaggccgaggtgggtggatcacctgaggtcaggagtttgagaccagctggccaatatagggaaaccccatctctactaaaaatacaaaaaattagctgggcatggtgggatggggggtgcctgtaatcccagctactagggaggctgaagcaggagactcgcttgaacccgggcactggaggttgcagtgagccaagactgtgccattgcactccagcctggacagcaagagtgaaactccatctcaaaaaataaaaaaatttaaaaaaacaagtgttggcaaggatgtagagaaattggaacctttgtgctttgctagtgggaatgtaaagtagtgcagctgctgtggaaaatcattagtttctgaaagttaaatatatagttaccatgtgactcaacactctgcctgcagacctccgcctcccaggttcaagcgattctcctgcgtcagcctgccaagtagctgggattacaggcacccgccaccatgcccagctaattttttgtatttttagtagatatggggtttcaccatgttggccaggctggtctcgaactcctgacctcagatgatctacctgcctcagcctcccaaagtgctgggattataggcgtgagctactacgcccggccttatgttacatatattttaactaaaaaaagctttcatgaagcttttctaaattaaataatggagagagagattgtaataaattgaggtcaaatgtgctcaattaaaatgaaaacaaatgacaggccggccacagtggctcatgcctgtaatcctagcactttgggaagtggaaagattgcttcaggctaggagttcaagactgcagtaagctatgatcactgtactacactacagcctgggcaacagagtgaatgtgtctctattttaaaatatatataatatttatatataaatacacgtattttatacatacatactttatatgtaaatatataaataatattttaaaaatatttgtgtatatatattatgtgtgtatatatatatgcataaataaaacatacatatacacataaataaagcaaaaaccagacaaaccccaattccaattcaagccaattttgtataaatataaattacactttttttttttttttttttactgagacagggtctcaccatcgcccaggctggaatgcagtagtgtgatcataacttactgcaacctcaaattcctgggctcacgtgatactcctgcctcagcttcctgggcagctggaactacaggcaagcaccaccacgcccagctaatttttctaattttttgtagagacagggtttcactatgttgcccaggctggtcttgaactcaaggcctcaagtgatcctcccaccctggcctctcaaattgctaggattacaggtataaggcatcacacctgaccaaattacattgtcttcatttatgtagatcaatctaaaaaagatttgactgaaactggactgcccattgctatgacttacgggaaatgggcaacaactcaataccatgatgaagtcctgaagtgaagcaggattagaaggaaccataatcaacactgctgtggtgtcctaggtcagcaagacacctccaagtcttgagcagggaactggggagaactgatgctcttaccttgttaataattcctccgttttcaacaactccttcagcaccaactatgacaagatctgctttctccatgatgtagctaaggggaaaaaaagcttttcatgctttattttcttggctctaacgagtagcatcatcatctgcaaagatcaatattccatttctatcaaggtaagttcctcccataactacctgttttttttaaagcgcacttaacacgcgatagacccctggcattgttaccaggggtgttttctggtcatgaccctacaatgagacatacacttcacactgccgcccggcgcatgcacacgtacatatgtgtgtaagtgaagcaagaatgtcctgacacagcagtcttccttccaagtgtggtatcctctactttcttttctacttcagcacaaaccaaacaaaattttaaaatctgatgagatctgaagttggacaaaagtgttatgcagttttaaaaatctttctttttttttttgagaccagatctcactctgttgcccaggctagagtgcagtggcatgatctcagcccaaacctctacctcttaggctcaagcgatcctcccatttcagcctcccaggtagctgggaccacagcatatgccaccatgccctagagatggggtttcgccatattgcccagactggtctccaactcctgaactctagcgatccacctgcctcaggtatgagccactgtgcccaaccttaagaatctttctggtaggatgaaggccaatttagtctttaaaatgagcaattagtagaattcctcaatatccttacttttgaacacattcctaatttccttaatcatctatcttgttttcattccaagagatcactactcttgttttttcttgggaaatacactgacaatcccaggaacatgtgacttggctttgcgacacaagctgcatcttctaggtgagacaaagcatcccagtatgccactgaggacagccaggtcttcacagaaatacagagccctgattaccctctgctgatcccaactgacctttgtactttgctcttaaaatgcatttgcactggctgggcgtggtggctcacgcctgtaatcccagcactttgggaggccaaggcgggcagatcacctgagttcaggagttcgagaccagcctggccaacatggtgaaaccccatctctactaaaaatataaaagaattaacgtggcatggtggcatgcgccggtaatcccagctacttaggaggctgaggcaggagaatcgcttgaacctgggaggtggagattgcagtgaaccaagatcatgccattgcactccagcctgggcaacagggcaagactccatctcaaaaaaacaaaaaacaaacaaacaaaaacaacaacaacaacaaactcaacacttacagccataaagctatagacacaactcccactctccccaacatcctacagctctgtcttctttgtatgctatcacaacctcataacaagcttgctggtttagggcagctattaattaagaagtaggacgctacctggtgtggctttatgaacgggactcaaactttcaatctgaaaacttgctgtaagccagcatggggtgggggaggtgattatggctggggaagatgggcactcacccgacagcagcatctagcaccacagtgacagggacgttgaggtggcagagggctttggccattttcttactgaagatgacattttgagaacgttagagaaagtacaagacagtaccacagtgatgtatgtcacctaatgtggacagtggatgtttgcttgaaactcacattaatactaatgggttaaggggcagatcccaatactttggactaaggaaacaagaatttgagttctttagaaagaagtatttttggaaaactatactcttagactctgggtaagagatgtaaattcaggaaaaaaggaggaagttttgctttgattatcgtctagagagagggagatataagttacctattccttgataaaaatcttcatcaatacaatctctgctcttccacggagttaactacttaagtgaaacccctagatcatatactgcggcctgctgcaaattcagtgatttttcttccaaaggcaggaaaaggtacaatgaaaggcagtgctgactgctggcaagctggg

SEQ ID NO: 94788 - DNA, 29282 bp, Homo sapiens
  misc_feature (1)...(29282): n = A,T,C or G
gtttcactctgttgcccaggcaagtgcagtagcatgatctcagctcattgcaacctctacttcccaggttcaagtgattctcctgcctcagcctcccaagtagctgggattacgggtgcccaccatcatgcccggttaatttttgtatttttagtagagacagggtttcactatgttggccaggctggtctcaaactcctgacctcaagaaatctacctgccttggcctcccaaagtgctgggattacaggcacgagccactgtgcctggacttatttcattaaataagttttctatatcatttcctttatactctccttctgtaataccataatgcaaatatttgtttgcttaatggtgcttcataactcctgtatgcctccttttttctttttatcttttttgttggtttgcttgttttatttcaaatgacctatcttttaagttcagaaattctttcttctgcttgatctcatctgtcattgaagctctcagttgtatttttattttattcattgaattctttagctctaggatttctgtttggttcttatcattgttgaatttcttattcaaatcatgaattgttttcctaattttgttgagttttctatctttattcttttttatttcattgagtttctttaagattattattttgaattcttttcctggcattttgagtatttccttattattgcaatttgttactggagaattactgtgttcctttggaagtattatgtttccttgcttcttcttgtttgatgtgtccctacactgatttctacacatctggtggaacagtcactccttccaatttcatggagtaggttttatatggaaagacttattctcatagatcggtcttggggagtagcttcagggcagtgcgttggctttgtttctaggtgcatgcagtagtgtagcatctgcatagtttcttcaactataatctatccttgcaatgtttatgagtatctcggtgtcctaggctgagagattttgtggcagtggcagtgcagctttgccatggtggtcttgccaggcctttctcatgtctgagtgcatgtgtggccacattgggttggccaactttgggtctggctctctgtgatttagtgccatggggctgtttcccaagcctgggggtcaggtgtgtggctgctttgatggcccgcctgcttgccttctaaggattgcctatggggctatctcccaggcccaagatatgagtgcatggctgcttggctgcctggaagtgtgtttgccagggcaatccacaaggccatttctcaggtatgggatgcagccacacaccttcttggctggcctgggtgcatgtctgctgggggtggccaacagggctgtttctcaagcgttgactgcacatgcaggtcctttgggcaggtcagcagcatgtccatggtaggggtgtggtcccatgctgctactgtgtcttaggccctgggcatgggcacacagctgctctgtgggcccagtggcatgtcagctgttaggtggatcaaggacctctctcacttgggagagggtgtgcagcagtttagctggcttaagggtaggctctcctcagacaagacttccagagtcttcctccaactgtaaaaccagacagtgtaggttggtttcactgctgtgcaggaccagagtcacaggcaattctgggcccagaatccatgcagctggagttgtgggattcakccacctatgggcttcacacagctactcagtcagcttctcaagtttctccaagccctggttgtgaatgcgaggcaatccaagggtgtgttcatggagggagtaggtgctacaggcctgtttttcaggccctgtacatctgcatatggccactctgctggcctgggggcaggcatgtcagctgtttgatgggctagggacctctcctgcttgagggaggacacacagccatttggctggcttaaaggaaggttcaccctgggtgagactgtcagactgttcctccagctgtattgcagatgacaggggttggtttcactgtggtgcaggaccagagtcatagccaatcctgggcccagtctttgtgcagttggcccacatgtgggcttggtggaatgaagatggagccccagtgctggagaagtgcaatggctacggcccccagagcaaggcacagtccagaaatggctctaatctcaagayggcgccatgctgcagcagcttggctcactaagggaagggtgtgtacacaccctgtgctcctaatccggagtgatacagctatatggattcccagaagctcttcaaactgggcacggggcttgcaaggactgtgggattattttgtaatgaggactggagtcatttacagtggcaatggagactggtgaggttcttttaccttctccctaaaaggggacttccctcctgtctctgggctgatgcaattgtggcaggcaagatggggctacagaggccatgtgcctccatggtactctcttgggcttccaatcactacaagtacccctttactcccccattgcactttaatgctcttttttcataattgcagttaaatattagcggtttatttattcccttggtcctttcttatggtggggacaagaactaggcatttctagtcagccttcttcctgacgtcactcattccaaaattcttagtgtgagtcacagtttaaaaatttgaaagctactggtagtggttaagagtttgagtgctatagtcaaattcctaggtttaaatattgaccctaacatttacttaatgtgagatcttagcaatttttctcacttctctgcatctcagtttcttcacgtgtaacatggattgatcatagtatccatgaaaggggtggttatgaagattaaatgatttaatgtacataactcaatagatatataagcagcagcagcagcaccttcatataacatatgccaagtgctgaaccataatacagtgtccaaaccataataaagactcagtagtggtttgtcgttgtggaagagacttctgttgctcaccatacccattcacttctgttttctggcatacaggaggatgacacttccccatcccattgaagataggcctggctgggctctaccacmagatctggttaaaggattataggtagaagtgatgtgtgccacttccaggactgagcaattgattgctcatttgagactcttaggttctcttttgccttcctaagccaaaccctgaaaccttgggttgggacagcagggaaacaatgtggtgggacctccatagcttgagtccctgagtgacaatgtgaacagagcctactgtcaccctcagctccaccagcttgtgttggacatgtagcatataacctttgtttgtttatagaagctttattgatgtataatttacgtaccatatgatttacctttttaaatatgcaattgggtggtttttttgtatattcaaacttgtaccagatctcgcagggccttgaatgccaggctcaagagtttaggttttatcctatgggaattggacagttcataagaagttgtcttttaattcaaaatgtgttcattaaggaaataatctgacaaagagtattccccatttccttctgtcttcttcctaaatttcctaaatgttataggttgtattttccttcttagcatcattccatagctatatgactttgttttctactttcaccttaacattacctcatatacatttttctctgtgtctttgtcatctttacttttgatggctacaccttatctcttgctattgttggatatttacagttttactttaagtatacagcattttaaaaatacatacgcatatgtgtatatctgtgtgcaggcctgggactaagggaaggcaagtgccaaggacataaatgtaaaaaagctcctaccttctggcatgaaaatttgtacctgtgtacctcatttgtcttaccttggtcccagcccagccctatacctagtgtgtgtgtgtgtgtgtgtgtgtgtgtgtgtgtgtgtgtgtgtgtgttttccttttaaattatttccttaggaaaaattcccatgatgggagattactggttcagagcatgttaagattccaattactagagtgtttctcaggaggattccattgaaggtttttttccctttttcaaacaaaattttgatatgtatacttatcaaaagatgggagatcaaaaatcttgagatcaaaaattttggtatgtgtacattttacaaagattacagaggcaatgggggatgttagggggctatcacaatagcatgtcccaactagagtgctattgttgctatagaaattccactgatacaacttttcatgtctgcatggcccagccaaaatattctgggtttatttatttattttacagacagggtcttgctatgttgtccaggctggtctctaactcctgggctcaagcagtcatcccacctcagcctcctgagaagctgagactacaggtatcactccagctttagacacagttataacttcatgcaatcaagctgtatactcaattattatcaaaccaacaacaaagcctctgatattgagtccatgtccctaacagacgacccttctgtgtgtaccaacctggccactcaaggtgtatcattttcacaagagattagctctttggatttggacccaggaggttcaattggcagagcaacctccaagtcaagaggactctcatggaggaaggaacttgctgttttacacaaagcaagttcccagctttaggctcaagttcaaattctattacttggggacaaatgaatttgcccaatagcaacaatttttacaaaagttacatggaaaaatatctgggctagtctgttctgtataaatttttccaggagggagcacttttaaagaaagcaccaaatggaaaatcaccggcatggagtttagagagacctggtgcttgagtcactaccaggcagatggagttcccaatcttgcataattaggggaaagatcggagggtgatggagcagaaagagcagttggggtgaggtagagtatcatgaagagaggttgttggaaagaaaccaaaattgtcttcaaggatcttcaagtgacttttcttaggctatcttggaaaaatgtgtgtttctacctgccaattagggtgatcaatttactattttgtaccttctaatttgaaatactggaagctacaatattagagtcaactttttcttctgtggttttctgtctgttcacttttcttcctctagagagttttgataagttactgtactggaacttactgctttgatagagtctcactttccaaagactgatgaaatttgtcttactgattctgaatggacagccttactttccaaattcttctgagagttctggatcaagcccatcaaggctttctaacctcaagaacatcaaaggatgctggcttttggtggaaggcttgctgaaccacacctagtatgcacagacacagctaacacctagagtggggtgcaaagagagatctagaaggctacaaaaagtctgggcaaacccatattttgtgaaggtgctttgcaaaaggattgcaagccatttttctggcatgcacctttgtctaagaacaaagtgcggtaaactatatgtgtagtcagtatgattcacatagattaaggacaaggtattcgtcagattcccaaagagcatcaaactggggttggacaacaaaggcattcttctgggctcttaatgaaaccaaaacttatttctagtctatgtatttatgggatgcctgttattttcgctaaagcattcgctttcccaccagatacagcagctgaggaactcctttctgccacgcggggcgcgggcgagcgttgggggcggaaagaatccgctgccactaggaccaggcggaagaagcatccccgccgacccttggggaaggccgccgcggcacccccagcgcaaccaatcagaaggctccttcgcgcagcggcgcgccaaccgcaggcgccctttctgccgacctcacgggctatttaaaggtacgcgccgsggccaaggccgcaccgtactgggcgggggtctggggagcgcagcagccatggcaagccgtctcctgctcaacaacggcgccaagatgcccwtcctggggttgggtacctggaaggtaggtgctcgtgggggcgcgggcccggggctcgcctcacactctccgcgcggcctgtrttggcgagggaccccgagtgaccctgagcagctcgccccgcggacgcccggcgtgctgggagccacgcgcgggcttgcagggtccccagcgggctggggtcggccttgcagagaccgggggccttggctccccgggttggccctgggcgtcagggcagcatcctgcgagtggggtttgggagcagctcacgggagcccccgccctaccgcgggcaacccttgatgggcggcccaccagtccgcattttgggtcctagcgggcgccccaagcggcacaacgcgagagggaggcggggaaagtgggcttcacagaccggtggacctcgggcgcagacagggacgtggagccgtcggcaaggtgtgggagcgcagacccagcctcctttccctcgaggcacctgtagcccggttgcctcacttgtaaatagttggtctcaatcgtttcgattcttgccctccctgaggaataagcatctcaagccggtagagggcagagaattaggtggcgcgagtttgcccggacccagctgttaacaaggcgcagtgcggagctcctcggccaggcgccgcctcggggtgccctgggtctggaactcgggagaaaaatctgggcaccccgtagctagttgataattcaggaggcgccaaggttagcattttccctgtaaaacctcaacaccacacagcgtccccgagaagtgcctagccggatgagaatgacaataggacatgaaacatcataggatatgaaaaatgataatatgatatgaaaaaccaaaaataatagcctgagcctgattatctgaaaattgagcaacaaaggtggtggtatgggagctgaggcaaaacctagaatttttaaccttctaagtattgcatattatattccacagccataacctgggtttctcagtttctgtttttgttgtttgcttgtttgtttgtgacagggtctcgttgcccaagctggggtgcagtggcacaatcatggttcattgcagcctggaactcctgggctcaagtgatcctcctgcctcagcactgcgggtagctgggactacaggcgctcaccaccacacctggctaatcttttttcttccccgcagagacagtctccgcttgttgcttagggtgatctccaattcctgggctcaaagcgctcctcccacctcgcctcccaaagctacaggtgtgaaccatctggcaggcccacgtcccaggtttttctcttaaaatttgaatatgggcctgggcgttggatatttacacacagacaagggaagaaaacaacagaaagaactgagtgaactgtgagatgtttgaaataggacagaagagtttacatgtaccctaaaacctgctgttgaaaattagtaaatataaggtaagaaaaaggtcatttgcatcagggagagtgtttcttggccagaatgatcagggtacgtgatttgtttcctcsaaaaactccagtggtgtctctaaggttgtaattgaattacaaccatgacaccaagctaatttccatctgttgcatgttatgctcttggaatggatgcagaaggatgctttcttggcaatagcaaatactttctaagcatgatgcaacgcacagatatatacatgtaactggaataaaaattacttaacagtacttaacctatgtaggctgcatttcaatatttttttctattccatttttccaaaaattattgtcatacctccagaagctagttytgtgacccatcatttgaaaatcactactctagggtaaataaggagtaaaagtttatttttttttttttgagacaggggctcagtgtcacccaggctggagtgcagtggcatgatcatgattcactgtagccttaacctcttgggctcaagtggtcctcatacctcagcctcccaagtagctgggaccacaggtgtgtgccaccacactcgggtagtttgtttttaattttttgtagagacaggtttccctatgttgtccaggctgaggagtaaaagtttatgaaagagggtttcagattattcacttgagcactcaatgccccaaaaagctatgtatttgtttaagataacatcacatcataacatctgtacatttaggttatgcattccagtagacagagttcattgagaaattggataatgtctgcttcattcattactatttctagcacttctcacagtgcctggcaaatataggagtaggtatccaaaagttatgtgttgaattcatatgaagaagtaaaacgactttagagatagctgtatggtgaaaacgcccacttgtattcctgtggatgaggagatcaggttggtgtagaattgtacggtgggggyagcggggaatggtgggtcaaagtaatggtataaggatggacttggaatcaacttcctttttttttttaatgacttaaaacctttccctggggccgggcgcggtggctcacacctgtaaccccagcactttgggaggcagaggcgggcagatcatgaggtcagaagatagagaccgtcctggctaacatggtgaaaccccgtctctactaaaaatacaaaaaattagcccggcatcgtggcacgcacctgtagtcccagctacttgggaggctgaggcaggaaaatcgcttgaaccccagatgtggaggttgcagtgagccgaggtcccgccactgcactccagcctgggcgatggagcaagactccatctaaaaaaacaaccaaacaaaaaaacctttcccttgtatgtgtgtatgtattctttcacagatgctcgacagaagatgtgatcctttgcctgtctttgtgacagctggaggaggccctgcaggcaggtgcagttccttattctcctgggtcttcccatgccgtagcggctgtgttgtacctttcagaccctcagcagggctctggtagtctctactcttgaaggtcctcaaactccattctcttctcaggtgagggtttcaggcagatggggagaccatctctgccccagacccatgtggcttggacagggtttctttctggcagtcttgccttctacattggatagtaaacaattacacctgtaatcccagcactttggaaggccaaggcgggtggatcacctgaggtcaggagttcgagaccagctggccaacatggtgaaaccccctctctactaaaaatacaaaaattagcccggcatggtggtgggtgcctgtaatcccagctgcttgggaggctgaggcaggagaatcacttgaatccagaaggtagaggttgccatgatctgagattgtgccactgcactccagcctaggcgacaagagcaaaaaaaaactcggtctcagaaacaacaacaacaacaaaaacccatcacagcattgtaaagccaggaagcttttaaaacagagatgatgtctggtgcccaccagtgtcttgttactgatagtgtttttaatctagttgaaaaattgttggaggtaaaagtcattgtaagtctcctatgtatgctcrcagaatactcctagggctgaaggtacaactatgtttctccatcttttgccatgatcactacctccctcccacctaggagccttgtgagacttttttttcccctaatttgccccaaaataaaattgtaatatcagagataatattgtacttctgcttatggccagtagccttctagagggtcacaagctgttctataagctgaggggggtttttttgccccagagaactaatttttgtctctttggggacaatagcacccactttaagaatgcatgaggtaaaagaaaatgtgccaggaaagacttgctccaccttccccaagtggggtaagcttgtgatggcccaagatccttggatggggtgagggttgaggcgctgtgggcatggaggtaacacaggagccagatttactgttcacttccctggtgtctctaaagcccccatctcttcctcttcaagaccaaagacatttaaataagccctgcccctacagggtcagtcctggtccatgcacatctcaactagttggaaacagcagtgtcttagaatttgggacaaattgattaaaacagaacaggaggaagttaatttctgctgccaaacctgattctgagtgatcgtttcctgttccttgctccaggattatcagcacagcattctcatgcttcctactcaggaccgtttctttrcccaaagtgaagtttsctttgscccctccccttatsctttgatttcagtagtaacacctgctaactagagaacatttcaaaaatgaagagttccctgttcccagagatccccgtggttaatattgcaaaatatccaatctctgagatactttggttttaccataaacactgtcctgtgaccgtcttcctgtttagcactgtggcttgctttttgacttgcagagggaagagagggaggggtatcttgaagtaactagcaagacctgtaagcaaaagggaagaagactaggttttaaaaggagtgttgtatctgtgtaggagggagacactgattttagttatcagtgtctcagagttggtattagccagccggtgttatcaaaggaggaactaggaccgctgtcttgaaggaggtggtggaggactcaagggcagaggcttctcactgccatcacttggtgccatcagcccagagcatttcaagtcactrcccaacgtagagctttgcagagccagaagttctgggaggaatgggcatgcatggttttgcccatcaagggcacacagmttagtggcaggatcgggttagaaacatgtaggatttgtatgattgagctgtaattggagtgtttcatatactgcatttctacagctctcatcagtaatggctgtgcctggatgccacccagcatgttttcatagtttaccttctttttagaagtcaatctggacccctccttctgtttgcattttctctttgttgacatggaatggggagatgttgtcatcctgtgttggcattcccaagtttagtgaatggtttctcaccatagcttaagttggctgcttcatttttcataaggcaaattagtttctctcagggaagggctgtacattgagatcattaacatagaatgtggttgtggatcctcgtacattttcattgcagaggtgactttttccctccagcacctttgatcagcctcccagcacacatgtctccagcgaatggcacatatccaaggaatgatcagcagcttcttcgtgacctcttgcagtcattgctgtcttttacttttctagaaaaacctctcacaacttttttttcatktcgtgccaasscaagcttgattatcctagtctgtgctcttttggttccmaagaactgaaaaaccactttaatcttaagcaggaaaaaaaaaagtgtgtttggggtggggattgattgacttccccaaacaacagccgctgacattaggtgtttgagattcagggttgtaaatgttgtcaccaggatttggcctccctccactttcctgcagcagctccaggctgacattctcccagctcagtgaccccagcagaaccggggctggactcaggggttccaattcaagtgcaaagattgagtcttatggcctggattgagtcatgttcctgtccccgcaccagttgcatggcaggcagtgcgtggctaggctgagcctgcggagtgtgccctcagcagctcctcagagaaaaatcaatcaaggcgccatcaagcctggagaaagttcagtgtgtcctgggcagtttcctgcctgggccccagttgttctttctkgggtagggatgtcctctgctctccctgctgtcatcagtggtggttgtgcccggacaccactcagggcctgtggtaaggcattctttctggaaattgagattctctgttccttcaaccgtgcagagtggggaaggctgcaagagcmvsttctgaggtcctccagtcaaataagaggtcgccagrtcctctgagggtcgtcccctcttaacccacaccttcgatgagcatccccaccctgcctcgctgctccctctgaggtggagagtgagctccatgctaacaggctctggtaacgggcttgttcaactgggcccctttcttccccaaagcctgttgaaaatagctgatgtcaaaacacagatgtctgcagctgctatggccykggggggtttttcttttcatttgtttctaccccagctctccaaaggaatgtgctctgttcattcaacagcccgctgcacatgtttattgctcagctctgtgatcatagcaggatagtgaaagttgggggatacgtgtccatgcagcctacctgggtgccagtgaagcgcgatgccatgtaggcacttcctcctcctcttcagtagccaggctccccacagcygttctggttactcagatggtcaggtggcttggccatggacacccattcagtcattttgccaggtcagccactaaccrtttggtgatcttccatgatccacattccccctcgtttccctttaacttatttctctctgctgatacctctgaggggccatctcccgtgtctccaccccttgaagcagatcctcatacagtgagaattgacacatgggcctttgaataaacatcagtgatgtgcttaacttcatgataatctcccagaaccgcttgaaaacaagcgactgccggtatcagaagccatgcatgaaaaragagcgtaaggggcaggcattcactggctgaactggggagccacatgggaattggggtccataggacatctatttttgaaatattttgagatatttgaaggaaatggtttcccttactatctcagcattcagagtgtggggaaatgtttttaatacagtggtttgcaaatcagtggatgtgaagaagcaagaaaatgagatggcttcagcatatcttttaaaagtgatctcacctacacttaagtggctgtcagattctcctacagggcaatgctgtgtggcctttcacttccatcccccgcgtctgaggctgatagtccagaatgctgctgaggaagtgcacgtggtctgtctttgctgaacaaagtggcaggctggtcagcaggkatcggtggctgccactgcccctcctccttgctgtgcagactctgcattctgcggggctcacgttctttctcctttcagtcccctccagggcaggtgactgaggccgtgaaggtggccattgacgtcgggtaccgccwcatcgactgtgcccatgtgtaccagaatgagaatgaggtgggggtggccattcaggagaagctcagggagcaggtggtgaagcgtgaggagstcttcatcgtcagcaaggtatcgktccgcggtggggctggaaggggctctcggtcccatcatctgttggtgcatcagcccaaagccaagtccacactcaatacagctacacttttcactgatgggcgattcttccnggggaaacgtatcacccacggccatacagggctccagagctygcccatccttggctctctgttgaatggtcattccatctgggcccattgcttagagtcccgtgctgatgaggctgaggttgtggattggccctccctttccagggagtcgctttcaaggatggaacttggttcccatctgcaaactgaatctccagtgctagccactgtctttgacctgagatactgatgcacaaaggacatgaggcaggaggatggggctggctccacaaacaccagcccggggggaaagtttcgagagttcttgcttaggcctagggcaggctagccaatctgtccattccattttgtgtcctctggtccttgtaagaggtctctgtgacctggtcatcctgcctgcctttggaaagttaggatccagtacgcagtggaaatsccctcacaaccattcacagcatcatggtaaancaaatgggttttggggagaggagactgctctgtctttccagccaggaagctgccttgtggctggcaatgatgacatgtgccctctcgctggcttwgctgtggtgcacgtaccatgagaagggcctggtgraaggagcctgccagaagacactcagygacctgaagctggactacctggacctctaccttattcactggccgactggctttaaggtatgggatgcctggtgcagaccaggtcccttggggctcaggtssaacctgtggtgtgttttgagctcccttagcagattacgtgtgggtgactttctgttcttgctgctcaaggtatagccagtggaccatcagcactggcatcacctgggagcgtcttagaaatcacagtctcgggccccacgcaggccatttgaatccgcaccagcagtgactcatacgcacacttcttcaaagtttgaggagcactsstctttgccagttggtagatgtgcaatttaaaactgtcagcaaacacagctgctgtctgtagtgcacacagccatgaggcacggtcagccctggccctcccctccaggcacgtgcacacaccaacccccatacacatgagtccctacccacgttctacatgcataccctgtcctgtggaggcccggtaactatttgcagtctagttgttkgcacaagaagaacttgagagttactttgtcttttgccttttttctagccactgcctcagttttctgctgtgagccaggttcaaagtgtgggtttagctttatcccgtagccctgttttattgcaccacagcatatcagggctgaagggacttgacttttatcttttgattttaggggtaagctggggaggctgggccaggtggtagttttataggccagtgacccgccaggccttgggccctgtgagtcctggtcttgagtccttcctgtatccacacattgcagtcagtggcggggctagtctctgtgaccaagtagtgtccatgtctccrtctgacagtctcagctccagcccgtttgataaagaagtgttggctatctgcctatttccttttcatagtggcacacagattatccctagccagctgtggtggtttagaattgttttagatgccagcttcccccagcaggtctgtgaaggactattactgattgttttgtttgtttgttttttattgtaatgacagcctgggaaggaatttttcccattggatgagtcgggcaatgtggttcccagtgacaccaacattctggacacrtgggcggtaagacagcccctggttggaccttgttttcgtgactggttccctcttcttcttagaagcaatctgcctgccatttctcacattgcattttgttattctgtccctgttgtttgctctctctttttttttttttgagttggggtctccctctgttgcccaggctggagtgcagtggcacaatctcggctcactgcaagctccacctcctgggttcacgccattctcctgcctcagcctcctgagtagctggsactacaggtgcccgccaccacgcccggctaatttttttgtatttttagtagagacggggtttcaccrtgttagccaggatggtcttgatctcctgacctcgtgatycgcccgcctcagcctcccaaagtgctgggattacaggygtgagccaccgcgcccggcctgtttgctcttcttatctcattaaagccagcctggctttcgtctcactgtctcttagcttctgaaaggtctaattcactggcactgaagagtgagggcaggacccgttaaactggtgcaaacgacacttctgatcctgtcctttctgggttcgtttctgcaccacacagacacttttctctgtaggccatggaagagctggtggatgaagggctggtgaaagctattggcatctccaacttcaaccatctccaggtggagatgatcttaaacaaacctggcttgaagtataagcctgcagttaaccaggtaaacatcccccaacgacactggcattgcaacgttgctgttttactgtctgatgctggtagggatttctcgtccacctcacccagcaagtggccaggaggcagctcctgggtgttggcagagtcctgagttatgattcagcatgacacagcacatctgggagaggaaacttacaggaaagaaagagtttgagcctggcttgtgacgatttggggtctgacaaagaggcagccatgagatcctcagaactgtgatagttgataagtggctaaagccaagaaaagcctctagggcccatgagaacatctataataagataataataacaccaaggatactacctgggaactgtaggaagttacagcttatctgggaaatagggtgtttgttatacatagttttctgtatggggtagggagggactttagcataggaagcttcatctgtgtcccatcagygtgtagccacagtgctcccatcagctcttgtttttgcatttgcagattgagtgccacccatatctcactcaggagaagttaatccagtactgccagtccaaargcatcgtggtgaccgcctacagccccctcggctctcctgacaggccctggtgagcttcccacaggctcatgctcctgtgtcacttggtgaagattagaaaagactaaaaagaacaattcagcctcaaggaagatgtttctgggggtgatctgcaaaacttcccctgagcctcttgctggttttcctggaagggttggagtttctagtagcaagacacctactctttttccaaagggttgggggttcttaacccagctctgaggaggagactggtggctgccctctgaggtcgatgggaggattagggttggggtttctggctgctgtgagtggtggccatgatggtgtgacctggactgtctttctatcctcagggccaagcccgaggacccttctctcctggaggatcccaggatcaaggcgatcgcagccaagcacaataaaactacagcccaggtacagccacttcaggtgttgctgaccgtccacaactgcctgcattcctgacagtcctgttagccaagaggaggaagtgactgagcctgttacaccctcacaggaagtatggttaggggtcctcaagtacagagtggaaagggcacagatcggggttttagaagactctggcatgggctcttagattaatagtgcctgcccccactactgcaagggtgactgccacgagggccagcgcttgttcattcatgtggaacctcatctgtacaaatgtaagagstcttagccrygcagggaatgttctttctcctgagtggtagtgtgcatttctagccagtggagggcctcatgtggtctcatgatatgcctgagacactgaagcgtgtggcacagtggctagcgcaggactctggagtcagatctggacctgaatgcgtcgcctacctgttgctagctgtgacctgacatcttggagcccctctctgatcacctgtggagttctagcacgtccttctgcaggttgtgtgtgtgagagactgagatgatgggtgcgagtgcctggcatgtatacacactcactgtctccttgggctcacaggtcctgatccggttccccatgcagaggaacttggtggtgatccccaagtctgtgacaccagaacgcattgctgagaactttaaggtaagatcttggctggtcaggcctggccctcctccatggagtgggggatgggggaggcctctcatcctgtctctggagtgtcatctgtgggatcmccaccatcctctcttctgaggccagggagctgtggcgagcaagccaagactgagactgacacctcaccagtggagccgtgtgcaggggcaggccttgggcctccagggccccgtgctgtgcacgcatacacctacacctttgctcaggcccttcagccacaccgagaggttacccggggagaatctcgctcttgagcttcactgcctggacctgccctgcactggagctctgtcagctaccagctgcataaccctgggcaagtcgcttaactgctcgatscctcagcttccctatctataaaataatatccattttgagggttgttacgaagattaagtgatgcmtcagagcacttcacatggtgcttaataccttagtaagtgatcgagaaatgttgctgtgctgataagtccagggactgcaaaggaccctctgggccatttagtccaytcaccagctctgcaaggagttcgtgtgatgatgggcagagcctagacstgtgtcaggactctggcgaagcgctcagtgtggcagctggagcagctcaggctacttggcgccacctccctccctgcctgcccttgcagcattggtggcgggggtgtgggggaggggggggcacgcccaaaggagagcagctcaggggagtcctgatggcccaagagcctctgttctcactgagcaaagtggctctgccagggatgctctgtctttatccaagatctgtgccragcgcassacagccatgggcctggggctcttgggcaggccccagcttaggtgagcagctgattttgcccaattccactgcccaaagactgtggccatagtgcctgccacctgtcacatatgagacagggatgagagtgatccctgaagagggaagtggagctcattgtttaggagaggagacgtttttcttcttacgtgcaggtagatgttctaagtacacaagataaaatggcaaaacagtggccactgagggaaaggcatatcccaccagagatgcatcgtttgtttcgtatttcattttttaaggaattaggaaagaaaaaataaatgactaatstsaaaatgctaacctaattattttatttttgcatcttactgtatagcttttgcacatttttctgtgatcataaccacagagcctgtagcagactctctttctgcacattctgtgatcatctgaagctaagagcccttcggctctgggagtgtrtgtcagcctcytgtgggtctcacccagtggtgcctgcctgcctccctccctcccagcctccmtgccagctgagttstgtaccgtctgctgccttcatgcaggtggttctcttctcccagtatacctttsttgccctctctgtcaaaatcttatacttcttaggccatgtcaaataccatctcctcttcggctgtggttgttcagtttcccggctggaatccctttggaatacctctgcccttcctgtgctgttgagtgtcttatasagtgtgtgattagttatttgtattacagttgtagaaatacctctgccctttgtttgcttcataaaatagaggcaaagasacatcttacccataattatattcctcactgcaacttatcacaatagaagtgctcagtagtgttttttgaaatgaaataaaatgtatcatttccctgggaggttctggaaaggaaggactgtttccatcgttccatatattatctagcccaacatgcacatttcctgaatactaatatatcagcttttcctaagttcagtttatcttatcgctcctctctgctcaaagccatssaagacatctgggtcctgcacagtattttgtcttttatttttatttgcagagcttactggatttttttgtttgttttttaggtctttgactttgaactgagcagccaggatatgaccaycttactcagctacaacaggaactggagggtctgtgccttgttgaggtgagtgagccccagtgtgaggagcagttcccaggagatattcagatgctgcacagcaagagagtgatccctgcaggcctcagcgccaatgtgctctcgtcacagctgttcttgctttgcacattaccttgctttctcagccacgtgacttgcatcagctgaactgcatggagccaagatgccaagagatccgctcttgatatcttcttccagccctggggcattgttggcctggcctgaagtaactacatattttggctttccattcaatttttaaatcctagcagttcatctgaaactaggtgatcccaggtgaccctggatcaaactctkgaagaatttgcctgtgactttttgtcttaatgaccctaatgaaaggggtttggtcgggassccctggggctgaggtttgagacagtcccggctctgacctggtaagccacatggctccaaaacaggccctccctctgagcagcaggcacctcagttcctccagccacacatcctctggttctgtttcctctgcatggtagtttggaaggagctgcctaggaaggttttctgtggggttttctcttttcctaccattacaataactaggtgacgcatgtaactcactttctgctttcaagaaggaacttctcattttgcagtggagactgagacyctgtttctctctcactacccttattcttgtctgagctctkkgtttccacactctctcctttagtacttcctcttctaascaaaatgtgaacattccctaagatggggtgggctaccagctttccctttccagcgtctgtsccatctccctccccggagtttgcrctgctggtggcttcagccaccgccccaggcagatgtttgcccagtctgcgtcctggacaataactctggccctgcttcaggcatatgcgtgcctggcaagcctgctgctgccacactgtggcctcacactcaaaataggccgcaaacagagcatgtcacaggcagccccaggscagtgccctttcagacatctctgttaatgctacttagccctagacattaaaatcatttttggatctagtggacaaggaggagaggagtgaatcagtcaccaagctacattcgttctcctttcagaatctctcccattcatccgtcttccttttcccctcccacttgagacagagtggattgaagctttcagggctgaggaaacacagtggttttctcattgctccctttacagttaggctcctctgccctssagtattgtgctagaaacttctgttcgattatcctgttgcgtggcggtgagtgggaggaagaggctagccctgacatgctcaggtctcctagggagttttcgctaactacacacacaccacccctctggcagataatgctttactgagcctgwcctgctgatgtcagtgtcactgtgggtatacaaaaaaggcagaccatggagaacttttgaataagagttacagactgtaagcacccagctcagattacataactctggccttgcgtgagctgcccagctatctgtccagtgttcctgcctttatgttcctagcacagccatkggccctactagatggacagtgagtgagccttgacaaacacgtctgcacctgtgctccctgccatgtgctccctgccctgtgctccctgccctgtttccaatataaaatcgccgaccgttgattgggctcacttcagcccccactgatacaaggaggctccctctgtcctmagagcacttgccgttgcttctcttatcctttgagattcagtcacatacagacttttaacatccctttttttttttgaaatgggctsstactctgtcacccaggctggaatgtaatggcatgatcacagctcactgcagccttgacctcctgggctcaaatgatcctcccacctcagcctcccaagtagctggggccatgggcatgcaccaccatgcctggttaatttaaaaagtttttttattaagatggaaatcttgctatgttgcccaggctagtcgcaaacccctagcctcaagtgatcctctcgcttcagcctgggattacaggcgtgagccactgtgtctggcctgccttctcatattattacacaagatgtttaagaccacaaaatacwgtctggtcctgccagctagactgagttactggaaggcagaaatcgtgttgccgtcctgcacrgcccaggcacagtgctgggcacatggggagggtggtgtccctcacacatgtgctgcttgatgacagtagtggtagaggggtctggagggtgagttgcttcccccagctgcagaaccatcatctgcacactcagaactagcttgttgcctctgaggttctattttatttcttcagtgagacacatcatttctctgttgggagttgggtatagtcaaaatcacctcttcaaaaagcaactgttttctccttyctcctgacagctgtacctcccacaaggattaccccttccatgaagagttttgaagctgtggttgcctgctcgtccccaagtgacctatacctgtgtttcttgcctcatttttttccttgcaaatgtagtakggccygtgtcactcagcagtgggacagcaacctgtagagtggccagmgagggcgtgtctagcttgatgttggatctcaagagccctgtcagtagagtagaagtctcttccagtttgctttgcccttctttytaccctgctggggaaagtacaacctgaatacccttttctgaccaaagagaagcaaaatctaccaggtcaaaatagtgccactaacggttgagttttgacygcttggaactggaatcctttcagcaagacttctctttgcctcaaataaaaagtgcttttgtgagcttggttttgtgagctttggttttttaaaacaatagcaaccttctatctcacttcaaccatcactctccacatacccataaggcaggccagtcagtgatgcaaaaggagtgaggacttgacttttctacaagtcctcaactgcaagttgggggcccctcaccccagtactttacccatttagctttagggttgtgggtctcatcctggctgcacaccaggtcacctttgggggctttaaggctggtgatgtctggacctcgccctggaggctgatctgattgggctgtgatcaggacagsaggagtgtacaggctctccaggtgattccagggtgcagccaaggctgagccacagctttwrggtaaacccatgttcgattccacagattccttggttgctccttctacgtatgaaggccgaggtcggtgtttactaagcagcacaacctgagagaaattgcttttctgaagcctgttgtctagacaagaggaaagaaaagcataaataaatggcttccaattggatgaagatgaaatagggctacaaaataaagattttgaggcggaatgctgttgcttctttttgttaccgtttctttatccagagttaagttaacaaaggccaagaaaggaatggaatagacaagtgccgacttgaaagttcatcaagttaggttgttttgtggctgcccttgtttattggataattaggacccccatgatcaagtcacattaactgctttgcaggtgatctgtgtttaagatgcacctctaaaggtatagttaattgggcagtggtggttcctggccctcacccagcgctggaggggcacacctagcccctctgcggctggggttgagcccggtggagaacccagagccccactgcacaggctgcccttactacctggcagccttgggcctgggtccctcgtggcatctgctgatcacagtggtccagtttcccctgccagagtaggcaggtcacacctgttaaactgcagaccttatgttgccctctgatgattaagagtagattttagttttgttacaaaagttacgtcaaatcatctgacctgatccccactctgtttctccagttggcttcaacactctttggaaaaactttaaggtagtcactggtaacagtttttaaatcggttacctgccttttagatctccgcttagtatagaccattgtagcatgacaatttgagactcagcccaggagcataaacaagataaaaggcaagctgtgcaacctcccctccctactttccagcagaaccctcagattttttctaaggactgccctttaggagccttgccggcagtggaagaggaggaagagaattaaagcatgccacgaatgacagggagaacagctggttctgcattttgaagctccaatcgtattttcagtagtcagcggcttgggctcaggtaaggcccgttgcttgtatgctgaaaagtgtggcttaaggagcagaagctgaggctgtggagctcagtggaaccagcttcattccactaacaattcatccaaggagtggatggatgagagaaggtccgtggatcaagacaggtgctgcttcattcaccaatggagagctccattcttccttccccttgtggaatcaaaaccgctacaccttcctgggcagactccagcccagcctcaggactctggtggactcatcacgatgaatgaagtcacccttcagagggcaaagtcagtggcagttatagaacaatggtgctggccccatctcgggacatttgcccctgtgaagttgggggcacaacatacattcatgaagcagtggggttttaccaaaataatgttccagccaaggagcagaattgttaagatattgagaccaatggaaatacagaacaaaatattaaatcacacgggcaagtaagatctgcattggaaaatctctgaacaatgcctccggagacgatttcaaacagcatcatttttcaggatctgatttcaaagaacaaggtttctcaacactatgtcctttatgttgataaaattgcacaaactgctgtagtgcaatgtccttgctgctctctgtcacggcttatcacggggctcattggcaggaccctgggagggtgcccagccgggataagcacagtcagtattggattcaacccaggaagatttccctggaggggcgttctgggaattcatggctctctaggatccagccccctaggttataccgagtctttctgtcccttgaaggcagtggaagcagctgatggctcctcaggtcctcttacagccccaaatcccagtgtaccctggggtgccagcttctattttccacacccttctatccagtttctagaattccacctgggcacagagtaaactctcagtaatgtcagttgcatgaatgagtgagtgagtgaacgtagagtttttcttataatgcctattagaacccccaagttttgaaatcagtatatattaaacccaaatgctagctgttcagttctgatcctggcccataattcactgaatggtggccaagagttctaggactatagactcttaattgcagttctaattcatttaatctatcagccttaatttcctcaacctacaaaatgcctgcctcattgtggtgatgaagactgcatgagataaaaaccccctgtcccaaggccttgcacacagtactcaaaacatgctagccattattgttgatattgttaatatcattataatcaaatgttgacaacagaagcaaacctatccagcccctcaaggctggcaggtgatgccccaggggggcagagctatgccctgaaaggggctttttctctgcaggaacatcacgccattctcacacaaaggaagggattctctgacacacttatcagtgagcagcacagtttttgtttcctacccctaggattgtatttcatggcaagaagaaaatactgcccatgggcttataagagttatctgtttcatactgataggtggaatcagaatgcgagagacagaaaagactataggggtcatctaatccattgtttttctaagccagagttttcaaatttatttttggcagcaggctccattcttcaaaagaaaatctacacgggtcctcagtatgtaacacagatacaggcagagctgctgtggtttccgtgggggaggaatctgggagccaagccagcagcaccccttcccacattcccctccacccatgaggatgctggaacagtttcaaagtcttggaatctaatgctttgctttttgtttgtttttaatacctacaaggatttatttcacacagttgctggtgttcagcaattttggagaagcttagctgggtggttcaatatgaaggcttgactggggccggaggctctgattccaagatggctcactcaaccactggcaagtcggtactgggtattggcagggacgctcatctccttcttatgtgtaccttttcctagagctgccagagtgttcatgacatagtgactgactctccaaatgagtgattgaagagatcacaaagtggaagccacaatgtctttcattatctaacctcagaggtcacacagcatcatctccacaatagcctattggtaacaatggtcagccctagccactggggacatctcagagggtgactaccaaaatttgcaacctgaaaactacacattgtttagaaggcattccagaagtaactgtaaacatgaaaatggtacttcaaaagaatatatgttcagattaacaacaacaaaaactctgaggatcagaaagatgaagtgaccaaccaaagctcgcactgcaatttagtggctgaaaggggctagaatcttggtctgtggaaactaatctgtggcattgcatcatattattacaatgacattccattacaataaaaattatagtagcttacacatgtataaagctttattgccaggccaggcatggtggctcacgcctgtaatcccaacacttcgggaggccaaggcaggtggatcacctgaggtcaggagttcaagaccagcctggccaacatggtgaaaccccttctctactaaaaataaaaaaattagctgggtgtggtggtgcgcacctgtagtcccagctattcaggaggctgaggcaggagaaccacttgaacccgggaggcggaggttgcagtgagctgaggtcacgccactgtactccaatcatagtgacagagtgagatgccatctcaaaaaaaaaaaaaacaacactttattgccaagtaatcaaggttaacatcaacagtgataggttatgttgatagtatatagtcatgatatgatgttatgagaatgacacttgacctctatgatcttccttccaaaaaccaaaaccctagtccaatcatgagagaaacatcaaattgcagttgagggatattctacagtatttctcaaaaccatcaaggtaatcaaaaacaaggaaagtttcagaaacggtcacatccaagaatagtggaagcagggtgcctcaatgtaatggggatgggatcttgggatggaaaaaggacattgggtaaaaactctggcagtctgcataaagcaaggacttgaattaataacatcagtattggttcattatactaaacgtaccatagcaatataagatgttaattattggaaagtagatgtgggatatatgggcaatctctcttcacaatttttctgtaaatctaaaactattctaaaataaaatgccttaaaagaaaactttataagagtggtctttctaaacaatagccaatatgtctacctagattacttacctgcttttaaaaatgcctgcacctttttttagatgaagcagataaaattattagcaagggtaccgatttaaatggcagaattactaattttttccttggagaacacatgtttctaagcacatatgtaacatttatgttaatcagtgatatgctaggccaaagtgctggcctcaacaaatttcaatgaactcatatatagatattattcctctggccacaattacataaaattatttaaaaaaataacaaaaagtaatgaaactgccctccacatgaatttggaaattttgaaatagatttacaatcaattcaaaggttaaagaagaaaaaataacagcaaacactatatatggcatttattaattacctacggcaatttaataagtattaattacctattaaagacccaaacacagttttaagagttttacatatttttccaacctcacaactctatgaggttgattctattgctatcccatttgcagatgaagaaactgggacccacagaggataaagaaccttcccaagatcatataactagaaaatggtggagctgggatttccacttgggcagtctggctctggagttcatccaccagttctgctgggctgcctcctactgtagaaaacacatgtggaatcataacaacttttgggatgcagccaaagcagtactcagagggcaacttacagtgttatgtccattaaagaagttgaaaaactagttaaaatttttcctcaaagaaaataccagaccaagatggttttatagaagtgttgtatgtcacattctaggtacagacaataccaatcctattcaagttctcccagaaaacaggaaaagagggaataccgtcaaactcattttatgcagccaacacaactctgacactaaaattagacgaggacagttcaagaaaactacagacccatctcatcaaagaatatagttgcaaaagtcctaaacaaaataaagttagccacatccaatgatgtataaaagagggatttgtgtgattttatcacaggaatgcaatgttgatttaatattagaaaattatgaatgtaatccatcacatgaatgaattagaggtatatgtatgtattcaagtagaacaacatttggtaaaattcaaaatggtgttatgataaaatctcttggcaaagtaggaataggaaagaacgtctttacctggtagaaggcatctgcacgagtggatcacagtgtgttcttacagtgtacaggctacagctctatgcttctacataaatgaatctcaaaagtactaaggagaatactaaggcagaagaaaaagctagtcacagaaaaaaggcatatagtaagaatccatttatatgaaatttacaagcaggtaaaactaaacaacatttttttaaggatacaatcacaggtcatacaactactaagaagataaagagaaggatttattccaaattcatgggtgggagttggagtgaatcttgatattgaagagggatatacaaggagtcctaaagtactatttatttcttaacctgggttatgagaacatgtatgtttattttaattctttaaatgatacacagagatgttgtacactcttctgcatatatgatttatttc

SEQ ID NO: 94789 - DNA, 25989 bp, Homo sapiens
  misc_feature (1)...(25989): n = A,T,C or G
tttatgttacatagagatacagttccagtggaattttataatagatgtttaatggtttatcaaaaatttaagaatttatgcttaaaaattattgttgcataaatactaattttaatgataacttgattcagaagaaaatttttctaacccccagaaacttatgatcacaggatataaagcataaacattttaatgaccgtgagtcattgtaagatacattttctgaggatttcatgtgtatgaatattattatattctcccatttaaatggcagtttggctggatagaaaattctgagtttaaagttatttttcttcaatacttaagaaaaaatttctccattgcctttttgtattcagtattctgacaggggtaaaaagcagactgctctgaaaataacctgatttgtatatttgaatttgaaactatgcatatttggctttggaacataattctaaaacaaaacacttgaaaaagaacccctggaatttaaaaccaaaatagaattgtaaaaaaatacataccttaggcccctgaaatcactaaactaaagggaaatgtcaagctgggaactgctaagacaaacctgcctcccattctattcaaagtcacccctctgggcccggtgcggtggctcacatctgtaatcccagcactttgggaggccaaggcggatggattacctgaggtcaggagttcgagaccagcctgaccaacagggtgaaaccccgtctctactaaatacaaaaaattagccaggcttggtggcacatgcctgtaatcccagctacttgggatgctgaggcaggagaattgcttgaacccaggaggcggaggttgcaggaagctgagattgcaccattgcactccagcttgagcaacaagagcgaaacttcatctcaaacaaacaaacaaagtcacccctctgctcactgagataaatgcatatgtgattgcctcttttggagaggctaatcagaaactcaaaagaatgcagccatttgtctctttatctatgatctggaagccccctccctgcttcgagttgtccagcttttctggatggaaccaatgttcatcttacatatgttaattgatgtctcatgactccctaaaatgtataaaaccaggctgtgctctgactatcttgggcacacgtcatcatgacctcctaaggctgtgtcgcaggcgtgtgtcctcaaccttggcaaaataaactttctaaattaactgagacctgtctcaaattttcggggttcacagaataaataagcctaatggctcttaaactgttttcaatactttaaaattgtttttagtaattacagtgtgtaggctgtgttgtatttttagtactattgcatgtacattgtgaaatcaagcaaattagcaattacgtttgtatctttgggaagtgagatattcagtgtgagagaatgaagaaacataagacaggtgagattaagccttgaagttcttaacttgaatcagaaatgtccatttgaagtcgtgtttttttttgttttgttttggtttttgttttttttttgagatggagtttcactcttattgcccaggcacgagtgcaatggtgcaatctccgctcactgcaacctccgcctcccaggttcaagtgattctcctgcctcagcctcctgagtagctgggattacaggcatgcaccaccttgcccagctaattgtttcttgtattactaaaaatacatggtaggttttttaaaaggtatttcctacctctttctactgaaaaggcctggaagcaagattcaattcaattgcaaagaatgattctagttccctaattgtggtttctaaatatcaatttccactaaaaggaaatctccttggataaatgtaggtctggaacaggaaagcaatgaagttaccaaaggctataaagattacatgaaaagaatgcaaaagccaatttgaagtgctctcagtggcaaagaggataatttgggcatcaataagaatagcaatagattataacattgaatatatttaaattcatgaattcaaagaacactaaatgacaactaatctgtcaccttggagggtgcttggaaacctccttttaaaaactaaaataaaagaatgaatcaatcattattcagtgttcctattcaaactatacctcagggtagccaaataattgattaggagaaatttctccttaaagaagtatgccagctaatacatgaagaaagaatggtataattagtatttcactgttttgtaatgttatgaaataatggatttaagtaatgatcatcaatgactactgtaaataatacaaataaataaatacaaataaagaggcagccagtcattccaccggaatagaagaatacaatgtataggaagtagccaaaaaacaaaacaaaacaagaattggatctgrattttatcaagcctctaggtcttattagtgttgccaagatatttgggggatagagtgacatgataaatacatttctgggaatgcaataatcagcagaatccagagggcgggaaactatagagagaaagtgattttttgtttgtttgttttgttttgttttttggctttttttttcctttcttttcttttttttttttttttgagacagtgtcttactatgtcatccagactcccgggctcaagcaaccatctggcctcagcctcctgagtggctgagactacgggcatgtgtcaccatgcccagctaattgtttcttgtatttttcatagagacagggtctcgctatgttgcttctggcctcaagtagtcctcctgcctcagcctcccaaagagctgggattacaggtggtgtgagccaccacacccagctaacaaatacagcacaaggagagaaggtggggacgtgtagttttgcatattttcaaaatatttcataataaaaagatttttgaaaaattaaaaaacaaaactttggtgctctcaaataaaataaaaaatgttaacatgcacaggggattcagattttgtgatcctgaagttgtacgatcggggttttcttttaaagaatacaaaattaagaattcaatgttaggtacaaagcctaagatggtgctcatgcaagtgaaggcaactgaaggtcaagttttgttaccttcatggtaaatccaactccatgatcacagctttgcagctcctgaccctctggtacctgcatatcagtctagctttaactctgctgggcaccctgtaagtctactctctgagcgtccccacactggcttcctcccgttcttccaatgtatcttagtcgcttccaccccttggctcacactgttctgyccagaaacttctctgcactcccacaattcttggaattgttctttttcctccctgtttcagatatattagttgctgcttcctctgtttcttagagaaatggatgagaatgaaaagcggcactactcgttcattttccttctaaaaataattttgtctcaattttgtatgtacttaattttaacaaagtaaaacttcttatgcacatatattcatcagatttaaaaaatgagagtttcttaagggtacaaaaccaggaatagattggtaaattcatgaagctagaaagtagctaatcaaaactcttatgaaaacttctggggttgattaagaatagccataattctgtgtaacaaatcccctcaagaggtgaaatctatttccctactccttggccccgtcctggccttgagacttgctttgatcaatagaaggtgacagaagtgacactgcacacattccaagggtaggcctcctacaatgctgctacctatgaacaagcccaagttagcctcatggaaaatgaaaaacacataaaaagggtccctgccttccctgacatcccagtccaccccagtgaagcccacagaggtgagaaaacccagctgacagacaccacgtggttctgagaccggcttatcagctgattcctgcccaaattgccaacccacaaaatcacaagcaaataaatggttgctgtaataaccagtttgtttgttacacgaaaacagctaatcaatataccttcttaatctcaattatctaaaaaagatatcccttctcactgattcatagctaagtggttctggaaggaatgttattatgaacaatacacatttctttattctgtgcatcacatgaaaatggtcagaatcaaaatggagtcactaatgttaaaaaacaaacagaagactctgacaaatacagctgggaagaccatgaaaagagggttctaatggttgtacacctgaaaaccaaaagtaccatgaaagacggtgaaaaccacaaccttgagcaaaggccattgcaactgaacacaaaacatactctgcaaggacctctgaacaactgcgtgtccaacctcagactaacaccactttcatgattgatctttggagccaaggctaattatttcaaagcaattagataatcctcattttttccttgaaaagttttgtcttcctttatttccccaaatatacacatagtttactgtggcatgcatattcccattgcagtgctctattcccagagaaatatttttcttgtagggaccctctctctgttatttaggttgacagtcactaaggatttactatttcaacaatactagcactgcatgtcatccagtatacactgggaaaataaagtgccgcaagtgcatatccaggagactttgtggccaccagattatgaggaatgcatgtatttaattatttatttttgggacagagtctgtctctgtcgcccaggctatagtgcagtggcacsatcttggctcactgcattctccacctcccaggttcaagggattctcaggcctcccaagcagcggggactataggtacgtgccatcatgcctygctaatttttggatttttagcagagacagggtttcaccatgttggccaggctggtctcaaacccctaagctcaagtgatctacctgcctcggcctcccaaagtgctgggattacaggtgtgagacaccatgcccggcccatgcattattattaatgttgaagtagataatttaacaaacatcaatgaagtataagatttttcactcatagttgcaaaatatcatgccaattgccttctatgagctgtcrtaagccacagcctagagattcaattccatttcaagattcaaccaaagccaactcatcaacaagaacatgtaaaagacagaaaaacccactaccggcaggctgaaacagatgctgtgacgtggmcctggcctgtcatggcgtgtcacagcatggcacaggcctatatcatgttccctagattgctgactaccaactagttacagctgactccaatcaggtcgggatttgaccatctctgcactgaacctgcaattgcaacttttaaaattgaaacgctgcttctcacctctcctccctagactctatttcacagaggaaaccatcacagggaaagcaagcccttgttttttcttccttctttgctttgctttctttctctccttccttctttctttccttcctccctccctccctccctccctccttccttccttccttccttccttccttccttccttccttccttctttcctttcttccttcctgccttcccttctttctttcttttttttgagacagggtctcactgtctgtcgcccaggctggagtgcagtggcatgatctaggctcattgcaacctccgcctcccaggttcaagtgattctcctttctcagcctcccaagtagctgggattgcagatacgtgcccccacgcccggctaatttttgtatttttagtagaggcagggtttcactatgttggccagacttctttccctccctcctccaactcttcttttcttccttgctgtctccctccctaccttccaacttttggctgtgttgaatttgttgactcatcctgaacaagcagaaactccaatgatactgtcacctaagagagaactttgcacaaggttgccatgtttaataattcattcacagaatcctcaatctcacaaaagcctggaatggatttcctgtttggttatggcagggaagctactgtggccaggctccaactcctcccactgtagatagcagcagccttcttaagcagcctgtggccgggcacagtagctcacacctgtaatcccagcactttggaaggccgaggtgggcggatcacctgagctcaggagtttgagaccagccwgtctctactaacaatataaaaattagctgggagtcacggtgggcgcctgtaatcccagctactcgggaggcygaggcaggagaattgcttgaacccaggagacagaggttgtagtgagctgagatcgcaccactgyactctagccttggcaacagtgcaagactgtctcaaaaacagcaacagaragcaggacgtgagacttctacctgctcactcagaatcatttctgcaccaaccatggccacrtttgtggagctcagtaccaaagccaagatgcccattgtgggcctgggcacttggaargtaaatatgcaratctttgcacacccttcttctctggaggggcgtttgggtgttttctctttctgcattcagccaggaaagcctggaggtcgggcaggggttggagaggtaagattcagccctggagccaggacttaggttgctttcttttctcagagctgattcaggctgcaaagctccaaggctggctttcccagcagtgatgagagcttctctagcaagtatcaaatttcaagcagctgttggacttaaaactgttttccagggcagtttctctctctggttctaggacacttaattgggctcaacgtttcccccaagtcttggctgtgggtttgttgtgggctgggtggttgaggagaggatgcagagcccgaagtccttggcacccctttgcagatcacggtgtgagacttgggctagcagcatccctatgacctggaaacttgctagaaatgcaaactggccaggtgtsktggcttatccctgtaatcccagcactttgggaaatccagacgggagggttgcttgagcccaggagttggagaccagcctgggcaacatggcaagaatccatttctacaaaaaataaataaattttctgggcatggtggcacgcacctgtagtcccagccacttgggaggctgaggtggagattgagtgttgagcctgaggggtcaaggctgcaatgagcagtgattgtgccactgcactccagtctsggcaacagagtgagatccaagaaagcaagaaagaragaragagagagagagaaagaaagagagacagagagaaacaaaatgcagagtctcaggctccaacccaggctacctaatgggcatctgcactttaacaagatccctacgtggttcctgtacacattgaaatctgcaacatgctggggctgcagagagcctgggctgggagtcgtgagcaccacccggctgtgttaacgacagctggcaaaatgtggtaaggcacatccaggactcagtgaggcaggttcccgagcctctsttaggctaagtttcaagttgttccatcaccacctccctctgccttctttgccatttccatccatgatagcactaccctaactagtgatgagaagcagtctttggagttcctcttctctcctgtccctcatggctaatgtccctgctgagacttctgcctctggctctctttccttctgtgcaccctgatttttcttctcttctgtcccaagctagaggttaggaccctctgctgcagcactgggtcatcctcaggatacattcttggtgtatctggaggaacagatcacttccagcttgattcatgcagagcgtctcttgcttgaatagcaagatttgcccaaaatcagaccttcaatcctgtataaacagaataaataatcacttccagatctccagggaatctactcaccctgggtgagtttaccagacagtttcataattttggaattgaatgaaagaattatgaagggagctgtcttcaacacgtggggatgatagactaaaggattatgaacttagcagtggaggtgaagaagggtgtagygtagcggttgggggcacagggctgcttctgggtgcctggcagcagctcgtttcttgtccaggtggtagggtagctgtgcatctctgttttgtgtactgttcaatgtttgttatctcacaattgaagaggtttaaaagaccattttgtgagagatcaagttttaagtgcttttttgcccccatcattggcttggctaggttagaacmaaatgtgataattctatttcccttcttttctttttttcwttcttttcttttctttccttcccttctttctctccctctctgtcattcccctccctctctctttctttttacaggagtggaaaacaaactctattcctataaggttttctatttctcytttttttctgaaacgatcattgtataatgatggcctctactgaaccttactgtgtgtcaggtaatgtgcaaaaagcttaatattcattgcagcatctcatcaccacaaaggcctcatgaggctggtgctatttttttttccattttgcatacaaggtttacagagattgaatcacctgcttagacccacacacccagtaagtgatygaatccagattgatggtgtaatgaccattatccagatccttatcaccatttggggaaattgtctgaaaatcccttggggttatttagagtcaagctttcatctgggtcttcagaaagttgtagtggagcsgtctgcacccccacacacctgaagacatttcaggactaacctggatgaaaagrgaactgacttttagctaggataggacataaggacataatcataaaataattcactttccttcttttcttttgaaaagttttgtaaagtgtgtatcctcccagagatcccctggcaaaggagaccccagtgaggccttggtttggagaaactgggccttgtggggcagcctgttgaaggtggcctggggataagagaatatgatggttgctgagwgtggtgtaattccagctactcgggaggtgggagggttgcttgaacctgggagtgtgaggccagcctgggcaacacggcagggccccatctcttaaaaaaaacacatatgtgatgagcttttcttttgcctttcagtctcctctyggcaaagtgaaagaagcagtgaaggtggccattgatgcaggatatcggcacattgactgtgcctatgtctatcagaatgaacatgaagtgggggaagccatccaagagaagatccaagagaaggctgtgaagcgggaggacctgttcatcgtcagcaaggtgcaatggtgcatttggtgggaggccttcacttcaaggcaggcagaagtatctgggtcgggttggcagcaagaactctgtcagccttttctacatgtaccccttttcatctctgccttgataacatccgtgaatacaacactatccatactccaagccattattgatatttgaacatgtcgtggctgccccacctgcctgtaggttggttttcccatagtgggcttggttccatggaaccctgcactgccctgggcctccctgttccccatcagagggatctaccatctgcccagaggcaatcagaggccaagggtgcaggcgggtcttgatctgaagcctccctttcagcactgtgatctcagtgactgtgcccctgagactctcagccagggggaattttagaaaatggtaggggcatttttctattgtcacatatgaatttctttattcattctagtaaaaggtgagggatacaatgttataaaaaagaagaagatgttgggtgtgagagggctgagaatcactggatctatattatacataacttgctgaaaaaaaataacactagttctaggtacttggaaaatgcatacatctggtaggacaaatagacctcactgtgtagcagccaagtctggataaagcctttgtaaaattatcacttggggccttataggcttgataagggacctatcagataggtcagataaaggaccatctgctcccaaaggcctaagaatgcttgacatttaraagctacacacaattcctgctctcagagagcctacagctgaggaagagactgagacaggtaaacaaatttcaaatctgtggccacatttacttcaatgatctgagacacgtatagagtactaggasagttgaaaaagtcaatkgcttttaacacttaagacatgtcattgaggtgctgagccctggtgatgttccacactgtgtcgtggatcttaatcagctttgttacaaatggcttgtggtgggttagatgaggatgcaaatcaaaaagcagggacaatgagtacaatgtggcccttccttttcccagtattaatagctcattgctacactctttgcagttgtggcccactttctttgagagaccccttgtgaggaaagcctttgagaagaccctcaaggacctgaagctgagctatctggacgtctatcttattcactggccacagggattcaaggtttaagacactctctttctcagcctctagtttctgagcaggtgccagaaaatagtagctgcaccagggctgtggrgtggtgtggactggggcaggaggccttgcatttcataattgggaatggcaggtggtcaggaagagaccttggagaagaaacacactggcctggaagggaggttgaggccatgtgtgctgctgaggtggccacatgcctgggttttcttgcagttatgtctgagagaagacatgatttctggcagcccagacaagttgcaactgccatatcacctttgtcttgattccacgccccagggttgccctcccaggaaatctcttgggttactcttgcataactatattccagggcataattatcttattaagcaaagtacacctgggagtggcatcttggagaaaagcccaagtatggtgatgctggaaggaagccagtagtgatccaggcacccattgcctggggctctgctcttacctgctcctgaggggtgggagagacaaatttccagctctctcccctcctgaccaactggagtgatgatggcctgccacccctaattccacgcctcttctagaggctgcaaggatagaagttggccaatatcttctccagaaaaccacagcttggatatctaatccttatccagtaatattgaaatgaaagtttgcccttggttgtatatgggatctaggtgtatgaggttaatgtccatggtgataatgaacttctggaatgtactagcagcaaatcttaaagtcaagccagtcgtttctaaaatattagtatgctacagtagatacagagattttaattaaactcacattcctaaagtatgtactccagaacttgaaaaagtggtatgcagatgtggtatttagcaagagtcaggatcctgaaaccttgttgaacagaaccaagtgtcctgatgcagattccrgtaaacttttcattctgtgttcacagtctggggatgaccttttccccaaagatgataaaggtaatgccatcggtggaaaagcaacgttcttggatgcctgggaggtaggttcccagcttcctctaagtgtgctgggagagaaatcttcagttatccatgagattcgcatggatatgaatgaggccatgtgcctgatgctttctaatttcatcattgtgattttctagctcttctaatatcttcctyatcacctttggcttttgggtacatctgatactatttatatttcaaggctaatagtcttcaaataagactggaaatacaatgtaccccactttggggaatacacatgctgttctcaaaccagggcgaggcatttggaacaggaggtttgggcctgggtgtgctcatagcagctgagtaacctagggtcagttttgtaactcatgtagggctcagttttctcttcttaaaaagaagttgtataatacatactaccaatatatatcttccagtgtgtgataaagattaagatggtttacatgccaggaacattagtcataaagcccatttaaccctaggagacagggttaacatccccatttataaataatgacatttgaaacctagattgtttgatgacttgcccaggtcttgtcacaatgtgtgtggcagagctgggattagacccagactcatctgaatcacaagtccaaccaccaaagccatcagcatggtgcttggcaggcagtgaagacacatccagaaatcagggagcctgagtgctctgcttctcagatctaaccatgacctgtttcacgtcattcacattcaaaatgaatgaagggatgaacattttctctggtcattttttattatttatacccttttgcaaatgctagtagagaatgaagtggaggaataagttataaatgaacagtggcttatgactccaagagttaatcgtgttattttggtagctgtctgtgtaggtgtgcatgtagttgcgagtttgtattgtgttttacaagcaaaaatatattatgtttcaactttctgaaatgcttataattgacatgattcaatgaaatgtagctttttctgtgtattgtttgttcaaaagcattaatccacaagcacagctttttgttgtttttattgtcttagacactctcactctgtcacccaggctggagtgcagtggcacaatcttggctcactgcaacgtccctctaccaagtaaaagccattctcctgcctcagcctcctgagtcgctgggactagaggtgcatgccaccacgcctggctaatttttgtatttttagtagagatggggtttcaccatgttggccagtctggtctcgaagtcctgacctcaagggatccacctgtcttggcctcccaaagtgctcagattacaggtgtgagccaccacacctggctatttgcattacatatgataagatttttttatcttaactcttatgatgccatgaagtatggcaagtatgtcaatgtagcctgcttctcgcagtgctgttttttgaatgaatacaagaacgactgctaaataaaacatttgaaaggcatgaaaagatagcagtgatcaagatcagaggctctgatttgaaatgagcaggcttgaatatgtaagcgttggatgtttatgtagacccacaaccagttcagtagaaacctcactgaccacattgaagcagagaggaggaaaaatgtataaagaagtcaagttctaatacwggaaaactaacctgacctatgtgcacaaaaacttttaaattatctaattgccccatctgaaattttgggaaacctaatgatttcacagcttctaaattctactgcccaatttggataacatcatatatcctagtggttctcaacgtggctatgcattagaatcacctgaggagtttaaaaatcccaacgtctaggctacaactcagagaaaatctgtaagaaactctggggggtgaaatccaggcactggtaatttttttttttaatttagagagagtctctctctgttgcccaggctggagtacaatggcatcatcatagtttagtgcagcctcggactcctgggctgaagcaatcctcccaagtagctggaatcaaaggcacatgccgccacatccagctaattaaaaaaatttctttttgtagagacagggtcttgctatgttgcccaggatggtctccaacacctggcctcaagcaatcctcctgtctcagcctctggtaatatatatcagaaacatatatattattagtaggtattataagactttttttaagaagagaaagctaaggcctacaagagttaaaaaacttaccctaggttactcaaacctaggcccaaaacccctgttccaatcctcctgtcacctcccaaagtgctgagattacagtcatgagccactgcatccagccagtattttttaaagctccctggtgattccaaattgcagccaaagttgagaagggctggataaagtgttccctgaacatgtcgtgcttatccctgcctytgagctttgctcctgccttcctgtgtcatatgctcatgttttttccctcttttctgtctttttttttttttttttttttttcttttgaggcccagcttatactctacctgaaggactcccctgacaactgcgggctgtatgtatctcttctttctctgccctttctgactctgtctatgccgctgtgatgttatctgaggcagcctcagtgtcatgattgatggctccatagaagggaactctagcactttaattggactataagaatcccagaaaaagggagcacattgtatacatttacatcctgacaacttctgrgcaggatctggaacatgtaatagatggctactaaatacatattgcactggaggctgctgctaacatgtatggtatctttgggcaagtttggaaaatgcccaatataggctaaaaattatacaaagattcccttccttgcgtgtccatgcagtttctgtaccaggaagcatggctggatatgcaaacagtgggtcaggcttcagtcccacacaactccatggccgggtgcccctatcagggtgtaatctgaatgcatgaccttcctgcaaaccaaagcatgcttagtgtgggagagagggactcaggacccacaagtgaggcttctccgtatgctgcagcctcttcctgactaacacagcttgcccaggtttgggtgtgcaatgcacacacacaacagcagctccctgctatcatttggattcattaaaaattaaatcatctcataagcttacaaatgttgatttttatttactttttatttttttgcattacaaaactttcatatttcccctgtgtacagaagtttaattttttatgtgtttcttcacgtgtaaggtgagagtggcaagaacataaaatctttacctgttactcctagtttttcttgcgctggggaggggcagtagggctggaaccagtcactgatgggcacccaggccctggactaaaatttcctgtgaatgcttcggctaaccctgttacggtggatcctttagcaatttctgccccagggargactaaggcaagccagggtccctgtagtccctctagagctgcccataaggtattcctttctatgataggccatggaggagctggtggatgaggggctggtgaaagcccttggggtctccaatttcagccacttccagatcgagaagctcttgaacaaacctggactgaaatataaaccagtgactaaccaggtaaattctattcagtttaagggtaagggtcctgccctattacttcttaaacattgcgggrggaatgttcaatgctatgccctgagtctyatctcaggggtcagtgatcaggacactttggggaggtgtgaggctgatctcaygggtgatttagcaagwatctcagtgsrcasktgtttggcctttgcttggtggactttttttgtgtgtagaactccctaggaacaatgcaaaacagagccggctttccccgtgatgaggattgtttgctgttgcaggttgagtgtcacccatacctcacrcaggagaaactgatccagtactgccactccaagggcatcaccgttacggcctacagccccctgggctctccggatagaccttggtgaggcttccaagtggtgggtctttctcttgataatcttaaaaacattattttataattggtaaatgttggtatgggtccataagttactggaaagaaaaatgtgtgtaaggtaacacgtttggtacacacaaatgggatggcagtgggaaaaaatgggaattaaacaacaacaacaacamcaagggcgacatgcttgaccctctgggaatatttccagttcagccacccaagggtgaaccaggctttgcaaaatgctgaggcttcagagcccggggaaaggacccaagcttccaggtcctcctgcctgtctcccagatggagaggctctgaygatcagtcttgagaccctcattggagtggtgtccttctgtacatggtagccatggtgattattcacatcagcatctttctgcccstagggccaagccwgargacccttccctgctggaggatcccaagattaaggagattgctgcaaagcacaaaaaaaccgcagcycargtgccatatttttatttttcttgttatccaacaactcattcttccagtctcgtgtttcatatcctgtgttgtcctcaacaaactccttaaaggggaagaatataggagctgaagccctctaaagtgtttcctttgaagtctgttggaacctctaggaaacacaagagctgtcactgaagcaaagatagcttctgtctcacagcttcctgtcaagccctacagcccagtggcaaagcatggctttggagtctagggatatgggtgcagatgccaactctacctctgatcagccttatgacccccaagctactttcttcattcctaaaaaaggaagatcacagggttgtctctaaggtgaagggagagaaagaggtgggggtctggcacaagtctaatagctgtgaagggctcagtaattattagcgattgtacctgaagccacagtgagctgcagagatgttttattcttcctttccataaaaggaggggtctttggagctgagtggaagcctgatgtcccctttccgcataggttctgatccgtttccatatccagaggaatgtgattgtcatccccaagtctgtgacaccagcacgcattgttgagaacattcaggtaagtttccggctggtcggccctggtattcctcagtggagtgggggacaggcagaccttctcactaggcttctcacctcatcgctgcattgtcttttgccccctcccttcccaccaccctatcattttccagcccagggagctagggtcagtagagctgagatgaatgacccatgggctaaggacatcctgggggcagtgcctggtamagccctatcaggtctgagcacagttgtgcctcacaccactgagaagaccctcagttgcccctgagcagctaggccctgggccacacacaagaacagactgtcctggcctccctgctcacttcccggcagcagaggaggtgtgaactgtccttggagaagtgtcctctagaagcacctgtcatggagcacagggcctgtgcacgcctggggtttagtgcctgtgagcctggtctccctccccccagaacactgagcactacaaatactgtggtctttgtgtaggacctaatttagagaaaaatttgtatcccgtggacagaatgggaaaaactcctgtggccagtttgtgctgtgaatgtgagctccctccctgctagaatggccggcagtctccagccacagctagaatggccttacygatgatgtattggaactcctacctttcyaggtctttgactttaaattgagtgatgaggagayggcaaccatactcagcttcaacagaaactggagggcctgtaacgtgttgcagtaagtggcatggagttaactagaagcattgccaggagtttttctaaactaatagagggttagttggaaggaytggaaggctgctgggactacttgtgtcttcaaatactattttggggcaattttgaaagttaaaattggggtacctgggaatcactgtgagggacacatctctaattgctgctcattgtctgaacttctggatgtagagctagaatcataacagaaggtgggttgtcaataggcgggaggcagaacattcatttattcattcattcaatcaatatctcacggtcatctatgtgccaggcattttctaggtgcttaggttatcatactgtacaaagttgctgcctccataggcttagggagggagggaagaagagacaacagaaataaatcaactcaaaatatagatgtcagacagcaacaaatgctagacagaaaaataaagtagggcaaagtggataggaagcggtgggtggtagtgggactgatcctttatacagggtgtgtaaagggaggctttgctgtgagggatataccatatgcatatttgggggaagagcattcttggcggtgataacagcaggtgcaaagtccctgaggtgggattgtgtttagaacattcaagcaagaaggccagggaggctggattaaatcatctccaaatgcctcttaaaggaggtggtgctaactttacttaaaatcttagataagtggtgaaaaaaagctttcactctggctgggcaggcattctaaatcatctctttacaagcwatactttctgaataatgtatctaattaaatgtatcaaaaagagttgtctggcatttattactgccagatctgtaattcmatgaggatttgaatctctttcaatgtttctatagccaaaaacgatttttcaccttttaaaaatgatttcggctgggcgtggtggcccacggctgtgatcccagcactttgggaggccaaggtgggctgatcaagaggtcaggagatcaagaccatcctggctaacatggtgaaaccccgtctctaccaaaaattagctgggcgtggtggtgggcacctgtagtcccagctaattaggaggctgaggcaggagaatggtgtgaacccgggaggtagagcttgcagtgagctgagattgcgccactgcactccatcctgggtgacagcgcgagactctgtctcagaaaaaaaaaaaaggtttcagtatctcaagcgctgcttgcatgtcatgatattccatatctatcctgcccaccctaagtatcataggagcctttcctcatcttacaatggcttacttttattggagcttaacaaagtagtagctacttagagcaaaaaggaagggtgaacgtaaagtgggactcacccccaaactaaactgcttaccttcctatgagcatcatttctggcaatgggtagcaatggaggcaatgggttggtgggctctgcagtaaatccacctggcctcaaatccaactttaacactggtttattagctgtgtgacattgggcaaatttcctagtttttccaagttggtttcttcacttataaagtaggatgataatactaatcgcagctaacatccattgaaccttagcttagaatgtgccagggtcctgcrcccttttccggtggtattatctcatttaatactcagaacaatccccaagctgtcaattctgctgttgtttcctacttcatgatgttgtgagagtggattgggacaagacttgtctgtcacctcgcctgacaccaggcttactatgggttgtcattacgagtttattctgctgccctgctcactgtctgccctccttccgagcaaagccctcatatcgatttgagggaaggtcaaagtgtgggcaccctccttatgttcttgcagggaggaggctaagagagcacaaatatgatagagtccaccagggaagaataccttctcaaccagagttgttgttttgatggaactcagtttctctgtttttgttttttgttytttcctgcagatcctctcatttggaagactatcccttcnatgcagaatattgaggttgaatctcctggtgagattatacaggagattctctttcttcgctgaagtgtgactacctccactcatgtcccattttagccaagcttatttaagatcacagtgaacttagtcctgttatagacgagaatcgaggtgctgttttagacatttatttctgtatgttcaactaggatcagaatatcacagaaaagcatggcttgaataaggaaatgacaattttttccacttatctgatcagaacaaatgtttattaagcatcagaaactctgccaacactgaggatgtaaagatcaataaaaaaaataataatcataaccaacatgtattgagactgtactatgtgccaacacaatttgaagtgttttcctgtgggtgaagtcattgaatcctcagaataatccctttggggtaggtattcttaacatcttattattcacatttgctggaagaggaaatggaggtagaggggagggaggaggaacttgctcaaggccacccaggtagtaagtgactgaaccaagtttcaaagggaggcaggctctggggtagctcacagcgatcgatggtcatcctctttctcctgagccttttcctgccacctttccttcttgcctgtctccactcattccctgtcttgctctcacagcttgccttcaacaccattgtgccaaagagtcaatggcagagcctgcaaactccacaaagatgctagtgttcattgagagaggtgcggcattttcttgggaagtagaggtgtggcatttccttgggaagtagggtggaaaaacaataaagatacttactattgccattaatctggaacatttctgtttgtcctataataattgcttcttatgaaatattccaactatatagaaatgtacagaaaataaactaatgagcatctggccgcccaccttataatgttaacaagtgctggccgagtgtagtggtgcgcacctgtagtcccagctactccgaaggctgaggtgggagggtcgcttgaacctgggaggtggaggttgcagtgagccaagattgcaccactgcacaccagcctgggtgagagagagagactctgtctcaaaacaaaaaacaaagagcgaatgctaacattttgccatattggctccaaacctttaaaaaaaaattaaagaaattaggggttaccaatatagtcgaggaccactttgtgcctctccccatccccattccactgacccccctctccagaggcaaatgcttatcctaaattggtgagtcccctcatcctctgtttggggttggggggtacacctacattcccaagcttccttgctatgttaggaattcctctgggtttgctcagtgagaggtacagttaggagcttgacgggctggagaagggaagaccaggcgtttctctctccctctctccctgtctattgaccttgagcggcatctccagtagaagacacgtttctctgtgggctcaactttttccaggcagcctccaccttgattctatctcctaccagacaaagcttctgggatgaggaagcagcactctttctttgtccttcttccttaggagaagggatctcttcctgctgctgctaaactagttgcctcatctcctttcaatagcccagctcttccatcacgtgtatctgatcacctatcataaccacgtatttgaataaaacatgcaattttcaaaaatcttagcatagtttcttttcttctggctggccctttgactggtatacttcccatccacatttttattatatatgtatttttattatatatgtacacatccatacacaatctcacagactgggtgcttttaaaatgtatataaaatgtatacaactgatgcacaggaagcaatttcaacccagagcccagtgatatctccttagtgagcattttgtgaacattttcttctttgtgtcactgtgattatgacttgcttgataaaaagctttggttataggataaaatgattcggtttctattatgtggttttttgtttgtttgtttcacttgaacttaaccaaacagaggtaaatttaaaaagctaatgtggagaaatgctgtgttttaaaaagcaacttcttacttattctgttttctgtctttgtggagaaggagtcttgctctgttgcccaggctggagtggagtgcagtggcatgatcatagctcactgcaaccttgaattcctgggctcaagtgattctcctgcctcagcctcctgagtagctgggactacaggcacaggcatgatgtcctgctaattattttttgtagagacaggatcttgcgatgttgctatgtttcccaggctggttggaaactcctggcctcaagtgatcctcccgcctctgccttccaaaatgatgggatcacaggcatgcgccacctcaccagccagttatctgattatattttcagcatttatatctcgagtaatgagaaccttacacgtctcagggtcctcaatgtcacaactgtaacaaatacaatgcatccatcctaacatttgttcactattttgtcccaattggttggaaataaagccaccatcatcatcacctaaaccaaagctgcctttatggggagacaatctaaggtatacactacaggtgtgtgttaaaaaactcttatgataatgtagggaacttgcattatgaagagaaaggaaggggagtaaccacagagaggaagatggtaagtaaagtcagtgtggaaaaggaagggagcttgtcgtgggaagtagggaggcaaggagtgaggctcttatgtttcaagtattctctccattcattgtctaagagagggctggaaagatgggtagcagctaccatggagattctggaatcactgtgactgtcctgcctggcccaggtaatccagagggctagacttaccctgttgtatttaagtgagatctggcaaatgctgggcagatgatgccaaactataactgggacctaaagggatttggatgtcccaggcaaaccccctaatgcctgactgtccagggctgctccagtcatttcaacaaccttgcaacagctctgcattttacatgattaaaaatttggacccagcggggcctggtggttcacacctttaatgccaggactttgggaggtcaaggtaggaggatcgcttgaggccaggaatttgagaccagcctgggcaacatagtgagactgttgctatatgaactattaaatataaaaaaatttggaccctacttattgcattattgtgagatttaactgtacattatatttaacaatgtacagatgagagaggcttctgtagaaaatagttttcagtaaaatttgaaagaaccctgaagagtgaagattgttggaaataagttttttttttttgctttaatgaccgtgcatgactatagaaatgtaaactccgaacatataattatgcaaaaataggccagtggcagtggcttacgcctgtaatgccagcactttgggaggctgaggaggatggatcacttgaggtcaggagtttgagaccatcccggccaatatggtgaaacctggtctctaataaaactataaaacttatctaggcatggtggcacacgcctctaatcccactcaggaggctgaggcacgagaattgcttgaacctgggaggcagaggttgcagcgagctgagattgcgccactgcactcctgcctgggtgacagagtgagactccatctcaaaacaaaaacaagcaaagaaacacacaaaaataagagataaacaaacttggacaaaaccatttggcaattttcttataatcaaaagagtttattcatataaataagaaaaatctcagatgccacaaagaaagtttttacataaaattgaccattaaatgacatgaaaaattgtacagactagtaataaaaatgcaaattaaaataagctttatacactatcaaaccagcaaaacttagaaataaaagaaaatctatctagaaagatttgaatattaagagggtttttttctatgttgtttggcaacaagtttatttttgttattcttttacataattttcaaaatttccacaataggaaatgaacttttacattctagagaggcattaaggatttaaaaaataacagatttagctcaattagttattttatacatccactgggaaaaccaaatgaaagagacacttttacttgaaattattctcatttaacaagcctttcgattttagaaaatacgtattctgaatgtacaatgcagtggaatttgattacatttaattttaaattctacctaattcatttgtttttcctcatttgttgtcagcattttcccagacatttcatgaaagttttgcacccttaaaatcttatagtgttgccttccagcacttttgttggttcaaaaatatcagcccccagataagttagggagagttggtgaggaccaagaggaccttgaccgttactaaaaaattacgcaagagaggtacttgtgcctcagggctcttgcccttggtattctcactgcctgggatgctctgccctcagatattagaataattctctgacttgtatttttaatttccttgccgatttatcgtcttttcagagaggactttcttcatcaccctatttaaaattaacctacctcctctgatatttcttcttgcccttctaagtgttttcttcttctccatagcatttgtttatcaatatgtcatgtattttatatatttgctgtttgcttgcttaccctgtttctacccactagcatgtaagctctatgagagaagggatttttgagttctgttaattattgtattccccgcctcaataatatctggtgaataaatagatagatggaatggatggaacaatggatggacgaatggatgggtggagggacggaggcatggatggatggttggaaacatggaaagaaggaaggatggatagaaagacaaatggaaggagggatgggtggaaggatacatggattggggatggatgaatgatggatggatggatggatggatggatggatgaatgatggatggatggatggatggatggatgtgtgggatatgatgaggtttctcttcagataacctgatcaatcttttattctttaattcatagtaatccctccaccttttttcctttttctccttttttctcttttttcctttgttacatgcccaggcatgccacagtaccaggtggtatctgtacctgctcacattcctttccttatttggaaagaggactaactttttagctcattacagacaccccttcccctttattctctgccttttttacgtgcccaccttatctaaaaaaaatccaatgtttagccaaccaggattagtttagattgtacgacctgaccctggccaatggagaaagggtacaggggcagtacttgtgtcaggagtaaaggctctcgtgcccctttttcaggtgtgctctcatggcgactggacaaggaggcacctctctgcgcagaagtaaaattgctttgctaagaatcctttgttcaagtgttcaatttccttaagattttgagcgttattcctaacagttctggagcccaactttggggctcgaatcttctcctttgggaagggggccttcggtcaccccacccggaggggacgcatcctactgtctagttaccgtgcccctaggttgagggagatcagggcccccccccgctttgtgacaaataagtctggatctcagcaaagcggggaggagaagcttgcaagaccgcaacaataagaggaccaggaaattcttgtgcatggaataaggtaggagacttggcgaaggtgacaaagtatttcccaggtggttgggataagctggaggctgacagtgtatgaatgggacttagtatggtggttatgtggagtgagtgagtcttctctatggcctcatgctgccatctgtcaactagagtcaggaacagacagagtagacaaagaggaagggggagggtagaaatccaaacaggttgggttggagcctttccccaaagcctcagtaagcctccaggaagggggagggtagaaatctcacaggaggggttgggcctcctccccataatccctaagatggggaacgtttcaagtaagacaggaaaactaaagagtctagagagtgatgaatttccttctgatagccccttggggcttatgctaaagtattgaaaaaataataagagaaccaagtataaacaaaaacagcagatgatagaatattgttgttttatttaagttcgagaacccatccttaagccctcacttttct

SEQ ID NO: 94790 - DNA, 44994 bp, Homo sapiens
  misc_feature (1)...(44994): n = A,T,C or G
ggaagggaggaagaagagaaggaggggaaggatgtagcattctaggtagggaatacacatgtgtgaaggccaaatgatcatagggagaaggaagggtcactataaggagcaatgggaagccactgttctaagctggggagtggtagggggtgacttgtgacacaatcactaaggtattctaccatatcacccacccctggctgcctagaagagagtaaaagtggattcagaaagacttgttaggaggctactgagaaaatgccggcaagaggtgatggtagcttgggctaaggtgttggtagtgtgttaggggtgtggtgtgtctgtgaataggatgaggaggatggaaaaaaatatttgaaacataaaccttgattgatactgatttggattagattgtgtaaagaggctttaatgagacattctagaaattacacttccacgtaagtgtcactgccttctaagtgttatattatgaggttacacacccatttcaaagatgcttcatgggtgtcaacaattctgagaagcttctttcagaayttacgtcagaaccagtgtataaaccatagcagaaaaataggcttattgctatatagaaaatatttcataaatccccaaagctaaggaaacaaatatgtgtgtaatgttcttaagttgatgcagggttcataaagacttccttttatgagtttgaccttccaacttgtagagtgaggtcacttctttaagaaaatatgcatgtatgtaggggaaaagttatgttatctgagtcttcatcaaagaatgaggatatgttcttttatccaagagctagctgactggggaagcccataggcagaagaaaatcctggtcaggaggggttttttaattttatttttagggagcagataaatacatcttagatgactgacaacaaattttccaaagaaaagaagaatgaagttatatcaataagtttttaggagcagtgcatggtgggaagagcttagaacaaaggctaagagtcagactctggttttgtaactagctgtgcagtcttagaaaaattatctctcccagttttacyttcctcatctgtaaatggggacacatatgccaggagttttgtgaggatttactgatggagccctgatagtttggctgtgtccccacccaaatctcatcttgaattgtatcccccataattcccactgttgtaggagggacctggtgggagataattgaattatggcagcggttttccccatactgttctcatgatagtgaataagtctcacgagatctaatggttttataaggagaaacctctttcgtttggttctcattctctctttgcctgccgccatccatgtaagacatgacttgctcctccttgccttccatcatgtttgtgaggcttccccagccacatggaactgaaacttcaattaaacctctttcttttgtaaattgcccagtcttgggtatgtctttatcagcagtgtgaaaatggactaatacaaactctgatttccatccaccatcccctccatatcacctccccaccctggctcctcagctaaacaccttttcttcaggttaaagaatagaaaactctgtggagacagagggtaagcagaaatccttcagtagctatcaggctactatcttcacctttcttagctctgtaatatcagaacatagagaaaaaaattcctggccactttatcagtctccatgaagaaagggtggagccagtaggcattgccattggttcagtagacattcccggagcaccgtcatttagagaaagcagcagcccatttaaatcaatgaatctttttaggaaactgaaacaagttcaatgcccaagagtagagaattggttggacagttctctactcttgtacataccacctggatgcacattcacgtaatggrattatatacggaagaaaaatattaaatgacattgggacatgttaataacaaattaagtagaaaagattgccacaaaacagtatatatactaagagtccaggttttttttttaagtaattgatttatgggaaaaataggatatacaaaatgttaaaaataaattctggagggtgggattataggtattttaagttttttcttttctaaaccttatacaataaacattttaaaacataaatttataattaataaatataagctttaaaaaaaactccatagggcagagtttgtgtttaccagcatataaacaacaagcatttaaagaaacatgggtttttccttagtggagtagagaatttgtaaaagaggaaagcacctctcttgattcctcatgtttctacctttttcccctatccttgtcccagatctgaaagtagtggggaaaaaaaatcaacctggctcttttcctatgccaaggtgcttagtcaatgtttagttttactgtaggggaatttcacatagatcaggcttcccaataccagaggttcctggctctgccactgggtctgtaccctctttggcattcacttcctgcccattacctccctgggtagctgcaagatagctggggaaatcccagtctcatgccctctgcaagagtccaggtctccacttgagtggagagcaggaaaaagaggcaagcgcaatgccaagactttactgagtaatttgaataagaatacttgtaaataggtaaaatgctttacatttatcattaccataattgttaagaataacaactaccatttatgagatgctttccatgtggcaggcacacatcacattatcccacttaattttcacattagcgatttgggtattatctctgtttaacagataaagacactgaggctgaggtcaagcaatttgcctaggctattctgcattttgctagcctagcaaaaccattggctccttccttccagcaaactctagagttagctatgattgtgaggcttccccagccacatggaactgtaagtccaattaagcccctgagttcccagtgctggaaagtgacagacacaaggtgcttcaaagattgcaaagctattccaaaactgcctccatgattcttcaccctactctgtgaggaagatgaggattctaagttttaacttctgaaagaaagggacagactttaaggtcccttctgagaggtctggatggctgacccataacagcatttccagtttttagtttcagaaaagggagtcttgtacttaggaggtcaatgatgggggccacgcataggtctattatactaggttacgagtggtaaattttaatctgaccctgaagtaagtagggtacagttggagactaaacactggcagcaaataaccaactcatggtgtgtcctgatactgtgaagaaaaggagacactcctgtacatggcatatagaactagctaactctggagtttgctggaaggagggagccaatggttctgctaggctagcaaaagggagaatagcctaggtccgtggatgatgttttgatgcacggtggaccaattcagccatacgtggaaaaggctagaggctctgtgcacataactgtgaaattattttgaccaggtatgtatgctatcaataaaatagtggtttattcaggtcacaaggaagacaattttcaactaaaactcaaagtatcacatgggttaatactgactttttgatatacacctgtaacagaaaggaagacaaagagacaacatagctataataatttattgcttttcatttcttgtttggataaaagtgagactacatcaaaagctgtttgatgacactgaattattttcatagtatctatatcacttgctgtatcagaactgaagtcctcatgactggtcttcaatggaagtgaatcctaaaattaatcttaatttaaaaaatacattgcttttggggtgaggaggagaaggcagcaggaagaggaagcatcttcccagaattatatgaattagcaaccttgggtcctagcccaggatttgtccccaaccaagtaattctgagcacatcacttaagcttcagtttctttatctgtacaacaaggagctagagtttaatttccaaagccctgtcaagtactaagtttgtacaagtctaatattctttggagttcatctttgccttaaatggatttatgatcatctttgtgaaccacgacctcgttatttaaaaattcataagagagacagctcatcgaatagaccaggacacagggttcaggatatgatactgtaacataattaagtatggagaacaatcttgccatagggcaaaagtaactcctgaaattctgttagcctctgtgcacatttgtcttacaaacatgcttgctcctgatgaaaatctgctttttaattccttctagacagaatcactgatataagcttccatcttatatcaaaatgactcattcataagccacatactcttgcgaatgattctaaaaggcaagtgatgtttgatattaaggttttatgtgacaagctagcattccatgggtgtccataacaacagtaaacttaaatccaatgagtaggcgcccttaagtccagactaagtagccctaaatgccaaatgccacaagactgtcacttggtaatgactgtcattagcctccggagtatggatggtgggcactctgaataggagctttattacactgtagaagaaaagctttctccttactttgtcctcaactgatattgagaaaaaagcaagagggcaaatgtataagatttggaagctgccccttccagctgttctggcctgaactctagttaatcttgtgcaagttaaattctaactatcactaggtgagacctatcacctgctgggacctgtcaagcctcggattagtgccgtcccggaagtaaagttctgttgatatcccaggaggaactgtcatgctctaacatggataaatgagatacagaactggctacgattaggtcttaatgagttcaataaagagtgtgtcacagaatttcaaatgtggaaagattatcttttcaactgtatgtataatttattctgaggacttgcttgcgtgtcacaaacctaatgcatttgttaggaggatgaaacaggaaaaactcacaggaggacacgaaacactacttaggatagcttctaagaagggaatctcccataacattccttatctttcccgcccacccaagagttctgacacatatgcttcaaaacctcgtgtggtagttcaagcctgcttagaagcttttaaggcctcgtgccaggtttccggtgttttcatagatttctcttgttcagttattgtcgcctccaaatttgtcattctctcattccactctagcctcccttcctctgtgcaataagcttttagggcattccattaatcacttttcttccccacctaaaatactgtcagcaaactgcctaggggaatccctataaaagcggtaagagaaagtaaggttgcgttactgcctataaattgggcactttaaaggcatttgttttaatcacgacttaagactttcaaccacgagtaatttgtgcgaaaggagcttcttctgggaggatacctcggcttcgtcttcaggtttcaatccctaaatttcccataagtaaaagaaacatcacctcctctcttccaagagtccgctgacacctgtcttcacccgcaggtgtttcttttaagacgttaaacgctttctagaacctcaaacagctaagatgctccccgcacccgaggttttgcaccagcgacgctctagggtgtgtttttctacttccctaggcccaagcctgcccgctggcgtcgaagccaactccttactggttcaggtatgtgctcgtctctagagtraaccaatcagagccccacttcttactcctgggatttggtaaacggaagagacctctcctgttccgggagtaggccgggaccgtggatgagtgacagttcgactttccaataggcagagccctaggacctgcccacgtctggttcaggggctagaaaagagcgtcgatgccggcggcagtgatgagtcctaggaggcgctggstctttggcggctcggaggagcggctgctgctgctgctgctgctgctggtggcccctttgcaggtgagtggctttgttttagaaaatgttgcgaacgtttacattttttagtgatgtgatgttttatttttgggtgcggggaaggccagtttctttacttcccccggtttagtcgttggtgggagtctggtgcccactccagccctcaagctgggaccctcacttatcgccccggtccctttcccttgtccctatctcagaatgagcctcgcaggcagtcaccgttctgtcaactgagaggaggagcccgctttggtagtgctgtccttatggcaagaatatatagaagttggagggaagataaactctcttctggatgtctgaggtactgtgtagcagagcccttccaatagtaagatcccctggaaggaagcagggcgatgccgctgtatttagggttctggcagacctggccctatctatcattttgtgtagtagacagaaaaactcgaatgcggtgaaaagagaaggaggtgaatatatgcagtgttttcatgtaggaatctggagccaaatcacaagttcttagaaccactagaaataaaaacgtaagtgtattttcctcttttctaagggacgagctggtattacactagagaaggtcaatgaaatgcataattgcagttaagttcacagttaagctttaaagaatagttggttgttagctaacttataactctcatccccctactgcctcccttgcaaattacggaagatctttagcttgtgagtggtactagaatgttagctgactaaatgcagactctttccaagaaggggaaaaatcaaaagctaagtttcacctgtaggtactaaaggttttttaatagtgaaagcagaactcatgtcaatttgtcttttattttttattttttttgaaacggagtctcgctctgtcgcccaggctggagcgactgcagtggctcgatctcggttcactgcaacctccgcctaccgggttcaagtgattctcctgcctcagcctcccaagtagctgggattacaagcataggccaccacgcctggctgatttttgtatttttagtagagacggggtttcaccatgttggccagggtggtcttgaactcctgacctcaggtgatctgcctgcctcggcctcccaaagtgctgggattacaggcgtgagccaccgtgcctggccttgtcttttttctttctttctttcttttgttttggttttttttttgttttgttttcagacggagtttcgcttctgttgcccaggctggagtgcaatggcgcgatattggctcaccgcaacctccgcctcctggattcaatcgattctcctgcctcagcctcccgagtagctgggattacaggcatgcgcccccacgcccagctaattttgtgtttttagtagagacaggatttcaccatgttggccaggctggtctcgaattcctgacctcaggtgatctgcctgcctcggcctcccaaagtgctgggattacaggtgtgagctaccgcgcccggccttctttttttttgaactgcctcccgtgagtccagggaatagctctttcttagccatctttgtattccagtagcacctcatacaccgcagatgctccccagttggtggtggacttcagagaagcataattcaaacagtgtcatagtggaaggagctctgagttagaaatcaagaacattggctttagtcctgaaactgttactatttgtgtgatcttaaacaaatcatttcaactgtgactcttaatttttgcattttttttttgagacagggtctcgctctgttgcccaggctggagggcagtggcgcaatctctgctcactgcaacctccacctctgcctcctgggctcaagcgatcctaccatctcgatttttgcatctttagaaagcagatgttgcattaaattatatctgagatataaactctgtatttaaagtctgttttaaagtaaaaattattagtatacaagcagaatctcattgcagtaaattctgtaccatctattagcaagtaaaagttcccagcttcaaggatatattcttgttttttaatttttaatttttgtgggtacctagtaggtgtatatatttatgggttacatgagatattttgacataggcatgcaatgcataatcacatcagagtacatagggtagctgtcaccaaaagcatttatcctttatgtttcaaacaatccaattgtactcttttagttatttgaaaatttacaattaaattgtttttttttttactatagtcaccctgttgtgctagcaaatactaggtcttattgatcttcctatttttgtccccattacaaggatatactcttttgtgttcctatttaaaccaaaccagattattgtagaaaatttggagcataccgaagtataatgtggcagaaaaatgtcacttagaagcaactactgttagtgtttgggtagagcttttartctttcttcctcttttgcctgctgtggttggttgagattaagaggcacattttaagtaatgattgatgcacctaaattcacctggccttcatctttgtgtgtctggggcctgaagaacagaggtcacaaacgtgtttgaaccgaatggtttcttgaaacatccttggaatgaaatctgatatgaaagatgtttatatgggtggcaggacaaaaagtattacttaataacaaaacccttctgctgaaacttrgccacaaatatgaggaaaacatactttgtaaaatataaattaaatgttaaccacttcattaaagcatttggattgcagaatattagtacttggtaagcttctgagactgtatcttaccatcaccttcttccatcccacaatatttgattgcattcctccttctaccacctaatttaagcatttctcctctaattcctcccttcattttactttattcccagctttcgcttctgctcatatcatcggcaaggtaggattgctttgaygggcctgagatctgtgccattatttatgagttagtcaaagtctgctccattctacctctcactttttggtagagtgcttcaccataatctcatttartctttctratagccccctgagaacagtagtttcatgatcctcatctttatagatatggaacctgaggttcaaagaatttaaataagttaagatcacattgtcagtcagtagcagagctgggctcatatctaggttgtttttactttagacttttggaatttggtggamacagtttgtgttgataaaagctactaccctggggaagacaatgaccagagataggaaggaggggtcygtcatgagtgggtgttgtccacagtggtgatgccatgcaggctggaacatgcaacatgccctgagcaaatgcacatctcattacatatgtatatctcttcgccatgagtagggatctkcctggtatggttggttattcttgtaacaagcaatcagtaggaaatattagtagatgtaagattggkgaatgagagggttttagtgtctggaaaacacctgtragtggtaacatttgctcctgtaaaatgatgttcttataactgcaagtacagatgaaaaagtttctacaaagccttaggaaaagtaatagaccatggaacacttttaggtacagttgtgtttgaacttctaatagtgaacttgatttgggggaaggcatagtttgttaagacattaaaagccttggccgrgcacggtggctcacgcctgtaatcccagcactttgggaggccgaggcgggcagatcacgaggtcaggagatcaagaccatcctggctaacatggtgaaaccctgtctctactaaagataacaaaaaaaattagccgggcrtggtgacggtcrcctgtggtccccgctactcaggaggctgaagcaggacaatggcacgaacctgggaggcggagcttgcagcragccgagatcacgccactgcactccagcctgggcgacagagtgagactgcgtctcaaaagaaacattaaaagccttaaggaactgagccccagatttcatttcccttgagamctgttcctttttactttgttaaagacatggttctttttctctgtcctcaaataatagccagcccatcttctataaagttagattcctcttgcagtgggggttaaaagttgctcaaagccacacaataaggggtttggaccaaggaaaacgtcatctgagtgtctagggtagcaactgactaatatttaaatgtgagctttgaatctaagtgactctggttctatttgtcttattttatataacttcaacattatattgctgatcaaatttcttgcttaaacgttggaaatacaagaaaaactaggtttttaagttggactttaccctgtagtttgtcctatttgtccgtgagttgtaccactagggtcttaggcattattaactttcaaacacgtgaggaagggaggaagcaaagtcccaggagtgtcagtttggaagacaggatgagcctcagttatggggagtacttataacagaggagcctcagttatgggagaaatataatgtgaaattatatttcacataatttcatatgtggaattatatagtttaatgaaggagtaggaagcagcagcagatgatcatgctacatttgttgaaagtacttagggatctcaaaaatattaagaggggtaaccttagtaaatgcagtgccttgcaagtacatcactcccctatctacagtccctgtcttgccaaaaagaatgctaatcttgaatcataattttatgtttcaattttatggtggcattatggaaagaatattctttgctttatagctaacttagatggaatttctatacatttatagtgaaagatctttgaaagttataagtcacctgcaaagtatgttctttgatttgtttattgtcaaagcaattacatagcacctactcctgagcaagtatacattcccctgaagtgtgaggcactatgggataatttatgaagatgtctaatggggtaaagtgtgtcaaaatgacagatgatatttttgaaggagattaacaggatgaatcctatagttttcccctatagttcaatcttgaacctattcctaaatratttagttaagcaaaagtcaagtactcagactgatttaaatgtcttcagtattgccttctgtgaggaataaaaacaattatgaatgggattccattactcatggtacttgccgttctggccaagaataaaatctagtgatttcataatgttgggattattctatgacgggatgcttaaaggttaaaaatgctgatgtcattagtagatctaagtgtgggatccagctaggccaatatcggcatattgagggcttctggcctataccgttttttaaaaaatttacatttttaattttaaattatggatgcataatagttgtatatatttataggtatatgtgatgttttggtacagatatacaatatgtaatgatcaaatcagagtaattgatttacctcatgcatttgtctattacctcatgcatttattttttgtgtgttgggaacattctaattccattattttagttattttaaaatgcaataaattattatcaccctattgtgctactgaatactgatcttatttattctaactatagttttgtacctgttaaccatcctcactttaaccccctcgctcctgttacctttccctgcctctggcaaccataattctgctatygcaatacattcaattttcaaaatttttagctcccacatatgagtgaaaacatgtgaaatttgtctttccatgcctgacttatttcacctaaccttaggctctccagttccatccatgttgttgtgaatgacagggtttcgttctttttatggttgaatgatattccattgtatatatgtgccaaattttctttatctgttcatctgttgatgggcacttagattgcttccatatcttggctattgtgaatagtgctgcaacaaacatggagtgcagatatctcttcagtatacttatttgctttcttttggatgtatacccagtggcgggcttgctggatcatatgtctactacctgtttttgaacagcccacaaactatgcatgggttttacatgtaaaacggttgaaataaattaatatttcatgtgcatgaaaattatatgaaattctaatttcagtgtccatacctgaagttttattgaaacagatttattcacttatatattatgtatggtggctttcagctgcaatggcagaattatacaattgtacctaattatggcagagaccagtatagcctagaaagcctaaaaaatttgctatttggtggtttacagaaaaagttgctaacatctgagctaagctatagtgtctttcacgtttatctccttcatctcacttaaacggccattgtcctggtccaagtctttattctgtgttaccagaattattgcaaaaacctctcagctagtgttcatactcctgggttttcctgtctatttctgtaagtaagtgctgcctgatcctgctaaaatgcatgctactaaacttttaatgatgtcccaatatgtatagaaaaacctacatgctttggcacaggctttttttgtgtcactattttttcttatctttctaggctagtcttctcctgcttccttattataccctatacttacagtggccatataattttccaaatgggacacttaagtgtgaaagrggccctagtagtaattatgttggggaaacaggcctaagacaatactgttctgtaataatgatgcatgtgcctctttctcctaactaccctctctgtcttgaccttgccaaaagaatgctaatcttgaaccataacttcaattttatggtggcatttatggaaagaatattttttgcctattaggcaaatcaggatgtatggttactctagctatactccaaccagtttgaatgggctcgccattttccatatgtacctgttcctttgccttcactcactgttcccctagattggaattcctttacttttttctgtaaatctaaaccttgcctttccaaatccagcttaaaaaatactgtgtccacgaagccttactcagaaatattctctcccatcccacctctcttttactaatgaagtgctttctcatggtgtgaattactttgagttttaggtacacacacacacacacacryactgwasatgaagacataattcttgttggattacatattcctcataggcctagcattgggccatgcctaaatgggatctgcaaaatgtttgaagaatgaattaattggtcaggctagggcgactgagtatttggggctttcaatttatgagtcatccattttaatgtgattaaagcagtgagaaaagggtttccaagaactgaagactgagcctcaggtttcaatgtgacagtgtagcaaaatggttcagggcatagatacagacttctcgagactaaattccagctctgccatttacagcctctgttaccttaggcaagttaacctttcctcctgtttcttcatctgtgaaatgggagtaatcatagtagccactccatggaatggtggttgaggattcaaacagtgccaagtaacattgaactaacattcacaggtgagcactctgtgaatgttggctactgtgactaatatgatcatcttcatagtactcttacaggtaggtaagaaaatgcagacacccaagaccaagatgtaaccrtggaagagctggaggaaatgctacaccaaaatcttagtgggttttttttcttgatggaagtagtctgttttagagaagtcatgagagaagatgatctccacttagtaagaagtaactaacctgtagtcttttgaggcaccatttcagtagagtgggtaaggcacaagtttggtgtcaggaaactaaaaaaggaatggctagaagggaaggtaaatggacaagaggaaggggagggaggataagatacacagctgtgtaaaagatgtttccttagtaaactttttcttcaagccagatcacactttaaaaaggaagacaccctgggggataaatcaataacctatgtgttctttttttgacatgatgtaaattattgattaaaatcggtacttaagtgccagtaacttttgctatgggataaatgagaaaccaggtacaggttggtgagcttttatgaaaaacaaaacaaaacaaaaaaaataaagcttgaggttgaaaaggaatagtttttaatttgggatggggagtatttattcttagtaaggttcctctttataagttggggtgactattgcctggcttactttgtgccttgaggtttttctcaagagtactaataaggtgagccctccttcatgttcaccttgttcgtttgcgtttgatgaaatggctgcctgggtttggaaggacaagttggaactggagatacccctgtgaagtgaagccaagtgagccaagatcctcaaaccatgactctaatatctccagtggggggttgaaggcagaagaccagggttgcagttccagtttgccatttactggccatatgtttttgaacaagtcaatcagaatctccatttttytctgtggagattatggccatccatgaacatactaaacttatagtacaaaagtacaaagtacagaactataatggataattattcttggctcctgttttgacataaataccctgagattcttaagttaaagtttcctaacatcttagccctgccaactgattttactgtggcagttaccactaaaactctcaagccttagtctcatgtgtacaatccagtcatttctgtctgactttggttcagtcagtacacctactgagtgcctcatatgtgccaagcgatgtgctaggttctagagatacagcagtaagacctgccttgatgcagcttacagtcttacagggcacatagccattgaacaggtaatatatctcaagggatccatcgcaagtgcaccaaatgtggttaagcgggatgctacaggagtaggtcagcaggcctgacctacttcccaatgggtgaagaggaagtctaaagccaggggttctcaaaacatggtccttggaccagccatgtyaccatcacctgaggacttgctagaaatgcatattcacagtcccaccccagacctactaaatcaagctctggaagtgggcccaagcaatctgtttaatttgattttgatatacattaaagtttgagaaccactggcctacagraactaacatttaagctgagctctaaagctgcatgatctagtgcggtagccactggtcacatgtggctatggagcacttgaaatgtggctggttcacattgagatatgctttcattataaagtacacaccagattccaaagacatactgtgaaaaaaaagaatgtaaattgccttattaataatttttgtatggatcatgtgttagaattgtattagttctcatgctgctaataaagacatatcagagactgggtaattttataaaggaaagaggtttaaatgattcacagttcagcatggctggagaggcctcaggaaacttacaatcatggtggaagggaagcaaacatgtccttcttcacatggtggcagcaaggagaagtataagtgaagtgggggcaaagytccttataaaaccatcagacctcgtgagaactcactttctatcataagaacagcatgagggtaactgtccccatgaatcaattacctcccactgggtccctcccatgacacatggggattatgggaactacaattcaagatgaaatttggtcttggcccctcccaaatctcatgtcctctcatttcaaaacataatcatgccctttccaacagtcgcccaaagtcttagctcatttcagcatcaacccaaaagtccaaatccaaagtctcatctgagacraggcaagccctctctgcctatgagcctagaaaattgaaagcaagttagttacttcctagatacagtggggctacaggcattgggtaaatatacctgttccaaatgggagaaattggccaaaacaaaggggctacagcaggccccatgcaagtccraaatccaatagagcagttgttacaccttaaagttccaaaatgatctcctttgactccatgtctgaatgatagcttttggacctataggattcatgtggcttgtagaaaatttaaaacttcattgtgcctcgcattatatcttgattggacacaactgatctaaaggatgactagagcttaacctaaagcagggtgagactgaagtggcaatggagagaagagatgaagggtgagtgttctgcatagggtacagtgtgtgcaaaactactgaggcaagaaagaacctgacatgctcaaggaaataaaacgaaagccttgcaggtcacatgaaggattctgaacattttctaagaccagtaggaagaattgaggktttaaaataagatactcaattttcaaggagtttaattgttagtttgcagttaataaatgagggcaagagaacttcaactgaatatagcaagactttcaacwttgaagctccccaactccctaggatggtgggggaggggcgatttggtcagtggaggaagcaggacgctgcccatcacctgaacctaaccctagggtatgaggcatgagcaccccccactagagagagaagcagtgtcacctgggaagaggtcgttttcagttcagatctttttcagtgcaattgacactcaaagytgagtgggagtttgaggacagagctaggaattctgcagggcaccagcaaatggttyggtgagggagggctgtaaaggtgggtcagggagaaggaagcccagagcattatggggattagagggtctgtcctttgaaaggctgtgttgggcaataacaggaaagctggttaagtggtccagacgcttgggttctgaccgtctcctggggtatagtggctgtaccatttatctgtggcctaggggaggtttccctttaagtcagaggtcataagctagcagccacgatctagcctgcagaagaaatgttttgtttcactcacattttacaaatatacattagttgctaatatttaaatcagatatcagataaaaatacacrttttcattttttttttaattggaagatctagaaacctcagttgctcagtatcacagggcaatgggctggagctaagtagtaggtactcctttgattttttacatgaatttttaggaggttttgaaatgattgttttagcttttttaaaaaagacatttatttactcaaagtttctctgtggtctgactctaagtcttgcattcatcctagtcttcgatgtcagcaatcccatcttctttttgttttccagaaaagttctaagaacagtgctgttggctcagtgagatgaggttatcggaaaactttctgtttacacaagagttgcctccttcaaagaagcatgcatggtccttgcaggtcactgtgcccatcactctgcatagtccagctgcactctgcttcacacagctgcctgcccattgcaggcatttgagtttgcaatccatgccttaaactttaaatcacactggctacagcrttgtgtgtttcttggtaaacactgggtaaatcagctcctgtggatgttgactgaagtttctatgtttgcaagctaatcctcagcagtttctttgtaagtatccagcagttaagtgggaaaagtccgttgatagtactagggaggagagaggaaagtraccttttgttttcttgagatagacatactagtttagtactttatcatgtattcacctgcgtaaatgtattcctgtgcttcagagtgagggaaggatgcatatttgcatagtttttgtgactgcagtactgttcctctgttctggtgtgtgtgtgtgtktattttttttttagtaaaaagaaaacagaactttgttttaatgcagtaagcaaatataggagaataagataccacaaagcttggtggtgggtgcctgagtgtccatgttgctattactacattgttttgtccccttgatatagtttataatcaaaagatggtggaaaggtgcttctgtctacaaaatttgtctaaccatgcccttctttaactgaagagagaatggcttcattagcttatggaggtttctcacttgacaagataaactgagggtgaaggtagaggaacagttgatagcttcttttttctccatccccctcctccactaccaataacaaaacaaaatgatcaatggttacaaagggtagatacagtttttgatggagctgaggcttctactacttggtggattggggctttgtaaagaaacactgcaaaaatatcttccatttgcaaattaacacacttacacacacccctccgtgtgtgtgtgtgtgtgtgtgtgtgtgtgtgtgtgtgttcatcacctggtttctcrcaggtgaggggctctgaagcttgaactttgttagaytcatgactattctgcccctgggcacaggcagtcatctggcaaaacactgcctagataccttttgttcccttctctgttctgccaccctgatgcctcttctaggctaaggacagagacattgggcttcctccttgggaattctcagctctgtgggatgctttaatctgggtcctgagcccaggctcttctggttccctggcacttccctgctgcacatgcacagcaacctggtacttaacaagaaaggaaaatcatcatcctaactgctgtagcctttcaacttcagtcatgcaccacctaatgatgtttcagtcaagcatggatygtgtaaatgatggtggccctgtaagatggtaatggagcatatatagacatctgatatgtggcacttgacattggcattgcagatcgagtaggggaaatgaytgatattcagtaattgtgctgggatacttggctttccatatgaaaaaacataagtaacaatatgtataccatctaggtttgtgtaagtacattctatgttgtttgcacgacraaatcacctaatgatgcatttgccaggacatattcccttcattaagcaacacatgacgatacttgcaaatcacctcaatttgatttctttccttaagtcctctgtttgccttccattgaaatataaagccttattttaaagactgttttcccttcagaatctctaggaattactaaagaaaggtagaaactagatctagattccaatcaattttgccattgattgttattttactgtgggtgactcacagtttaagtgggagagaaaatcnccagttaatggaagttgccaagagtggcagaagaccaggcngtagtgctcgtataatctttacaacccagtgtgcaaaacactggaggagagatggagaggccgggcgtgtaaaccaagcatgtgtcagtgcagatgtgtccaccacaaggagagagagaggcgggctgagcagccatgtcagcagattctccgaggatggagtgggcccagcagatcttcaggccagcagcttaaatgtaaggagttcagcatagcttgagagttgctggtctccctttactagattctccccctgctaagacgtagctggtgtgtgtaggatatctggagggctggggaggaggaggtggggcctctttatcagtgtggttcctctcactcctgcctaccagatctgtttgtacaggcagcatccctcagctgcttgcatttgatagcttattttgcatctggatttattcctgctgaaaactctatcttgaggtaggtgcaagattatttaggtacgtaccayatttggtgttaatgtctctttaaagcacttttaatttgtctgaatgttgaactgatgtgttttgcataccttagattttcttgtgtgttgtagcctgtggcattgaagagctagttgccaccagccagtgatacatatcagatatatgcagtggtgcattgaaataacatgtttaataacttctataataagaatgtgagactggtaaatacttctttttccaccacaggaaaacaaagtgaaaaggatgccttcagtgtagagtcagctgctgggagctgggagttcccagccactagtcattctttcagacgtctgtaactcattctattaaatcctttctactgtaagcataaattgcctttgtatctggcagaaacacagcatgccattagaatgaagtgttttgttattttatgtcatgcaattaacatgctatccaaacatcagaaaatttaagtcaactagattccctgtaatgaattattaatatctatagaatatgcctgtatgtgtcacagtgtatgagttatcacatttctgactgttcaaagggatttcagtttcttttagaaattgggtgttgtaaagcgatgtttctattcctagattgtcagttgaatataacttagacttgttgttcttgtctttctagatgtattgctgtccttgaatattagcccatttgaaaacgcctgggaagttcagccatcagtatgtccaagtacaaacttattatgttaagacatggagagggtgcttggaataaggagaaccgtttttgtagctgggtggatcagaaactcaacagcgaaggaatggaggaagctcggaactgtgggaagcaactcaaagcgttaaactttgagtttgatcttgtattcacatctgtccttaatcggtccattcacacagcctggctgatcctggaagagctaggccaggaatgggtgcctgtggaaagctcctggcgtctaaatgagygtcactatggggccttgatcggtctcaacagggagcagatggctttgaatcatggtgaagaacaagtgaggctctggagaagaagctacaatgtaaccccgcctcccattgaggagtctcatccttactaccaagaaatctacaacgaccggaggtataaagtatgcgatgtgcccttggatcaactgccacggtcggaaagcttaaaggatgttctggagagactccttccctattggaatgaaaggattgctcccgaagtattacgtggcaaaaccattctgatatctgctcatggaaatagcagtagggcactcctaaaacacctggaaggtaccagctttatataccacttattagaggttgccaagtgtgatatctaggccttaatctagaaattaagctaatgaggccctatttacacaatagactcctctatccccctttgtcacttcagatttaagaattgtcttgttctataaatcagatctcttgtgtgttttctgttcctgttacccgaagcagcagttttcagactttagcaagcatcagagtcacctggagaggttggtgtatcacagattgtgggtcccaccctcagagtttyggaatcagtaggtctggggcgcaccctgagaatctgcatttcttagaagttttaggtgatgctgatactgctgattggggttccacactttgagaagcactagtctaaaggactgtatggcttgttgtagtgaaatgaaaggaagctaggaaaggaaggaattgttgaaatggccttgaaagtaaattagagtttttcaagtcaagtaaattatctagacttcagttttgctcacgttcttccaactttaaacartgattgctgttcctagacgtaggtttcctgagcagttcttttgtttcaaacttcttttcagaacaggcttagtcattgactggaagaaagttagggggaaggaaactaaaaggatagttggtttatttatcttgactctaaaaatttggaaatcagcagcagccataattttaactactttatgtcatgttctacatgtatactaaaacatactgtattgttacctttttaagtaacatgaaccaaatgaactcttgaggattcaggttcaccggttttgagcatcagtgattgcactgtgacaccttctggatttctcactgttctgtggatttctcgtttccctctctgcctccactcatcccagatggttgtgctttttgcgtgatatgccctgtctggtgttttcctgcctttcatcactgtcagcagttagcttactggtaataaatagaagaaatttctccaccattcgttttcattctgctttaattttctataagaggctgtgacaaataaaaaggctgaccttgtatgtgaaataagtagaaatagattattagttaaaaatgaagtaatctttagcatgtgattattttcccctaatttttataacatgaccaagaactaaatcattacttgtatagctgacatccattagtcatgcagagacctaaaatctacagactattagatactaaaattttattggctagacatggcacttgatatgtgtgtgtgtgtgtgtttgtgtgtgtgcacgtgcgcatgtgcgtgggcacatgtgtatcttatttactcaactatataaaaggttctattyttgttcagaataattagatctttaacttcattattagtgatatataacttcatcattaatggaccatagtattttattgtttgaagaagagttgaggcttctactagacaacaacaaactgaaattcagaatttcagagtttctgccagaggtgtattctattcaaccgtgccaactcctttttcagagctgggtctcagatttattgtggccaggctcccttctctcaagaaaacaccactatctcctttaggatcatctttctccaccttcttagcttggaagtcccccttttaaaaaagtttcctactgtttaataccattgactcttcacctatcttcaaatttattatagatctctttaaaacgattctacagcccaaccacagctcattgtacacatcccctcctgctagtgcattgatgatttaactattttttactgttctttttgagggaaatyggaaagtttaacaaatgatggtaaagaagactataaccatggtgggggcaaagagagaattacatgtagaggttgtgtttagacatagcaaaacttacttttctacatttgagggaggctttgaaactattagcaatttatttaattaatttaatcaaatggtgtacctgctttggaaaacaatctggcagttcctcagaagggctaaacatagagttaccatatgatccagcaatcccacgcctacccatatagctatattagcttcccagtgctgccgtaagaaaacaaccaaactgggtgggttaaaacaacagaaatgtgttttctaggggctggaagtcccaaatcaaggtgtgagcagggctgtgctctctctgatgactctaggagacaattcttccttgccttggctagcttcggtgtttgtcggcaatctttgatgttctgtggcttgcagaagcatcactccttggcattctccttgtgtgtgtgtttcttatccacatttccccttttataaggccaccaataatattagcctgccgcctcccaccagtgacctccattttaatgggattattctctgttaaacactgtatttccaaatagggtcacattatgaggagtttgggacttcagcctgtctttttgaggggatcacagttcaaaccatcacaatgcccaagaggaatgaaagcacatgtccacacaacaacttgtacctaaacctgcagagcagcattattcacaatagacaaaagatggaaacaacccaagtgttcatcaacttataaatggggtctatctatacaatggaatattatttggcaatgaaagggaaggtgatgctgatacatgctaccatatgggtgaacattgaaataactctgttatgtgaaagaagccagccacaagggatcacatattagaggatttcatttatatgaaatacccagaataggcaaatctttagaaacagaaggtagagtggttgttgcctagagggtagggaggatggaagattttgcaagtgatttgctgatgggtacagagtttcttgttggggtgataaaaatattctaaaattgattgtagtgagggttgcacaactctgaatatgctaagagccattgagttgtacactttgtgtgggtgaattgtatgtgaattatatctcattaaagctggaaaaataatcaatggaattgaaaggttaaaggatttgtcattggcctagaaaacagtggggggtggcaaacatacggaagtgataacaaaactgaaatgcatggctgtggagtgtagaatactggggaaaatcaaagtgcacatatacaccatggaatactatgcagccataaaaaatgatgagttcatatcctttgtagggacatggatgaaattggaaaccatcattctcagtaaactatcgcaagaacaaaaaaacaaaccccgcatattctcactcataggtgggaattgaacaatgagatcacatggacacaggaaggggaatatcacactctggggactgtggtggggttgggggaggggggagggatagtattgggagatatacctaatgctagatgacacattagtgggtgcagcgcaccagcatggcacatgtatacatatgtaactaacctgcccaatgtgcacatgtaccctaaaacttagagtataataaaaaaaataaaataaaataaaataaaaataaatgaaaaaaaaaaaaaaaaaaaaaaaagtgcagctttgaccactggggcagaagtggacttacagggctcattgggaaataagcaggcattggtcttcaggcagcttccagtccttcatctaaagggctttttattttattttattttttatttttatttttttaagttggaagtatgaaactgaatgaccttttcttttcttttagagattaatgacattttcttttcttttcttttcttttcttttttagacaaagtctcgctgtgttgcccaggctggaatgcagtggttcgatcttggcccactgcaaccttcgcctcctgagttcaagcgattctcatgcctcagccttctgagtagctaggattataggtgtgtaccaccacacctggctaatttttgtaattttttagtagagatggggttttgccacgtttgccaggcaggtctcgaactcctggcctcaagcgatctacccacctcaacctcccaaagtctgggattacggcatgagccactgcgcacctggccattaatgacattttaaagtagccttacattataactcctatccctattaccataaacaggctttatagaaaatgtttttatttgggggataattgatgtaaaacagtggggttggtgtagaaagaagtaaattgtaggaaatgacttcagtaggaagtatgtgaacacagaaaaagacatgggctgccagagagggaggtatctatgagagaggtagagaataaaaatgatggggttgatgaccaaggaggatggcagatagagggaaaaaatggcagaaaagccagaacatgcagttaggataagaccatagcctagaaaactaatggaatggatgtgaggatccggatttgtccacaggaaaatagaaggatggtttgtaatcttgattctcacccattctggatatgatgactttgttcctttttggcctatagtacctcctggtggtactccaattaacactaatggagttcttagatgttgctgtagttctctactgtgacttaactcccacacctaacatggaagaaattatgtcatgtgcatgaaataggctggattggatttcaggatcactgcataagttattgtctctaaatgtcaatctgtgttagtaaagtttctcttacagtgtctattgaaaaataaggtcccaagtattctttttcacaactgcaagaattaagcataagtgactttctcaagatcagaagacatagtatgtcatcatatttttttcacatcatttctgttaatttagtgagattttagccctttcaaaattgattgtagatgtattcactcaccagaataggcatgttaatctaatgttagtcctcttgtattgcatgtctaactttccacagctcaagttacagggtttgtgtgcttcttggtaacttaccaacctaaaagaaagcatttcattggatttagatgctaamttttcaagactcaaaaaattaagtgaatctcccctactgtttaggggggaaataaaggttttcttttataggaaggactgctttgccagttcatgtgtatgtgtttatggtggtacaaaatataagttaccatcttaattgccaatttatgcttactatcaagttacatgatcatacatgcccattttgtggttaatgcctgttgtccgaatgtaattattaatagcatctccttttactttcaaaagtgccccagtctggatgataaattatgtggttacctcactataaaaatattgagctgggtgtggggtcacgcacctgtagtctcaactactagggaagcggaggcaggaggattgcttgtgcctaggcttgagatcagcctggacaacatagtgagaccccattttagaaaaataaaaacgtaaaaatgaagacgttagctttcactactgttaagaattgaatctagaaatgggcataaccagggttttatatttcctgtaagcacaaaagttgctaaatttctttgcatttattataaaagtaaaaacacttgtggctgcagattcatctggttccaagccgtgctttctagagatgtttatgtaaacttctcccatataaaatgggctctttcaagggactggagtaatttttccctattttgtctctaaactgcttgacaagctaaaaaagttttacctactggggmggagtgtggtaacggatagcatcaatgacagcatactgtcctatcagaaaaatactttcttattgtttgaaaactagggtgggaagaatcatgaccccagttaaataactaattagaatattggtctatgctgaaatctcaaattgctttaagatctttctactaagagtatgctagtattactcatctcctcttaggtctagtcttagaggtgtcatccatatacctcaacagtaaagagtgttggttctgaagatgttagttgtttctcagatatttgatattatgacactgtaggcagtcatatcctgactgatgctttctccatttgtggaaaagaagacaggtgctgttggaggaaactgaaatctaaagagactctagattccttggccgtgatcatggtaattagttggcatcaagaactctactcaaaactcagttcactgaggctccacacacagttatcacctgggctttaaaacttttttctaaaaggtagcctytcccttgacctattctttgtttggaatactgtgttttaagaagctgagtcaagaacatccatggcaggtaaactataaaaaggtaatttaatgcaactaattgagtcttaaattattactgctgttataacattgtggtctgaatggcacactctagcatagctatacgggatgacctttattcagtgcatactgcatgccaagcacagttttaggcattttacgtacacatgttgttttatgtaggaactagaacatggctctgaactcactggaaagctatggttcaatactgcgttttactttgctgtttagtatatccwggtcatattttttatttcatttgatcaatcattgatcactaagctgttttgcttaaagaaactgctttagtaaaaagaagcaaactattgatacacccatcatcatggatgaacctcagctgcattttgccaagtgaaagaaattgggctaaaaaagctgtgtattgtatgattccatttatgtgccatttgggaaaatatagaactatcgggaaataamagattggtggggtaagagtaggctgctgggggcacaaggaaattttaaggggttgatagagctgttttatatcctgattggttattacactactgtatgcagttgtcaaaactcatagaactgtatgctaaaaagggtgacttttgctatatgtaaattatacctsaaaaaagacttgctttatccagtgaactcaccattgccttaattgggaccttaccttttgttcacaaaggtaatagactacattagtcaattaggagaattaagtgaagggttgaaggtttgctatatgcacctatctgtgcctttgaaaactaacctggagggcatttgttatgctttctcaaggcttcaggagccatctggttctgactttagcacctaaaccatggtcattatagggaactgccttttaaagtccttcttcatgagaagttatgtttgagaatcttgctaatgttataggttgaaagctcctctaataaaggttttttttatttttttatttttttatcccagactatctctgcttattatcatcaatttctttagccttaattgggccttccatcccctcctttttctcttgtaacaacctagtctaggagcgggtcaacaaggacctcctggagtcagcgcagatgaatggtacactgagaggcaagtgatactgattcggagctagataacactcttgtataagaattgcaaacactgaaaccacatgtcagtgcctaagacaggcttcctggctgatggggatgacctctcccctgtcaaatgacttatttatataatatctctgctcataaatcatatatgcttttgagattgctttacttttaatctgatgatagttaatgctttcggaagaagtcaraacaagacatacagaatattatatagtaaaaaaatgcctacttaagggactgctttactggcttttagaagtaccattattatgctaataagtccaggttaaaaagcagggcccacctctgactggttcagacacacttctcacaaagcaccaccgtgaaaacatctaacgcagacctaagtatctgaaagcatcctgtactgtagcgttccagacaggcgtgtgtttcattctctgtggttggcatagtcacttcctgtttgtttcctgctggcgcacgtccaaggaaaagccaggtaccaaactgaaacastggatgtagtctgcatcttgccagaggaaatggattgtttagtctgggtttaagcacaggacgaggcagtttcaagtttggagtaagagtgacacacaagacactcatgcaagacagacttgatccctgaagacctgtgtgcagctgcatacatagcaaggcacagaagtgctgagataaaattagagactcagggaggaaaggtcagctgggactagctgtggggacggggactgatgagttggttacctttggcattttagtgtgatattttcagaagcagccaattcaggcctcgcttctgtgaggcaagtagttgcctattggtgtggttaagctttcttttataataattgatttatagaaccctttattttttaaacattataggctattttaactataaaattaaacgtagaatggattcttctctctgccttactctaaattagtggctgttattttatcgtgttattcaaatcaccctagcatatctttacatatatagtattcagatcttaaagaattaaaattaaaaatagatcatttatgaaactctgaatctctagtttcagctcttattggccataaaggaatacagaactcttatcacagattgtcggtggggtttgaattgtgacttacttgaccaggagaggaaagtgaggaatgaatgggtggcaccttattaaatgaatgagttgactggagttgtttcccttttttttctaattccaaagagtatacactaccgaattggggtttcttctttccttctcatcctgtagcraatctttctgtctctctgaccatctcttctggttttctaaaattcaaagattttgaacactttggagaaaatcaaagaacatctaaagccatttaatttgaattgtttattttattggcactagatgtaaacagctttttgttcaaggctaagattcttttaattctcctttttttttcttggtaaggtcataggagagcacagtgtttaatcaaggcttcaacaataaaagactagatttaatttgaaaacccagagagttcgaatttattcaattcaggtttgcacctagggttcactaaatcaggtcttgttcatggtacaagggatatagcacctatatgtgaatgagacacacaaggtccttttgtggagcttttaacctctttctgaaatttgtctgtactgtacctctgacaaagtccttagggtgttttcatatataggctttatgttttaggatttttaaattaacattttgktcttttttttttttttttgagatggagtctcgctctgttgcccaggctggagtgcagtggtgcaatctgggctcactgcaagctccacctcccaggttcacgccattctcccacctcagcctcccaagtagctgggactacaggtacccgccaccacgcccggctaattttgtttttgtatttttattagagacggggtttcactgtgttagccaggatggcctcgatctcctgacctcgtgattgcctgcctcggcctcccaaagtgctgggattaygggcatgagccaccacacccagcctaacattttattccttatagcctttagttatatgtaaaaagtagattcacataataaatacagctgtaattacttagtggatcatattactgaataatttctggaccctagcagccaaaccataaaagtgttacttacagttgaataaacatttactaaatcttgcagtgggtaaagcactgtgttgtaacagcatgggtgatacagaaatggatcaaacattgttcctgctctcaaggaatttataatcctggtgggaaaagtgagcatttgcacaagcacctctaccaggaggtgctttagtagatgtacagtgtacataacagtttgtctttggttcctgttcctgctatggtgacttaggggagggggttggtaggtgcaaatttgacttcctgaagttaktcctctatgcagaaaataaagttgtttgactttctccccaattttggccttgagctacttcctggacttattaccccaaactttcattatttcttccttaaaatatcccattatttaaattgactgcagttagctcctaggtgcttctacatgaagattcgatacttaaaggcagactttaagtatttaacacagacttaaagactttaacacagacttaaagacttcaacacagacttaaaggcaatggtggacccttaaagacaagggtagctgtgaagggaaacaccactgagttctcaccctgcacctgctcctctccaccctactgtagaacacagtgccttgcccattgcaagaatttagtgaatgtttgttcaactgtaagtaacactattatggtttggctgctagggtccagaaattatttagtaatatggtccactaagtaatgacaactgtatttaactccacaccactgtggagaggggtaggtacagggtgagaactcagcagtgtttcccttttcagccaaccctggaacaatatggatttgaactgcataggttcacttatacatggattttttcccaaaacaacttggatcaaaaatactacacttgctagatgtgaaatctgtatatacataaggctgataggactaattcagtttggtttaatatagttcagatgcattattctggccttaggagctctgcctgcttaactttcttaggatgatgaatgtaacttatgccaaaattgagtaatgagtaatggcttcactgtggtttttcctaatttgctgttttaaaattttagttggccgggcgcggtggctcacacctgtaatctcagcactttgggaggccgaggcgggcagatcacgaggtcaggagatagagaccatcctggctaacatggtgaaaccccatctctactaaaaatacaaaaaagtagccgggtgtggtggcgggcacctgtagtcccaactactctggaggctgaggcaggagaatggcgtgaacccaggaggcggagcttgcagtgagctgagatcgcgccactgcactccagcctgggcgacagagcgagactccatctcaaaaagaaaataataataataaaataaaataaaacaaaattttagtcacttaagtctcattgactgattattaaccagtctaagtattttaaatatttgtaagtaattagtctgctgtgtgaatggcttgagtagtcattaaagtggaatgttgattttatttatttattggaaacatttctatttttgttgaactctccttcctttgtagttgaaatattacggcggcctttgtttatttggctctttaatttggtcccacacaaaagggaccaaacttgagagtgctgctattaaacaggggacctgttggatccggttagatctgaggccatggtcaaacaagtgaatcccatgtatacccaagccccttgctgaagacctggaactcgtttctaaagtcacagacaacaacccctaaacatggcccatcataatcgcagtgtgttagctggggatcagacaaacttattcattccctttaccagtcgtgggaacactggatggcatcagcagatgtccatttaggacccagcctttcacgagggcagagcattcatataaacattcttctctctcctcctcagtagtcgtggaaataaccatggataagtcacctgaccagggtttaaatcctggggatttggtagtttaaaaaggtccatttttactgccttaatagtcctgtgagtagagcaggtttttatttaaccactctggatctgtttccttttttttttttttttttttttaaattgagacagagtcttgctgtgtcacccaggctggagtgcaatggcacaatctcggttcactgcaacctccacctcccaggatcaagcaattctcctgcctcagcctcccaagtagctgggattacaggcgtccaccaccacgcctggctaatttttgtatttttagtagagacagggtttcaccatgttgcccaggctggtcttgaactcctgacctcaagtgatccacccacctcrgcctcccaaagtgctgagattagaggcatgagccactgcgcccagccctgtttactattttttaacatctttattgcgttataattcacatactatgcaattcgccatttaaagtatacaattaaatggcttttagtgtattcacaaaattgtaaatccattaccacaatcaatgttggaacattttcactaccctaaaaagaaacccagtgccccttagctgttatcacccccccagttcctcccctattccacccagcccygggcaacaactaatctactttgtgtcactatagattcacctgttgtggacatttcatgtaaatggacttatgcagtaagtggtcctttgtgactggcttcttttatttagtagcatcatgctttcaagattcatccaagaaccttgttgtggtttggttcagtacttcattccttttcattgccaaataatattctattgtatggatataccacatttaatttatctgttcattagttaatggacatttgtgttgtgttcactttttgactattatgagtaatgctgctatgaaggtttgtgtacaagttttgtatagactcatatttcacttctcttgggtatatgcttagtagtggaattgctgggtcatatggtagatctgtgtttaacaaaaggaattgccagactgttttcgaaagaggctatagccttttgcatacctgattttacagtgtattatgattccagtttctccacatccttattcacacttgtttataatctgactttttattgttgccatcctagagggtacaaagtagtatctcattgtggttttgatttgcatttccttgatagctagtaatattaagcctatttttatgtacttattgaccttttgtatatctttggagaaatggctgtttaaaccttttgcccatttttaaatttgatcatttgtctttttattattggagacagttcttatatctgataaggaacttgtatctagactatatatgatatrcaaatttttctcccattctctgggttgcctttttatgttcttaatagtgtcctttgaagcacaaacatttttaatttttatatacccagtttatttttttcttgtgtatgcttttggtgtcatatctgagaaaccattaattaactcaaggtgatgaagactttactcctatggctttttttctaaaaatttttacaattttagctcttgactctaagtctttgattcattttgagttaatttttatataaagtatgagtcaggggtccaacttcattctttcacatatggatatacagttatcccagtactatttgttgaaaagattattgtttctgcatttcattgtcttggcacacttgttggaaatcaattgataaaaaatatgagggtttattttgggttcccaattctatttcattgatctgtgtgtatcttgattactatagctttgtagtaagttttgaaatcaggaactatgagtcccttggtttatttcttctttttcaagattgttttggctattctgagtaccttagatttccatatgaactttaagatcagtttgtcaatttatacaaaaaagtccattgagatttttgataggattgtattgaatctgtatgttaatttaggaaatattgccctcttaacagtgttatgtcttctaatccataaatacatatttaggttttctttcatttgaacactgtgttgtagtagtcagagtatagttttgtacttcttaggttaaatttatttttagcattttattctttttgatgttattataaatagaattgtttgcttaatctttcatgttgcttattgctactgtattaaaaacccaatttccttttctgtattgttcttatatctgcagccttgctgagtttattagttctaacaggtttttggtgggatcataccatctgcaaatagagatagttttacttcttcctttccaatctgggtgccttttatttcattgtcttgcctagttgccctagctaggatcttaaatacaatgttgaatagaagtagaatgttcagtcattctacaataaagtcctaggttcaagaacttaagattaatagttggtgacactgcaaaggcacacatctatgagtggtgaatccaagatgctgatagatatatacactcatagtttctacttctggtaagctttagtcaaacatggtcacttttgttatcttttaacaaattaattttttatagtgaaaatttagattatttggagaaatctataaaatccatttttctctccaatttagtgagcaatatgcttacagactctggaaacagataaagcatggtccttgcacagtagatgaatgtaaacagtactcagtgtactcatgctcttgtgtctctaaggtgcctctgcttttcttaaccattaagaataaaatacaggaatgttggtgctagagggacttattttataaatgaaaaaatagttcattggaggtaaaatcttggccaaggtcactcacacatgttcttccacagagtactaggaatataaagggccctcagttactagttagtgaatgagttaggtttggagacctccagagcttcccctggatttgggagtgagcactgttggatttgaaaggctcagtggtcacctgactccaaacaacaggctgttgacttcccctcctgctctttccaagggatgtttgtggtggctgttgtgcggctagctgacatttctggcctgttgaagccagaaggtgtttagaatctagagtagtcatctccctgctaaacagctagaggtctggtctgagtagatttgttctcagcagctgtagtttgtgatggtaatcttctctaaggttgcagtgtgagggtggggcttggcagggcaaaggagtatcttagtagccttcccattaaatctgctacctagaagggaattcctaatagagaaagaagagacacttattgtgctaccctttgttcatgtatgttctcttttaagccaccccttttatcccacaaccctttaaaatgctggcaaaggaagagtgtgtgtttcttttctttctttctttcttttttaattgacaggagaattggaggtccagagaagttacttgcctaaaattctgtattacattgaaggggtactggcagggcaggtgatgggacagtacacttacttggaagagactgtgtcttctgagttaagatcctttccatttttcatagttgtttgagtatggatagtttgtgtataagagttattagggagctcttctaggccttgacgtgaaattctaataaagagccaccccagcagtaagcatccagtgctacgattctgtgactgtttggctggtgctcacagttaggatcaatggctaattaaaatgaaaaggtgcattgattactaaccaataacaacttattctgccactctcaagtaaagacaaacccttggactcccctgaacttgtttcacctaggtcctttctgttaatrtagaacaggaagcatatagttagaatttagaagtctatgtgattaataaaggagtgtttttaaagtagataatttgaatactttcagttgtcttttagcttgctgaacttcatctctttctcatgccttccctttgctcactttgaactcagaaacttgagaggagttacattatacagtgggtacagacccctaggtttgaatccaggctctgtcatttactctctgtgtgataattgtttacttaacctctctgtgccagaacttgttacatggagaaataatatgtcatcatattgcaatgatgattaaatgagttaatacatacaaaatgcttaaaagagtacctggcatgaaatatgaactcagaacatgttagctgtttattgttaaaagtacttataaagaatattattactaccactgctactacaastacagctcttctggtccaagttgaattacctgtaattcagttgtactttaaaaagggctaaaggtggcttgtgttttatatataccttccttttttagcagctggaatgttcagggatcataggagagcgagccctgttcacaggcatgctgtaaaatcccttcctgattcccttgactgtgctttctaagcacctgggaaagcattcctgttggactggatctagctcagggtattgcaagctcacttagtgtgggaaaaccaaacacattttaagcaaatgaactagatttagagattagcgaaaagtcctaattttagtaccagcctgggtacaacacataaaaggagaaatacagccaatgctcctggttcactttctgatttttcgagattacctgattccttggaaaactagtaacacaaatgtgggcatagagaaaataattttccttcctttcggatttagataggaaacaggaacagattgtcccaaaaggtatctactgtcctgatgtagcacttgctgtgaatctctaagccttttttcttgtaatttctggaaagttcctggcttccaggaattatagctggaatccctcagtacctgcatgtttcaggcacacagttaaatgggattaaagtgcagttatataattaaacagaacttcctcctgagttgtgttttaacacctggtctcttcctgtcctgatcaacaggtatctcagatgaagacatcatcaacattactcttcctactggagtccccattcttctggaattggatgaaaacctgcgtgctgttgggcctcatcagttcctgggtgaccaagaggcgatccaagcagccattaagaaagtagaagatcaaggaaaagtgaaacaagctaaaaaatagtctttctcaactgttggctaagaagaaatgcaaaagaagtggcataggagtgtgttatgggtgctgaactctctctctttttccccrattttccagagctaggctgtggagtagagtttgtataggtaactaggtaacttattgtggcccagataaggctttaggatgcctcagtgcttatgtcatagccttatgagttagctttcttgctagccccctagtcggtcaccaaactagtaactagtggggcttaatgaaggtcataagtttctgagatgggagagcaacaagtagagatgaagttaaaggtatttatcattcaagaaatcattattgagtcaccattgacaggcactattctaatcagtagttcactttaatatttaataagattttctgggataacagtaagggatattagataatataccgtatgtatttattactagtcttttcctctaggaaaagggatactttgataattaaggccagaggcccattagttgagaaagtcacagatatatttctccaagaaagccaacaaccmccmccacaatgacagaaatgacaacaaggccctttaacttgtcttctagtttagagacatccttcatttgacatttagtagaattcctctttggccacaagaataagcagcaaataaacaactatggctgttgaggttctcattttggtttgttttaattttttgaactttgggtacctgtaattagtttaaaaataaagttcctgataataaagtgactgaaaatggcatccccaaagtgtctccgtgtgtttggtgaattttaggtaggcttctaaactagtctttgactcatactttcctgtaacactcaaagaaagaattgcacttatttcaacacaacagatactcatgattttctatatgttgaagcatgaagcagggaaggtagaatacagtgcatgtaacttcattcacataagcagagggaatggtatattggggcttgtgacataaatttgttcattaactaactgatggcaaaagattatggtatgtagcacggagcagtcagggtaggccatggacacgattgcatatctgtcttaatgatactcttttgcactatgttttagatgctgtgggtacgtaagtcatcatttctttaagccgttgactctgtttcaaagcaggtcacatatatttcgatgataaagtcatgtaaaacatttgtagctataatacctgttatagatattttccatttttttcatggtttttcattggattagtttatttttatccactttatagtacaattggcatttgaagaatactaactttaaagtatttttgctactgctttgtctccatttgattattaacgcaagacttttaacgattagccaaagaagatggttgaaaagaagaacctgctctgcctgcagctggccacatctgtgatgcataaggacatggaatgtggatgctttacatttattaattacctactattggtttctctagtgtagccccttcgttttagtggtgttgattaaccaagtaatactctagaattcaaatatcagggtcaagaatgcaactaccagatgatgttcgtagaattccaaacctatggctaggctgccatagtgatattcacaccatttttgaatatcatcatctctggaactggcctctgagttttccagcccaaggggtgaccatgtcttaatgtacttcaagatcctagagttggattcttccattgtcctgcatcaaggtatcttcttccagggaaccttctggcagcatgatgtgcttctgcacacaaagcaactgtcatatccagtcactttagaatctcacaggcttcccaagaaaaggatgatttttgctaatacagtactctgtgatacaatttggtcttactgtttttgagatcttggctgaaaaaatatgaacagaagagccttttttttttttttttgagacggagtctcacacttttgcttaggctggagtgcagtggcacgacctcggctcactgcaagctccacctcccgggttcatgccattctcctgcctcagcctcccgagtagctgagactacaggtgcccgccaccacacctggctaattttttgtatttttagtagagatggggtttcaccatgttagccaggatggtctcaatctcccaacctcgtgatccacccccctcggcctcccaaagtgctgggattacaggcgtgagccaccgtgcccggccaagacatttttttaaatgtcacttaaaattagttaacaactccagcacttcaaccttaggatcacctagtgaacctgttttctttgcattgttaacagtttatccagaatttctgatgcaggaatcttgaaggctgcttattctctatcccagtcttggcatccttctattctgaggctgggacagaaattagggatttattttctcctataaaaaaaaaagagggaatgacaatgaccagcccagccatggtggcccctgcctgtaatcccagcactctgggaggctgaggcaggaggattgctcgagctgagaaattcgagagcagcctaggcaacatagcaagactttgtctctactgaagaaaaaaaagacagcctatctaggaattaggtccttggaggaggcagcctatcctgctgccagtttacgctttccctggagccagctatgcatgtctcctctgcccaggctgagatgattgtcccatgtgggtcagtgtggcaagataaaggcaatagcaacatcagctgctcccagagttttaacttttaaaaagcctctcaaactagtaccgtatcccagtacactgagaatggtttttctaaaagagcagtactgcatcagaagagaagattttgcattgtgtagtaccaatatgggcatcaaattaacgaaatatccttggttagaatacattatggctaatgtatttttccttgataaggtgtgcaaggaagatgaatgtgatgatctatttccaagctcaaccagactcttttgctcaacatttgtaagttatttctcatcccaggttgtgaccacgtttattaacatgcagttcccaacgtgcacattaataacagttgttatttgtctcctggcctggaatttcgacttgtatgtaatctatattatctctggttactatttagaagcctgttagcttgctgtgtgtgacttctgcaagatgatgtgggataatttggtaactctgatgttcaagtgcataaagatgaaaatgttgctgagactatttttactacgtaattctgaaacaattatgtagcgttaaaaatgagtataaatgtattgatgttattgtaagtgaggttactcaccatgggagaagaaagatacggaatggaggaaggtaaggaaggaccatgtggtatattggttctggatgagaggtgtttgtgtaagagtgtgtgtgtgtgtgtgtgtgtgtgtgtgtgtgtgtgtgtgtgtgtgtgtattttccactctctttcccccaagcccctccctactaactctggctctgtcttctgaaagggcctagaaacaataacccagaaacaacaaacacactgaattccttcaatcttggttcataaacactattccacagaagcaggcatgtttggggaaatgcctgcttccaggtttgaggcagatgaagcataaggtgaactttgagcacttttctgactcatcaagatgttacaagactgatgggacacagacatttgcttgaaggaccaaatttggggcaatttaaagtaagaaaaagaatgatggtaatgaattatagaacattgaattcaaaaaatagtgcctaagaccataaaggtatttttttaaaggtggggagagaaaaaggagacataaatatatactgtttctttacagaagattgccagcttccattggtaataatggatgcaagcaaggactattaatggatgctaaaaccactgggcttttagagaactgaacattcgcatagtcttataataaacttattaattacaaagaaaaaatgtatcttcacaatggagagatcccttagacactactgcaaccgagtgattaaccttaaaatctccaatggatgggtcaaatagatagtatgtgattttatgcatgtccttgttattataaatcagtgggaggtacctatcacttagtcttcttcccaaaaactttttatctaaatctaataatgagaaagcaatatgacacattcaaaatacaggataccctaaaagacaactggtttggacttttaaaaaatatcaaggccaaaaaataaacacaaaaatatgaagggacagttccagattaaatgacactatagggacatgatagtgaaatgtaattcgtgaactttaattggatctttagcttgtaaaaatttacaaagaatattttggggcacttgggaaaattaaaatatgtgtctatgtaggctgggtgcggtggctcacgcctgtaatcccaacactttgggaggccaaggcaggcggatcacttgaggttaggagttcaagaccagcctggccaacatggtgaaaccctgtctctactaagtatatgaaaattaaccaggcaaggtgacagtcacctgtaatcccagctacttgggaggctgaggcaggagaatcgcttgaacccgggaggtggacgttgcagtgagctgagatcatgccactgcactccagcctgggcgacagagggagactccatcaccgccccccccaccgccgccaccctgccaaaaaaaaaaaaaatctgtctctgtattaggtgataataaatattaaatttattgggtatagcaatggtatggtgccttgttcttaggagacagctgctgaagaatttaagggtaaggcatcctgttatcagtaagtcatttgtaaatggctcagccaacacaatgtttctatatttttagagacagaaagcaaacaccggtcattggtcacttaatgatgcgacttgttctgagaaatggattcttagatggttttgtcatcgtgtgaacatcatagagtatactacacaaacataaaaaatatggtttagcctattgcttctacgctaaagacttgtgcagcatgttactgtactgaatacggcaggcaattgtaatacaatggtaagtatttgtgtgtccaaacatatctaaacatagaaaaggtacagtaaaaatacattataaaagattaaaaagtggcacatttgcgtagggcacttaccatgcatagaacttgtgagaatggaagttgctctgggtgagtcagtgagcgagtagtgagtgagtgtgaaggcttaggacattactgtacactacagtagacttcataaacactataccctttgtctacactaaatttatttaaaaaattttcttcaataataaattaaccttagcttactgtaacttttaaaaagtttttaatatttcaaaaccttttgacttttgtaataacacattaaaacagaaaccttatttaaccatatgaaaatattttctttatgtcattataagtttctttctttcttttttttttttttttttttgagacggagtttcgctgtttctcccaggctggaagtgcagtagtgcgatcttggctcactgcagcctctacctcctgggttcaagtgaccctcctgcctcagctcccgagtaactggaattacaggcgcaccacaccatgcctggctaatcttttgtatttttagtagagacggggtttcaccatgttgcccaggctggtctcgaactcatggactcaagtgatccgcccgccttggcctcccaaagtgctgggattacaggtgtgagctaccacgcccagctataagcttcttcctataaaattttttattttttaccttttaaactttcttgttaaaagctaagacacaaataccacattagcccaggcctacacaggatcaggatcatcagtgtcactgtcttccgcctccacatcttgtcccactggagggtcttcaggggcactaacatgcatggagctgtcatctcccatgttaacaatgccttcttctagaatactacctgaaggatttgcctgaggctgtcttacagttaactaatatttttaataaatagaaggagtatattctaaaacgataagaaaaagtatagtatagtaaatacaaaaaacactatcatttattatcattttcaggtattacatactgtacatccttgtatgtgctatacttttgtatgactggcagtgcagtaggtttgtttacaccagcatcaccacaaacacatgagtaatggctcatgctaggaccttaggatggctataagtcactgcacaacaggaatttttcagccccattataatcttacatcgtatatgcagtccgctgttgaccaaaacagcacatgactgaggcacatgactgtacagtaaatgtcatagctgatgaattgaggaaatgatttgtaatgttgtattattctactatcatctcagcatttctgtaggtttgaaatttttttaaaaaactagaaaaaataaagtgacagaggaaaaaattggtaagtttaacaatgttgtgtttagtatagtcattaaaacatgtcttattcagagtgaggtgcctggtttttttgactttttattcttgaaacctcagtctttgttaagtaagagaaagataagagaaagccttcttcttttcttcttttttttttctgtcttttgagacagggtct

SEQ ID NO: 94791 - DNA, 34684 bp, Homo sapiens
acagactgggtggtttcgacaccagaaattaattttctcacagttctggagcctgaaagtctgagatcaaggtgcaatcgtgttggtttctggtgaggcttctcttccgggcttgcagatagctgccttctcactgtgtcctcacatggccttgtacagggaggcaacagagagagagagagacagagagagagagagagagagagagagagagagagagagagattcccagcacaagctctctggtgtcctattggattagagccctacccttagaacctcatttaatcttaattatctccctaagggcactatctccaaatacagccacattggaggttaggacttgaacatatgaatatggcaggagaggggggagcggggagggacacgattcagtcaataacatacattaatcccaagtggaggcttattttaattaagttttgtgtatggcccaagttttctactctgcataactgtttaatcaaaatccaaactgagagatgggtctctgtagcctgtagatgagaaacaaaaagcagtgatccttaaaatgagatccctacaggcacacgggtgccttctggaaatgcagaagccattacctgcaagtcagtttcaaatgttaaaccatacagtatcgattctggctttcccaggtgacttgcaagagtgagaacgtctttcagagcccaagtgcagtgaaggctgccaggcccgtgcctctgatacagatctaggagtctgagtagctgcagggcctggatgggaaaggctcacttaagtctgggaaatgcagcaggtgagttgagagccacgtgagactatgcagccagaaggatagaggggggaaggccctgaaacaaagagatggaaatggaatagtgagaggctggggtcagaggattgaggccagtcttaaaactaatttcaggaacactgagttctcctcttctatgtggcttggcaggcgtgctgcatttggggcctgattttaagtatccagagctggctttataccattataaaatttttggctgggaaaaaaaaaaagagtttcataaaatttcaggcattatgctctcccatggtacttcctggtgaaatgtccaacctgtgatctcatctaggcgtaatactaactctactttgactaacaatctctttcattattaagggtgaatttttaattcggaattttattcttcatgtataaattatgttatcacctagttggctttgtaacataatgaatggatagtagctgtagttatcattctttgcaatctttctttgttattattcatttactttatagaacattatgtcctgaaagaagaagccttctctgaccccagkcctccatattggatcaatgcccctagttatgatccctcctagcagcctgtacttctcctttatagttcttcccaccattggaattaaatagtgatggcatgattaattgtttaatgtctgtcttcctygccagattattttcccaacgaaaacaggcaccaggtctatcttaatcatagctgtatygacactggttcttgcttatagcaataaattccttttaagtgagttatttcattcactcattgattcatttgttaactcatttatttagcattcacaagccctaggaactgtgctacaaacagggaaacaaaaaccaatgtgatcatttctggattcaaagagttggcaattaaaaacagaaagtttttaaccattttattttattttttatgtttttttaaaaaagatgaggtctcaccatgttgcccaggctggtctcaaatgcctgggctcaagtgatcctgccgcctccatctcccaaaatgctgggattacaggcgtgagccactacacctggcacttaaccattttaggtgaaagttccccttgagaacccagtgaaggaagtggaccctctttcaagaagctactcatctaaaaagcacatgagattttgtattcagcttggtaggttcacagatccttgagaatctattcactgtcttcctaaaattatgtggattctgacatcacagtaactccatgaaatacagacttgaagacacatacaaggtaagaggacgggtaaagaaggacatcagcatgtcctcctttgggtcaggagaagcttccattgcaagagatgtttgagccacattttgaatgataaatcagatgttaccagggaaagcagtgggagcattcgaggttgagaagacagtgtttggagaagcatggatgtgtagaagttggaatggtatttagggagtagaatcagcaggactttgtgactgattggatgtgggatgttgagagagggaaggaataaactccatgcttctgccttaggcaactgagtgccaggtttaggtctcggtgggcagcctcagaggcataaacgccaattcaacaaaataacaagctcatgggccacattttttgttcccaatcaaaatgaaataagcttttgtaagtgataaaaagtacattccttacaatttagattacccagcagattggatacaagaatgccaatgaggaaatcaacatgctttttaatcataaaagttatatctgtgcagccacactaaggcagctttctaatctttcttcttgaaagaagagcatggtctgtatggagaagttacgctggccacatgcaatttgggtcgtgcagattatcatcactgcctgaagaatcctgggagactgcttgctggcaggaagggttatgcttcaattatggatctgataagctggatgtgcttagtatggtgcatttgtaaagaggattctcaatgaatattcaatcataattcataaatttcttataaataaattttcctgcatatttggaatcttgggcattataaatcttgacgtatgaaaaaaatattcatgaaaggtacaacccccttataattagttgcagattcaaatttcgtataacagggcagtaggctttaaattacatctttttcaataacagttccattgggatataatttgcatacgatacaattcacacgcttaaagtgtacaatgctttcaatgagtttttatttactttaaaaagtttatgttttctaactgttagcaattaaatggtattccttttgtaatcagaaaagtaatactaggtatgcatatttaaaaatttgtataacagtccttatacataaggaattttctccttccattgtgggagccaagagaaaatatatcctatgtggatttaagttaaagtataacatatggttaaaatattaccacaaaagtggcatgtttagtgagaaggaaagactaaaggtgggtcattctaatggcttccttcaatgtcctgctgggtaggggagacccagtttaatttacagatcctcacttcactatcaggggcttacagagaaacttcccctgctgtaaccttctcagctaatgggtgatgtgctgtgatagatgtattctcacccgggatagtggtgatattgtattaagagggraaaaaaataaataataaccttgaggtttaacctgaggtatgtgttgaataaaaagcccagcttatccatttacagtatatatacagtgagaaaagttggaaggttttcagaattctgaatgtcacctcatatcatgtgttagtgatcttcatgatagatggcatagatctaaaaaccatttttttttgctaaaataacaatgtgtagaaaaaaaaataatcattttcctagcaaatggagagaactgttcaaaagataaacctctctggtttgacctaaggtgcaggaatacagttggcatttaggctgacccttatattggtaatttatgtaaaacagttttttctttccaagattgcatagtgtatagtaggaaagtgaatagacaaatttgatctgacccatttttacatcactgggaaactgtttgtttgttttttagaacactgttattttgagacagggtcctgctgtgtcatgcaggctggactgcagtggtgcaatcatggctcactgcagccttgacctcctggacttacatgatcctcccaactcagcctcccgagtagctgggaccacaggtaggccaccatgtccagctaatttttttttgtattttctgtagagatgggggtcgggggggtgggggtcttgctgtgtttcccgggttggttttgaacttctagactcaagcaatcctcctgtctcagcctcccaaagtgctgggattacaggcatgagccaccacgcctggcctgctaatagttcttaaatgcagctcttatcttattacttctgcagttaaaggcctgtttaatgcttggcacctgactttaaagctgactataatatagcaccatcccaaatttcctcaggcttgtttcctcattgtttcaaacatatattgtttcaaagacacaatttttatgtgtgactgtttgcttatattgtttaacttcctattgtatttgcttttaataaagtctaatagatgctatgaaaacagccttacaatctctttttcttttcatgaagctcactgtctactacaatgcttagtgtgccatttaggaggacctatgaggagggagttttgctcaggcttctctgctgcataaccaggaggctgatttcttacagaaattaccacttgtaattatatttcctttgttgctttcgctggcaggaaactctaagtttatgaatctcttctttaatactaaatagattcttatagcatgactttattcgtattttttccactgacctaatttattgttctggccttgtgggagaaggggcagtggtcctctttgccttttaaattcaaatactcatgtatttttgcaaaccatttcaaatctttttttggatctaaatggaataggaataacaaatttaaattaatgctcaacttgcttatttatagactttttgctcttgttttccttttttcaaacctcatccagccctcaaatccagcttttccatgcaccccttcattcttcactgatctccattttctcggagctcttgtgttaatataattttgcattttactaagtatgattttggatacctcctagtgtttcatgtgtattagtcctgtagttctgggttgtagtttttttagtggtagggaccatggctcatacttttctgaatctagtaaaataatattgtatcagaaatgctttctgtttacactataattgtaacaaacattgaattttttagcttattaactctcagagcacccagtacatcttatttagaattgcaggaacccatttttgtttctctacagcagccgaagcttgtttcatagatcttgcaagactattcaatcattcagttaaaattccttgacctcctgctggatgatgttcgacagggcattcatcttcacgacacccttcgcgatgaatggtaacatctgggcgggtagaggtccatttctacagcaacctgggggaggaacaggtagggtaggttttggtgtgggtgcgattcttggggacttcttcaacaggtaggacatcaagtctgtagccaaaacaacacctgggcgaagggcaaataccggagccccgaccggctcacgcccagtaatgctttctctgggttctaactacgtgatcaggtcgtctcggtttgccagggaaagcccagcgtcttgacaaccctgtcagttccgaacaaaccgggtcgattggtcaccggggctcgaatcccgactgatatgacccagcggggacagaggatccccctcagtgccacaagtacattccccaccgagcagcgcgcctgcgccagttgctctcatgcgtcaagactacaggtcccagcaagcatcgaggccctctccaggccattcttccgccggcggggagctctcgtcggcgtatttgttaggtgtggcgcggaagagtccgtgcgtgatgacgtcgacgcggcgacgtcgagctcttcctccttttcacggcgtcttgcattactattgtgcggctgcaggaggtgtcgagcggcgttatttttttttgcggtttgcctttttttttcttttttttttttttggaaccgcggttgtttaaaagcctgagggaacctggagrggggctcccactcyctaccytctttcctccgagtttgtgactccgagatggacaaagtgtgtgctgtttttggaggctcccgaggcattggcagagctgtggcccagttaatggcccggaaaggctaccgactggcggtcattgccagaaacctggaaggggccaaagccgccgccggtgacctcggcggtaggtaccaaactggagttgtccagttgtatggccgcggtccaggcgcctaaagaaaatctcctttgtaaaaagagcgggtctggcctttagggctctagggttactcgatgtagccgcgtgcaggcgctctycygttccaagggtagaatgcgtctcgtgcagaaacccgcgatctccctatgcctcgcagaatgccggccacgcagcttgccgccgagggctgaacacttggggtgttctttgagacctcgtagtcttttgaggccccgctatacgcaccctccgccctgcggctagtgctaacgctgaggagcttccctgttgtgggagagagccacgtaacagtttacttttaatgtagggaaaagggcgagttctcggcccccggagacagggctgggtcgaaaggagttcaggcaggaaaggtgggagtgcaggtaccaacggctcccttcagttttgcccaagggccgtgccttggccctgcgcgaatgcacaaagcagtgtttgatagagaaacccttttgagtaccagccagttttgagatatacctggtttgctttaatgttattaaattgttttggtgagttttgcaaatggacaattgaactttgttctgccaaattcttttttattgcatttaaacttcagggttttttatttccggcttattatgaatggattagtcattttgtgaatataactcttcattgagtttagggagaaataggacgttagatccgaagatgctatttgtttaatcaccagaatggacaaaattatacttcatttactatcagggaggcatggggagaatagaggcctaggggtgcgtcttgtggctcttactgtttttgtgtatctggttttttttttttttttttgagagggcttcccattatgttgcccgtgctggaccccaactcctgatttactggctctagagatcttctcgcctcagtctcccaaggacctgggactatagacgccaggtgtggctgttcatttttaagttaacattattgatcggtttggtatcacctgttcagtgctggttgggagactattgggctctctaaaagaaaaaagattctgtaagttataggtcagggagagtgtcagtgaatgcttcttgaagctcatattccttaccattctaacaaaggaggggaagagtggtgacccttactgtgtcaccccaagccatcagtgtttgctggactggattgaagccattagttgggctttcaaaggtggttgtggacacaagtcttcgggtgaaaaccaagagtaagagagacacaggatgcttttgggccctgcattcctttgaatcgtgttccatgagtgattggttttcatctagaaagtataattccccgggtcgcttactgtttccaaaggcttgatggggtagtgttggtgtaagcatatttatcaaggtcagacagaaaataaagaattgttttagcttttaaaaacaatcctacattttagagtattaaaatggtagattacatagggaatgctttgttttcctttgaagtgtagtttttttttggcatttaaccattttttaaaagtggtaagtaacagttgcttttagtaaaaagtgtttttttccccccgtggtttgtagttttagcatttttatagcttcctgtgttgtctcatctctcctgatggtcaggtttgaataatagtcgttataatataygtgccatagtgcatccgtagcacttaaaaagaagaaacccaagagttcccgttcagggccaaagaaactaattcaacaaaaacctgacagaattagacataaatttcaaaaaaggaatataaaacccagaagactgtcgaattgggtagcatgaattcagtgttaaagctataaatattagatgaatcttacagagcctttataacttgaaaaagccctcccccctttgttgattaaaaagaaaattttaaaattaactttctgtagtagtactttatttcctctttgttcccgcatcccagtttcattagaccaactctatgaaagccaggcctcatgacattacttttttaatctttaggttctagattagcacaggcctgccatcttagatagatgcttaacaaatgtgtattgagtaaatttaaaatttgagttataagtaattcttatttaactttgttgtgtaggagatcatttggcatttagctgtgatgttgctaaagaacatgatgttcaaaatacatttgaagagmtggagaaacatttaggtcgagtaaatttcttggtaaatgcagctggtattaacaggttggtcacagatttaaataagtttcttatatatatatttaaaacttttattcctaatatgtctttgattggtataagttaatatgtttattttgcttctaactgggagaaaaaactattttaaaacttgtyaatccataaattattttcctttatattgagatacaacatataataaatgtccagttgagtcgattttaacattgtaatcatcacccatattgagccgtagaatgtttccagtgctccagaaggtagtgtcttctcaatacttccttgttggtaactgttttctgagttttgtcaccacagataagttttgccagtttgtgaacttaatactaatagaatcatggagtggatattattttttaaaagatgaatttaggagagaatatttagataacatattaattttcttgctaaacaaggcttagtatggcagttgctcaggccattcaaactattttggctatatgttactactttttaggggttaagaatatttgccactcaagctgagaaggggtagcaacctgtcttccaagtggatcctttctggtttatcaattgttattttaatgtttctcaagccaagttcaaaatgggactctaggtattctagctattctagctcagataggaagcacttcttgcactctcagtaaaaatgttacattagtcttgacctttttggtttttatcttgttattatatgctattatatgctgtttctttttgtagggatggtcttttagtaagaacaaaaactgaagatatggtatctcagcttcatactaacctcttgggttccatgctgacctgtaaagctgccatgaggactatgattcaacaacagggagggtctattgttaatgtaggtgagtcttcacctttgtgaatttatgattatcccataataccataccataaaaatatttaatccacgaatttgtgatttrttgtgaaacatgaatgaaatttatattatctgtggaaaaaaggatttaattaattgattaatgagtaaaatargaatcacacattcacatccctataggagtcaggcaggtgttaaatgagtgacaccactgagtactagaaaaatgacagtaccagccatgtgataaatgatatccagcttcattgtccagagcccatatggaatggtggaggccaccacttagattcagtagattgttgccgtgcaagaatgtggtcccagttttgccagcaattttgatttttcaagagaaattggatcattctgatttttatgtgaatttttttttttttaaatagagacgaggtcacactatgtggcctaggctggtctttaactcatgggctcaagtgatcctcccgaagtgctgggattatagaggtgagccacgtgcccagccaggaacctgatttttaaaacatggacaaggaattaaagtagacagtggtggctaaataatattgtctacagcagtttcatgggttactgttaaatcttgtgtagaggtttaaaggaagataaaatttctctgtttttaagaatggatgtaagtaacccctagttttcagttcatctaacccacagggcagataagctgtggagtatatgcctgtagaacttaaaatgcaaaatgacttgaaattttatttcagtttggtaatttggaaataatagtataccatctgctttttattttcaaatggtaataccttaaaaggccacagaagggagatgctgctccataaaagtaagtgaccctgttcttttaaatgtaggaaatggtttttcaagccagaatttagagtttttctgttttgaaagtgagaaaaggaaagaatactatgctaataaactaaggggacatgagagcattttggacatttactcttaaaaatttaagggatccgttttcttatgtaagagattagtcaatgagtcaacctttgccttttaacacagccagataaggactttggatacttayaagcaggcaaacaggcctgtatctgtcacctgataacctgaggtatatttgtttaactctaaaatcttcttttttttaggtgtatttaaaaaacccattagtcctccttatgcatgcaaaacttttagaattgagctaaaagtaaataatagatagtaaattgagaatcttactacaggaaggactactttaaactgccagacacttcattggtatttcagaaattaccactttttgacctgatgaacagtagtgcgtggcacgaatcaaagctgctaaagcagcttgtgtttttttttcwtttaaaagccactcatatttagcagttgggggttgtatactaactttagtgacactactgttaataggttctgataacccgctaccatcggaccagccctgttttggtatttttttcgtgcatgtatttttctttttttgtgtctctgtatttttctttctgataaacacccctctatccatatgcatttcttcagtctgatgtctgttctctctgtgtacttcacagttctcttcctttgttattaattggcctacaatatataatgtagataaatattctaatactgaacttgttgattctaatagagaaatgtttggaatgttttctttttttaaaattactttaaaaaaattttgtgaggtccttgattamtttttgtatcataagtacaggtcagtggtgcagaaaattacttccccacttctgttttgcaagagtttatttgcatatagttgatatttgaattaaaaattattattacatattcattagatgtggtcactcaagaatcttcagtaggcagtacagtttacaatatatcactgaatgtaatgaaattgcacttttacaaaaagtgtataattgaagctttgccaatttagattgacagtacaagcatgtctcgcagatattgtagctttggttctgctccaccggaataaagcgaatatgtcaagaatgtaagtcacacaaattgaattgctgcaatctcatgataaaacaaatgggtgaggagttgcttcttatgtatggataaacaaagttgtttctcaagatggaatctacttgtgaagatgtgaatactgttgaaatgacaaaggatttagaatatcctataaacttagttgataaagcaatagcagggattgagaggagaggctccaatttttaaagttctacttggataaaatgctatcaaagagcatcacatgctgcagagaaatctttcatgaaatgaagagtcaatcaatgtggcaaattttgtcttatccaattgtttagtttctcagtgcatgtaaaagttatattatggtctattaagtatgcagtagcattatatctaaaaaaaatgtaaatactttgttgctaaaaaaatactttattgctaaaaaatgctaatgatcatctgagcttctggcaagtcataatctttgctggcggagggtcttgccttgatgtttatggctgctgactgataatagtggctgtggcaatttctttattttttttatttttttattttattattgttatactttaagttttagggtaccgtgcacaatgtgcaggttagttacatatgtatacatgtgccatgctggtgtgctgcacccactaactcgtcatctagcgttaggtatatctcccaatgctatccctccccgcttcccccaccccacaacagtccccagagcgtgatgttccccttcctgtgtccatgtgttctcattgttcagttcccacctatgagtgagaacatgcggtgtttggttttttgtccttgcgatagtttactgagaatgatttccaatttcattcatgtccctacaaaggacatgaactcatcattttttatggctgcttagtattccatggtgtatatgtgccacattttcttaatccagtctgtcattgttgcacatttgatttggttccaagtcttagaataagacaaaatttgccacattgattgactcttcatttcgtgagagatttctctgcagcatgtgatgctgtttgatagcattttatgcaagtagatctttaaaaattggagccactcctctcaatccctgctattgctttatcaactaagtttataggatattctaaatcctttgtcatttctttcaacagtattcacatcttcacaaggaagagattccatcttgagaaacaactttgtttatccatacataagaagcaactcctcacccatttgttttatcataagattgcagcaattcagtcacatcttcaggctccacttgtaattctgctccactgaagtcttgaaccccacaaagtcatccatgagggttaaaataacttctttcaaacttctgttaatgttggtattttgacctgccatgaatcacaaatgttctgaatggcatatagaacggtgaatcctttccagaaggcttttaatttactttgcccagattcctaagaggaattactatttatgactgctatagacttataaaatgtttcttaaataagacttgaaagtcagaattatcccttgatccatgagctgaagaaaggatattgtgttaacaggcacgaaaacaacattaatctccttgtacatatccatcagagctctttggtgaccagatgcattgtcagtgagcagtaatattttgtttgtggcaccccaacagcagtaaacatcaagaatcactgatcacagatcattataacagatgtaataataatgaaaaaatttaagatggtatgaaaattaccaaaatgtgacaaagagacacagagtgagcactgctcacagtgagccatggtgttggaaaagtgctaatagaattgcttgttgcaaggttgctacaagccttcaatttgttaaaaaaaaaaaaaaaaaatgcaatatctgcaaagcacaataaagcagaacaataaaatgagttatgcatgtaattcaattttagtgagatttagcttcaaatgaactagtttttagggtgaaaacgagagctttctgccttatgtctgtgttgtagaatcataaaattagtcagcttttgtctgactttttctggctttaacctctacctgctggaagcctttataaataccacagamttttcatcatatctgacctactcagagattagagtgcatccccttcacgtagtgaatcaattcgcaagcacctgcattggcagttttrtatcagctgctttcagatgctattttctgtatgtatctgragcagacttggactcttaaatcttccgtaaatgactgatgacaatggttagaatttctaattttaacaaaggacaaggtgaagtgggttttacctttttgtttactataaattatctaaattttcaagtaaccccattaattgaatttaatacgctttttttttttttttttttttgtcctaggaagcattgttggcttaaaaggcaactctggccagtccgtttacagtgccagtaaaggaggattagttggattttcacgtgctcttgctaaagaggtagcaagaaagaaaattagagtgaatgtagttgcaccaggttagtgaaaactttattaaaataacttgattatgattattgttttatagggaagccattatttggaacattagtaattgacatctgggtagaatagtttgtaaaatgattgtgaaaagaatcaaataatgaactgggggactcaaaaaaattttttgtacctcatattctatataaagtctatgtgttagcctgtttgcattgctctaaaggactgtctgaggtaattcataaaaaaaagaggcttatttggcwctcgggcctgcaggctgtacaagcatgacaccaacatctgctcagcttctggtgaggcccaggaaactttttttcagtcatggcggaaggtaaagaggtagcagccaagtcatatggggatagcaggagcaagagagagaggaggtggcaggctctaaacaaccagctctggcatgaactaacagtgagaactcattatttaccatgtggagggcaccaagctattcatgaggaatccgcctccatgacccaaacacctcccgctaggcccacctccaacattgggaatcacatttcaacatgagatttggaggggacaracatccaaaccataagagtctttatttttaaattttgcactagtggaataacttaaggtggagagggtcttagaaataattttttccagtcatttttgtagattagaaaactgtacctgggattcagagtgacttgcctaagrttacacagctagtttatggaagaactgttactaaaagctttgtcttttgatttccacctratgggagcttaaaaataatgtcctaccaggtatggtagctcatgtgggaggctgaggcaggagtattgtgaggccaggagttccagatcagcctgagcaacatagcaagatgctgtctgtaccgaaaaaaaaaaaaaaaaattagctgggtgtggtggtgcacacctatagtcccagctatttgggaggctgaagcaggaggattgctggagtccaggagttggaggttgcagtgagctatgatcatgccattgtactccagcctaggtgacagagcgagaccctgttgagaccctgtctctataaaaattaaaaaaaaaattctttttagattttctttatatcattacacaaactttagatagttttgtccttttactactatggtctgtctaaactatctggaacctcccattttcctaatttttacttttccattatttgcctttcgccagggtactagttgataaaattgcctggattaatgaagagggtaataaaaaggtgctaaaactcaaaaatatatgatcactaattagctggtgtgctagaaattttgattaggtatttacttggtttttgagtaacacaagtgtttttatctacctctgccagttagccatggaatctttgtcctagcctactrtaggtacttaagaattaatcacctatataagaaaaggcagtttattttggtttgctggtygtttgtaagaaagagagggctgaagtagacctttgctacctttccctttccggtcactaatggctccagcttggaccttacagttggtgttttctttggcactgaagttgagccagcaggtatcagggatttatcaaaatatcctattaacccttttggtctatagtgtgtctttatttcaattcttttcttttcttttttttttttctcatagcaactagctacattcagacattctaaatctatgaatatttgataagtgactgtggttcagatacatctatttgctgggagtagggagagaaagaaaaagaaaaaacaatccagaagcagcattgttgttatcttagcactgttttctctttgtgtatgctttatgcaagctgattgatttttagcgttagcctagatgaactatctgtggaataaattatttgtggtttggaactacatgtatttgcttccttctcttttcaggattggaatactgtgggtaatgaagggttaattttagttcatgataatacaaaagctgaatggtttcggggaatggaagtgtacttagctaacaataactcatgcagcaaactttctggcatgtctcctacgtgtagggactgagctagctccccaaattacaggaatgaataagatatttctgcacaaggagctaagtatagtgaaaaagactgacatgtaaacaaataattgcagtgtcatatgacgaatataaaatagaggtacatatatggtgctatagaaatgttgaagaaggaaagaatgcttaattttgtctagtttagagtaaatagttgtcaaggcagtagactaaatagtgggaatccagtttgcatactaaggggaagttttaagattgttatggaagtgtggttgtagtctttctttcttaaagattttactttccagtgcagttttttttttttttttttgaaagtggtggttttatttatcactccccttttttgttgagcatacaacccttatagagcataatatatatttatatattatggatttccagtgcaatttatactacagataaaaacctgtagctgaaaatgtggccatttaatagagtggcctttatgtatatttagcagatttgatggtatgaatatgcatcatttgtcagaagcaaagtgcaacttgaaatagtagaattaaatcagttctgtggattacttaccaactttattttagatagtaatttcaaccagattcttcaacagatcttgtaacacagctaacaaacatcacagttaacaaatatgtgtccttttatgtcagttttcctggtcaccttcaaatggagtttccaattagcaggaaamcagtttaaaagcaaattataacaggaaaagcaaggaacaaggaaaataataaattaggctgcgattcattgcctaatactgttgactttttaaagatcaatagctgctaatctttggtattactttaaatataaaataaactgttcatgggaaatcatactgattggaagatattgaatattagaaataatatttgataaatggaaactgtaatggctgtattaccttaaaaaatatgtgttttgaatagataatacatatagtacgaaattcaaaagtacaaaaaggcataaagagtcttttctcctctggacattcagttacttaaaagtagttgctgttaactacaaagtttcttttgtatttcatatataagccaataaagcatgctgggcatgagtgtaagaaaacacaaattgtatcatgcaattcacagctttctgtatcttcctttattcatagaacaagataccttggtgatgtttctgtgttattccatatagagctgcttcacttttttaaataacagctttgtggaaatacaattcacataccatacaattcacccatttaaagtttacaattcagtcaattcagtggttttagtatagtcccagaattgttcaatcttcaccacagtaaattttagaacgttttcatcatccttaaagaaatcctaaacccattaacattcattccctatttctttccaatctccccagtacactaaactactttctgtatctacagatttgcatattctggacatttcatataaattgaatcatgtaatatttggtgttttgtgactgttatgtcacttttaatgactgaatgaaaacagaaaatgatgtttgttttaaaggtatacctaatttatttaacctgttgccttttgatggacatttagttttgttctgaactttttctgttacaactaatgatgcagtgacaatacttgtatggagtttattttgcacatttgcaagtatatgagtgtaatcttgggactggaactgcaaaggcttcagaggtatgtgcatttttaattttgacaaatagtattatgtttatttctacaggataccttaagtgtttcagtactttattttttaagttgaagagcttttatgtttactacttggagaaaatcttgttgacaaagatttgcatgagtttgttagctactcagagaagatattctaagtgttcttatgtgctgtttggaatgaagttgatttcccactctgcttccctctacaaatataatattaagacatagaaatttgttctrgttaaaatcttggtttagctttttggtaagagccttatttcttctcccttagaaaagtgttgggttgtttttgttctttttgagtcctagaaacttacatcaaagagtggacatcttatctggcagatacatcaaatagtgccccatctcacaattgttagtactagtgataggctaaaatcctgatgcctttttaaatataaaggctctgctgtatataaaaatgttgaaaactaaaataatgacctagggatatggaaatgaggtgtttctatttatagtttatagctagtcagaaatcgataaaggatataatctttttaaaaaaattgtttaaaaatttttttgagatggggtttcattctgttgcctaggttggagtatagtggtgcagtcttggctcactgcagcctagaccttctgggttcaagcgatcctcctgcctcagtagtagctgggattacaggcataagccaccacacctggcctatatctttagagtttatcaaatataaatcctcattgggcaggagccatgcatttacctttttgagcaagagtgtccctgttcctaaagagttcctataaaaattgaactgggtttttaatcacatatatggaactaaactagaagtatctttgctctaaattggtttaatgcttgtcatttcagttatcttttcgtcgagttaagaagtgataactttgtagccaattggaaacctctgactgtccaggtgatgcagtagcatcatttgttggacagtggcatctactggtagtctgtaaattttatagcctagtttgaaaggcattgttaatatatacctagcaaaargggagtagagcacaatttccagaattttataaatgaagtgaaagaatgatatgggggagagtcctttggggccaaggagagagakyacagaccggaaagtaatacaagtagtaagaagggtgtgtgagttgtttaaggactattaatctctctcttcaggtctgtgatacatgatatggaacctaagagaccatttatatgtcatgtcctgggttgtgaatatatttataaatgaagatcacgtggttcataacctttaatataaaatgacatggaagttccatacagcccagagtaatttatcattagagactagctttacatttttaatttaatttctgataaattttatttaatttctgataaagtggggacagatacatgagttttaaaaagctacagacagattattagggcagtaaaactattctgtctgctactgtaatggtggacacatgatattatgcatttgtccaaacctgtagaactgtacagtctgaagagtgaacccttagcttgtgaagacaaaatggtattaataaatgaataaataaatatataaaataaagagtgaaccctaatgtaaactatggactttacttaataatgtatcaatattggtttatcagttgtaataaatgtgccacactaaggtaagatgttagtaatgggaaatggaaaggggggggtgatgtgaaaagggggtgcatgggatctatctgaacgttgtgttcaatttttctgtaaacctaaaattcctcaaaaatgtaaagtttataaattttttaaaaagctacagaaaatgaagagaggctctttggacatgttcatgtcctccatagaaaataacataatcaaagaggaaaaaccagcattggtgaattcatcccttcctttcaacttggcctctctcacccactttacttttagtgcagagttcagtgatggctagcagctgtcccctgatatttgttattccaagtatccattcataggtctggggagagrttgtggcaagctttccctaaataaatcacacccttatcttctaagcttgagcagtggagggagacttttcattcgaggtgggtggctgaacatcatcattcctgttctggacttcttgtaatcatgttggattcagagggcaccactctctcttgtacagatctgacctaacatagacatagactatagcagagatgaatccaggctataacatttaacaagaccttattaaaagcttcaagatgttagcctttatctgttccatatctagcttacttggttgtttttgggggatcacatgtctgtcctccaaactggaaacgtctaactctccaggagatgcagtagcattatttgttggacagtggcacctactggtagtttgtaatgtttatagcctagtgtgaaaggcattgtaaatgtatacctagcaaaaaggggagtagagcaaaatttccagagttttacaaatgaaatgaaggatgatatgggggagagtcctttggggccaaggagagagagcacagactagaaagtaatacaagcagaaagaaggatgtcagcccatgtctgtgtggtagaggtcatctttccatctcactgggattgtccctgaaagtgtctcactgcttaggtctccttgcctgtctaaggcttggagaccttccagtatctcatgccttattctagatctgcttttttccccgaggtgaaaaaacctgttcaaatggtcactcacaacttttgtggccttactttttgtctccgaaaggacaaacatatcagaactaacatccacccagaagaagggctgatcagttcctttcaacacagcatggatgaaaacccaggttagcgttagtgcttcttgaattggaagtattctaacctctatgtacctaccaatgtaagaaytgagggcccttttaagggaacttacattcctaaagttcaagtcaagttgtcatgaagagtacttaatgaggcatacttttaatctttgaatcgtagtgttgtagggctaaaagaaacctcaggccaggctgcatggtggctcacgcctgtaatcccagtactttgggagaccaaggcaggctgatcacctaaggccagtaatttgagaccagcccaaccaacctggtgaaaccctgtctccactaaaaatacaaaattagcctggtgtggtgatgcatgcgtgtaatcctaactactcgggaggctrrggcagaagaattgtttgrrcccgggaggcggaggtttcagtgagcygagatcatgccattgyactccagcctgggtgacaggagccaaactccgtctcaaaaaaaaaaaaaaaaaaaaaaaaattagccaggcgtggtggtagscgcctgttgtcccagctgctggggaggctgaggcaggataattgcttgaacctgggaggcagaggttgcagtgagccgygattgtgccactgcactccagcttgggtgacagagccagactgtctcaaaagaaaaaaagcaaaaaagaaaaaacagaaaagaaacctcagagatctgtcattttccacctattacattcattttatgatacagaaatggtcattcagttgcagatagtacatgactgttgggatcaggcccccaaatctggccataaactggccccmaaactggccataaacaaaatccctgcagcaccgtgacctgtttgtgatggccatgacacccatgctgaagwttgtgggtttaccggaatgagggcaaggaacacctggcccacccagggtggaaaaccgcttaaaggcgttcctgaaccacagacaatagcatgagcgatctgtgccttaagggcttgctcctgctgctgataactagccagacccatccctttatttcggcccatccctttgtttcccgtaaggaatacttttagttaatctatcatctatagaaagaatgcttatcactggcttgctgtcagtaaatwtgtgggtgaatgtctgtttgaggctctcagctctgaaggccgtgagacccctgatttcccactccacactatatttctgtgtgtgtctttaattcctctagtgctgctgtgttaaggtctccgtgaccgagctggtcttagcacgtgacttttctcgggtgatagctttaatagtatcagcagagcagggaacagaatctagtttaatgtgtcctaatccagtggttttttttaaccacaaaatactgcctttgagaaaaggccaggccagcagagtcagaagttgagcctgggatttgcatagtcacaaggtctttcttgcaaaccatttctactgtagtttattgtgtttttctgtttttgttttttgggttaaaatgcatcgatttttatgctgacagtttgtgagagttactgggaagtattctatgctaattttgctagagtttgaaaagaacttaaaggataattgtgtctatctttgagaagataacatgaacttttacatgtttttgacaatttttattcattctgcttttattacaagtgtgagatgaggttttcttcctaggatactctctgaggcacttttgaaaatacttttgttggctgggcacagtggctcacgcctgtaatcctagcactttgggaggctgaggtgggtggatcacctgaggtcaggagttcaggaccatcctggccaacctggtgaaaccccgtctctactagtaatacaaaaattagctgggcatggtggcgtgtgcctgtagtcccagctactggggagcctgaggcaggagagtcgcttgaacccaggaggcggaggttgcggtgagcckagatcgcaccactgcattccagcctggtgacagagtgagactcttgtctcaaaaaaaaaaaaaaaaggaaaatacatgtgtctaaagacagaaaactttggacagcgagaacccccatgatattgttcttaagctgattggattgcctgttgattattgtggctcttcactgtaaattaagtttcatttatagtttgttggaaattctgcagaggctagtatcaatatctgtgttagctgcttctccttttattcttgcattccttctggccttctcattcttcttaaagatgagaggatatgaaggaaatattgctgacttttaaaataaatgtggtaagatkttatggcagagaagactgtatttcactgtgtaatttcacagtgaaacatacataatacaaaattagttttgttattccaggccttcattacagactatctgaaggtagtactgtgtgcattttttcaacaactttttatctgaatacaaaaataatatatatatctgttgtagacagtttggaaagagcagaaaaatataaagaaaataaaaatcattacctgtaattctagtatctaatgataatcactgttaatattttggtatatagtacttttttcagtcattagtataagttctttgttgtgtttttaatagtggtataacttaattcatttgtaacctacattttatacacaaatgttactttcagatttaagtatccttctatagcataatttttattttttatttttatcttattcatttatttgtataaatacaaatgaatgcaggtgcagatgcagtttggttatatgcatagatttcatagtgggaagtcagggcttttagggtatctgtcacctgaataacacccattgtacctattaggtaatttcttattcacctctgtcccaccctctcacccttctgaatctccattgtgatcacatccatgtgtacacattctttagctcccagttacaagtgagaacatatagcattatttttaatacctgcattattctgttgtatggctgtatcataacttatttaaccagtttcttattgaaagacattcagcttgtttcagttttttcctaatgaaagtgtcattcataagcttcatgatagacaaatctgtgaatatttttcacaagacttttaagaaaatgcgtagatatttataactgcaaacctaaagaaaggaaagttaagtaattacatagtattgcataataaaccaatggcctaatgttaattcttaattcattgtttacttcacatttattatggtactttaaaaggtaatatatttaggtttatctatagtttgagctataaatgatttagttttaacaggcaatttgaaaactgtatttttgagattgcacattaaatgtttacttcacacgtcatgttgaagttttagtccatctatttttcatgaccttaaaaatttttttctattcttttcatgaggattaatattgctttctttttaaaaacccaaatgattgagtaatatacaggatactgattatatgggctaagcattttattaatacgtatttgtatgtcctgtattaatcttgtaagattttcttcataagtctacagttctccctggtatgtatttgtagttatttaggattggttggttatatattatgtagttagttctttatactgtagaacctaatacattctttagaacattttcttggcaggctttactgaatttgaattttctatgtttacttgtatcagaattggatatgaccgtaagattttaaaatccagatatgggaaatactggcctttctaatcatcagctaccaaatcagttcatgtgaccacttttgtgatgccttccttcccttgacactactttctacttttctatccctacctaagtgaaaattaatgtattctatgatattttatatatacytctatcaggatattcaccagacttctttacgttataatcgggtgtgcaagtgaccatttcctccacaaatcataggttccccaaagagtggaattttgttttattcatgtttgtgtctacctacttatattttgctaggtgggccagatacttgggggtcagatattttagtgtccaataaatattcattgagttaaattgtataaaaatgtaggcttggtgtcttgattactaacaaaactattttgttttgttttgctttttttgagatggagtttcactcttgtcgctgaggctggagtgcagtgacacaatctcggctcactccaacctccacctcccaggttcaagcgattctcctgcctcagcctcctgagtagctgggattacaggcgtccaccaccacccccagctaattttttgtatttttagtagagacggggtttcaccatgttgggcaggctggtctcgaactcctgccctcaggtgatctgcccacctcggcctcccaaagtgctgggattacagtcatgagccactgcacctggccaacaaaactattttatataaacaaggtttattaataatttcaaattatagggtgggtatggtggctcatgcctgtaatcccagcactttgggaggctgaggtgggccgatcccttgagtccagaagtttgagatcagcctggcccaactctacaaaaagtacaaaaactagccaggtgtggtggtgcatgcctatagtcccagctacttgggaggctgaggcaagaggatcacctgtgccccagaggtccaggctgcagtgagtcgtgtttgcaccactgcattctagcttgggtgacagagtgagaccctgtctcaaaaaaaaawttttttttaaataatttcaaattaaaattttcagaaacaaatttattattttttttgaaattcagcagatgtcttagtgtgtacccttttcaactaaacaracatttctcttttaggatttgtacacacagatatgacgaaagacttgaaagaagaacatttaaagaaaaatattcctcttgggaggtttggagaaactattgaggtggcacatgcggttgtgtttcttttagaatcaccgtatattacagggcatgttctggtagtggatgggggattacaactcattttgtaatttgcagattattcagttataggggtgattagcatcaagggcacactttggctactgattagacaattatacctacatgggtaacatgtgctaatcaaacctgctgatgctacaaatgttaatttctgtctttataaaaatatgtctcaaaagaacaatgtgtgacaaattgtggtttttttttttttggtctaagttacatcagtgttgttttgtttaaaaagccttcatgagatacaattcacataccatataatcacacatttaaaatacacaattcagtggttttaacatatttaaatacatgtgcaatcatccccccagacaaattgtgttttctaaaggatgtgtatcacttacctttggttacctcatagactgtagcaatcttagtgtatagacattttgcaagtcatataaacaagtattgatttatatattttgtctcaaaagtggaaaaattatattgtctaattatgatgaattattttcttgtatcaagctgaattttctaaaagttaaccttgtgggctgttgccaaaataagagtatttagaggacactgattagttgtcaatactttagcaagcccactaaagataactatattccttttgcatgtgcttgggtgatcagtttttatacaggttgcaaaacatagtattcattaaagacatgaatttagaattgatttctttgagtggtatttctcttgattgagcagctagacaaaataatctgcaaatttaaatgtggcgcatttgactcattcttgagaaattctcataagtgaagaggattagcccttaaggttttaatacctggtacagtagtgaaccgcacagatttcatgaacttaggatgtgttttttattcatgaaaaacttagaatagtgaactattaatatttaaaaacgagaamtacaacatttaaaaaattaagagtattttgcattagtgattatgattcttatcccaaaattctagaaagtaataaattctgtatgaataagcataaaaaataaataaatatgcaataacattaaattaaatgtctttacaagaagcagtgaaggcactggtcttaagtgagaatatttgcctgggagtagagataaagacacaaaccgaatgtgaaataccaggtaataattattttgcattaaactctttttatcgggaatagtatgatattttcartgtcactccattcatgttgatttggagctgacagttattttgtgtaagcagagatttaattttatattgaaagtcagtgcaaaattatgaataggatatactaataaatacaaagtaataacaaaagtcaaagcagtgttytaaataaaaattctgggttccttaaaaattattttaaatttatctttgaaatagttttcttagattaatctcaggatatgagaaagtcaattaagtgtgagtaaagttagtatcattaaacaaattgtctattaaatgcaagacgtggtaatatacagaatttatcaggcattaccaagtctaggcacatataggaaatgcagcactcagaatggtttcaatgtagtagttgatgcttgtaaggtaggggagcttattcagacatagtagatagtttctctaatgctgtctcaattgctggcctttggctacctgtacttccccattatggcagcccattcagtcttgagttttcttctctggacaccttatgctctgaaatcatgagcgaggctgattcaattggtgatttgggtagaaagcagtatgttttgctgacattaagatgtaggttatagataggtttagcctttaagtgtatgtttttatactttaaaataagaaatataaccttttaagctattccacctcctcccccagcctatctcaaactggtggaatatatggagagatcttgaaagaggtaaaataaaccttcactgctccactccaggtgaatccgcccactcccactgacctagtagaatttgtaatttaatacttaccttctatttctgaaatcagttgtgaactgttgccttatgttcagaggtttaagaacctcagtgaattcattttttaaaatctgctattctgagaagcattgaatgaattcttaacaagaagactcatctgtagctgtttgctgactcctatgagcccataagggttctgtgcttagcattaacaaaataaggtttataggtaaagccaatgtattaatttttttttgcatggagggctttaaaatttgtgctctttttcatattttattcatattcaatttatggtttgtaactgctttttagggagataattatatgttataaattagttttggggggaataattgtgcaaagaggataatttaatttacgtgcttctgttattcagaataaagagagaagactacgctgcatattcaagagttgtaccttaacattggtgaaacattttttctaagattttcaaaaggaatatgtgtaaattgagaaatcataaccactgtcctaacttggtaaacaaactgttcttaaataaagtatttaatgattttaaactttctgatgttaattttatctttctctgcaactataagagtagagtttaaaaatttgtctttcaattcaattgtaaaacttttgagggaagagaccatactgtgttcattcatttagctaattaagtaactcaacagatactgagtgggtactaaatattttgtatttgttttgatacccacaccttgcctactcatctctgagtatattggatatatgcagtaaaatattctttagtcattacattgtgccatagttggggagatcattgagataaatctgttctgactctcagttcatatcttggaatatttcttgatcagattcctttggctttttatgcgactttgatgcttgctttcactttataactgaatttgcaaagtgaatcgactattttctcttaggcagtatgctttcagtttgagtaattgttaataccagcaatttaattagaaagctttggcctaataatccaaatggagatggtatcagtattacctgcagaatatttttaaaaataaatttgaaacatacatcaggagmccccctccctggaaatttgaataagtggtaggcagggtgagggaaatgtggagatacatttaagacacttatttatttatttaattaaattaatttattttgagatagggttttgctgtgttgcctcggctggagtgcagtggcatgatcacagctcactgccatctccaactcctgggctccaatgattttcctgccttagcctcccaagtggctgagacaacaggtattaaccctgcgtgactaattttttatatttttttgtagagacaaggtctcactgtgtcacccaggctggtcttgaactcctggcctcaagtggtcctcctgccttggcctctgaaagtgctggattacaggcgtgagccaccatgcccggccaggaaaaattcttaagtattcagattgttcattcattcacgaaatatttatttattcatactacatatgtaacactgctagtaataggaggtagaatggtgacaaaaaaacaacaaaaaaccgaactcgaagtttctggagctcacagagtaatacagtatggtggggtcaagcagacttaatcacacacatataaaattgcaaccaaaatatgcattataaaaatgagaagctcttattgctattaaataattaggggaatttgacctattctagaaggtcaggaatggcttctctgaggcaaggattgttgaactaaagttagagtacagttggccctcagtatctttggggattggttccaggatcctctgagaataccaaaatctgtggatgctcaagtcccttacataaaatggtgtagtatttgcatatagcttatgcatatcctcccatatactttacatcatctctagattacttacaatatctaatgcaatgaaaatagctgttatattgttttttatttgcattatttttaattgttcttatttttattgttccccccccggatattttcttttttttcctttccaactttattttagatttagggggtacatatgtaggtttgttatatgggtaaattacatgtcacaggggtttggtgtacagataattttgtcacccaggtcatcagcataatacctgataggtagtttttcaatcttctccatcctcccaccctccactttcaagtaggccccagtgtgtattgttcccttttttgtgtccatgtatactcagggtttagctcccacttattctaaatgaattaatgcaggaacagaaaaccaaatgccacatttttgcatgtggtattaggatacttaggataatggcctccagctccattcatgttgctgcaaaggtcatgatctcataatctaatttttttttgtagctgtgttgtattccattgtgcatatgtaccacattttctttatccagtccactattgatggggatctaggttggttccatgtctttgctgttgtgaacagtgccgcaatgagggcatgagtcttcatggtagaataatttatattcctttgggaatatatgcagtaatgggattgctgaatcaaatggtagttccattttaagttctttgagaaatctccagactgttttccacagtggctgaactaatttatattccaccagcagtgtataaacgttctcttttctccacaaccaccagcatctgttgttttttagcttttttaataatagccaatctgagtggcgtgagatggtatctcatgttggttttgatttgcatttccttagtgtttagtgatagtgagcattttttcgtatgcttgttggctgcacgtatgtcttcttttgagaaatgtctgttcacatccttgcccattttttaatgttgtcattttttgcttgttcatttgagttcctgatagattctggatgttagacctttgttggatgcatagtttgcaaatatattctcccattttgtaggttgtctgtttactctgttgatagtttcttttgctatgcagaaactctttaattatgttccacttgtcagtttttcttgcatttgcttttggaatcttcatcaagtttttacctgggcccatgtccagaatggtatttcttaggttttcttctagggtttttgtagctttaggttttacatttaagtctttaatgcgtcctgagttgatttttgtgtatggtgaaaggcaggggttcagtttcaattttctgcatatgtctagccagttatcccagcaccatttattgaataggaagtcctttccccattgcttgtttttgtcgactttgttgaagatttgatagttttaggtgtgcagctttatttctggattctctaacctattccattggtctgtgtgtctgtttttgtgccagtacaatgctgttttagttactgtagccttttagtatattttgaagttgagtagtgtgatgcctccagctttgttctttttgcttaggattgctgttgctatgactctttggctcttttttggttccaaatgaattttagaatggttttttgtaattatgttaaaaatgtcattggtagtgtgataggaatagcattgataggaatgctttgggcattgtggccattttaacaatattgattcttcctatccatgagcatagaatatttttttttcatttgtttgtgttgcttctgattttttcagcagtgtgttataattctcattgtagaattgctttacctctctggttagctgtattgctaagtattttatttgtgtggctattgtgaatggaattgccttctttatttggctttcagcttggatattatttgtatagataaatactactgatttttgtacattgattttgtatcctgaaactttccagaagatgtttatcagatctaggagcctttgggcatagacgatagggttttctagtatagcattacatcatctgtaaagagagatcattttacttcccctcttcctatttgaatgcactttatttctttctcttgcctgattgctctggctaggacttataatattatgttgaataggagtggtgagagtgggcatccttgtcttgttgcagttctcaaagggaatgcttccagcttttacctgttcagtatgatattggttatgggtttgtttagatggcttttattattttgaggtatgtacctttaatgcttagtttgttgagggtttttaagatgaagagatgttgaattttacctaaagccttttctctgtctcttgtgaagattatgtagtttttgtttttagttctgttcatgtgataatcacatttattgatttgcctatgttgaattaaccttgcatcccaggaataaagcatacttgatcatggtggattagctttttcatgtgctgctggatttgttttgccggtattttgttgaggatttttgcatctatgttcatcagagatactggcctaaagttttcttttttttcattatgtctgtgccaggttttggtgtcagaatgatgtttgcctcacagaatgagttaggaaggagtccctccttgactttttggaatagtttcagtagaattggtaccagttctttttacatctcgtagaattcagctgtgaatctttcttgtccagggctttttctagctggtaggatttttattactgatttactcactgtttgttatttgtctgttcggggtgtcaatttcatcctggttcaatcttgggagataatatgtttaagaatttatccatttcttctaggttttctagtttatgtgcatagaggtgtttgtaatggtctctgaggattaaaaaaaatttctatggggttggtggtaatgtcccctttgtcatttctgattgtgtttctttggatcttgtccctttttaaaaaaattagtatagctagcagtctatcaatcttatttattcttttaaagaaccaacttttggttttgttaatcttttgtatggtttttctcatctatttcattcagttcagctctgattttggttctgttcttccgctagctttggagttggtttgttcttgtttttcaggttccctaggtgtgatgttaggttgttaatttgagatctttctaactttttgatgtatgtgggcatttagtgctgtgaactttgcttttgacactactttagctgtgtcccagagattttcatatgttgcatctttgttttaattagtttcagataatttcttgatttctgcctgaatttcattgtttacccaaaagtcattcaggagtagattgtttaatgtccatttaattgtatgttttgagagatcttgtcagtattgatttctgtttttactgtgctgtggtatgagagtgaggttggtatgattttggttttttgaatttgttgagaattgctttatggcccagtgtgtagtcagttttagagtatgttccttgtgcagatgagaagaacgtatattctgttgtttttgagtggagtgttctgtagatgtttgttaggttcatttggtcaagtaccaagtttagatcctgaatatctttgttagtattctgcctcagtgatctgcccagtactttcagtgggatgttgaagtctcctactattagtttgtggttatctacatctctttgtaagtctctatgaacttgttttatgaatctgggtgctccaatgttgactgcatatatatatatttaggatagttaagtcttgttgaattgaacctttttatcattatgtgatgcccttctttgtcctttttgatcattgttggtttaaagttggttttgtctggaataagaatagcaacccctgctcctttttgttttccatttgcttgatagatttcttccatcccttaactttgagcatgtgagtgtccttctatgtgagatggtctcttgaagacagcatacagttgggtcttgcttctttatcccgttttccatgctgtgctttttaagaggtgcatttaacctgtttacattcaagattaatattgttatgtgtggaatttatcctgtcatcatgttattagctgattgttatgtagacttgattgtattattatatttgctttatagtgttaatagagtgtgtacttgagtgtgtttttgtggtgatcagtaatggtctttcattttcatatttagtactgtcttatggacctcttgtaaggcagacctggtggtaacaaatgcccttagcatttgcttgtctgaaaaggatttaatttttccttcacttatgaagcttagtttggctgcatatgaaattcttggttggaatttcttttctttaaggatgctgaatataagccccaaatctcttctggcttgtagtgtttctgctgaaagttctgttgttagcctgatggagtttcctttgtatatgacctacccttctctttcagggatgctaatgagtcatagatttggcatctttacataattccatatttcttggaggttttgttcatttaaaa

SEQ ID NO: 94792 - DNA, 97673 bp, Homo sapiens
tccaaagagagtactttattaggttggcgcaaaagtaattgcggttttgtcattattttcaatggcaaaaactgcatttacttttgcaccaacctagtagttcttctttgcagatctttgaaaatactgttttgttttgttttaagatggagtctcctctgtcgttcaggctggagtgcagtggtgcaatgtcagctcactgacacctcctcctcctcctgggttcaagcgattctactgcctcagcctcccgagtagctgggattacaggcatgtgccaccacgcctaactaattttctgtgtttttaatagagactgggtttcatcatgttggccaggctggtcttgaactcctgacctcaagtgatctgcccgcctcagcctcccaaagtgctgggattacaggcatgagccaccgtgcctggccgaaaataatgttttcaacaatttgatgacgttgatgtgaggactgcttgtaggaaggtagatgtcatttgtaggtgtgttccaagctgaagttaaggtctctatggcttggcttcctcatcttcaaagtggggcaactatacctatctgattgggtgttgtcagggctataggtaggctatgataagcattaggttggtgcaaaaataattgcggttttttgtcattactttttttttttttgagacggagtttcgctcttgtcgcccaggctggagtgcaatggtgtgatttctgctcactgcaacctccgcctcctgggttcaagcgattctcctgcctcagcctccttagtagatgggattacaggcgcccaccaacacgcttggctaatttttgtatttttagtagggacggggattcgctatgttggctaggctggtcttgaactcctgacctcaggtgatccgcccgccttggcctcccaaaatattgggattataggcgtgagccaccacgcatggcctgtcattacttttaatggtaaaaactgcaattacttttgcaccaacctaataccatagtgctaaagacataagaggtactcaataaacagtagaaataatcatgatagtccttgttagggacagcactgatctgacaagttctcacagaaggcatgctcttcttgtagaggtcatgggactcagaagccctgttcctaaacattctctgggacttttctgaacagcctacctccaacatgtttcctctgcctctgctaactggagataggactttaggactttgctccagctttgttcctcggtttcagcttttttgtttcctctcactgaggtctgtgcatctttctatttgctcatgagctaaccatgcctgtctcaccccaaccctaatacccagctcttgatgactttggggaggacagtaatgttcattgtttttttctaattataagactaatatagggttggtgcggtgcctcatgcttgtaatctcagcaatttgggaggccgaggcaggcagatcgcttgagctcaggagttcaagaccagcctgggcaacatggtgaaacaccatctctacaaaaaattagccaggcgtggttgcgtgtcctgtagtcccagctacctggaaggctgaggtgggaggatcacctgagtctgggaggtcgaggctgctgtgatcacgtgactgcactccagtctgggcaacagagtgagaccctgtctcaaaaaaaaaaagaataatatatgctcatttttgaatatatatatatatatatatatatatatatatatatatatatttttttttttttttttttgagatggcatctcgctctgttgcccaggctggagtgcaatggcgtgatctcggctcactgcaacctccgcctccgaggttcaagcgattctcctgcctcagcctccagagtagctgggactacagattcctgccaacacgcccagctaatttttatatttttaaaatagacggggtttcactgtttggccaggatggtctcgatctcttgacctcatgatccacccacctcagcctcccaaagtgctgggattacaggcgtgagccaccgcgcccagccttgaatatttgttaaaggcagaaaaatttgttttaaagtaaaacaaaaatcttccataaccccacagtttaaagatttcacttttagcatcttgatatatttccttccaatgcttttttctgtgcatgtacatatgacataattgggctcatgtttttggaatcacattttgcagcctgcttttctaacactataatgctaacacgtgcccataacattagaatttcttcaaaaacatgactcttagtgagtgtacaatactatattatatggacttatttttatttgaactattcctactattgctgtaagttgtatcttttttgccttttataaataattctgcattaagcatctttgtacataattatttgtgtgcttctctatttcttttgggataaattaccaagtggaatccctaggtcaaagggtatgaatattctaaaggctgttagcatatactgacaaatatcctctatggaatttctaatgaagttaacacatgcatagattttttgaaatcattaccataatcaagatacataatgattcttggacggccacagtggctcacgcctataatcctagcactttgggaggccgaggaaggtgaatcacttgaggccagaagttccagaccagcctgggcaacacagtgaaaccctgtctctaccaaaaatatagaaagattagacaggagtggtggcatacacctgtggtcccagatacttgggaggctcaggtgggaggatcgcttgagcctgggagacagaggttgcagtgagctgagattgcaccactgcattccagcctggcaacagagtaagatcctgtctgaaaaaaaaaaaaaaaaaagctacataataattccattaccccaataaactctctcctgctatcccttcatagtcatccccttcataacccttatggaatatttagctctgtagtgtggaattaactgatcattcttagctaattgtcttgatagcattacaatgcccccaagttaaaataactcattcaagtattatcaagaagtttctgagtcaggttgtagcagctgccaggactggtctccaaagtgggtggatctgttaaggactcctctcagagtggtgcctgaaagagcctatttctgccattaagactgcaagacatgctgagattcaatcacaggactgtggggagaggagcaggaagaagccaggactaggctggagcagaattagtgggaatggaattagttatagagctgaccctcagggcagttagacagaagtctaaatttcaaagttcaaggacttgggatgagtaagtgtcaggtgtgacggacttagcacaaagtagcactgaaagctaaggatttgatgtgggtaatacaatgaagatatcctaggcaaaggcagtatcttggttcaatgggacaggggaggattaggaggagaagaaggtgaggaagggagacagaagatattgggagtctaaaggaatggcctaggctcttggacaagagttcacaaggactcagctagacatcagaactctttaaaatgagcaggtgaacaggtgaacctctcattctggagagagaattaggtgaccaattaggaaccaaggggtggctcagtggccaagaatacagtggggtttaggtgctttccaatgtgaacagtgactctaaggtagtggtttgtaaactttagcgtgggtcagaatgcctcccaaaccaggaggttttgattcagtaggtctggagtgggaagccagaatttctgattcagtaggtctggggtggggatccagaatttctgacaagtgaccagggctgctgctgcacttcttggagaagtacactttgagaaccactgctctaaggcaaaaatacatatattgagattagaataaccatgtcatttgcacgtcacccagtacacgtaggaaaagggctcctaaatgtaacacagggcttggctcttccaggtgatgagctggtagagttaaacctgctgctggaagtgttttgtgcttccaggagggcaaatagggtaggaagcatcactggaattctcacaacactggagttctgtcctgtataggtcataatactcttaagtgatgttattctgacttaaagggccagcatctaaaactgtcaaactgtaattctctgctacagaatccattttcttcttcttttaggactagccctctttgcttattgaggagtaataaaaataatgtccccttatattagcatagcacgttctaattcaaaaagtgcaatgacatgatatctcatttgatctcctttctgtgatggaggcaagcccggtatttttatcccatcctttgggctactgattctcaaagtatagttcccagacctgcagcattaacaacacccagaaactctctagaaaagcaaattctgaccccaccccagacttactgaatcaggtccggggtctggcagggggccaataattcgcatttctaacaagttccctggtgatgctgatgttggtgctgctggtcccagaccacacttgaatgaaaaccactactgtagataaaaatgaaagatgtagaagcccagggacttgtcctaagaggactcctgcctagatccttttcttactacacctgctgcatccctggtccctacgcgcccgcccccaccacctcgcccttcgcaaaaaaaaaaaaaaaaaaaaaaaaaaaaaattccttcaaatcccagctgcattattttagaattttgtgaatgtgaatacctgtaaaatgaggataacaataggatctacctctttgggttctcacaaagattaaacaagaactaggtaaagtacttagcaccgtgcttgtgcttaataaatgccagggatcatcatgattttttattaatattaaaagtgacaattcacaatgaataccttggtaagttctttggatgtgtgtcttcagaatgctcctcttaaaatgtgaatgtccctagataatgtagacattaaagcacctgatcgttaacattccatctctgattgccatgagcatttggctgagagcagggtacttcggaaatgggacccacgactggtaaagtaggaaccaagagaaaatagagcagtgcatggaacagtgtattgaaaggcacacaacagcaagacttcttgaggaaactttgaatagctggggaaggggaagagtggctgacagaggaagcaactgcgaaagggcagccaggagtaggaggcaggctgttaaagacaatctacctccttcaaagttccccctagggcagccccaggggagggctccagggctacaccaggccacgaggggatctgccagggttcacgttgcatgaagtccaggggtcgaacactcaggtgcccatagtgaatgcccggaggggccctccactggcaattagcacaatgaatttgggctcaaaagtggctttgtcttcagggtgactcctatttggcaaatatcctgactacagcacatcatgcactagctcatcccagggacatggtcctttattagtggaggtctgctatgttgtttctcaaggcgtcctaggcccctcaggaagcggttttatgttatctgggtggcgcagcccgggtcccgtgcccagagaggacggagacctttgcaactgaattaaacagaagaaacaaaagcagcaagttcgggcccgtgggtacggagggctagccaatggggcccggccgcttcccggcggagtggtactatgatgacagtagccaaccagcgcgctctatgcaaatgagatactgtatcccgcaccagccgcttcagtgtcgtctggttgttatagtgataaactgaggccttgcctcttggcttctgggagagagagagagagagaggggcggggggtaacctctttacttcccctagggaagacagaaagaaggggagaagaagcggggggatgggtggagggtagaggggagaaaaatacgtgacaaagaaaacattctctgcytgggaggagactctctgagggtgtagagctagagggagcattcactggccatgccagtagttaccactgatgctgagtcagaaacaggtatcccaaaatccctttccaatgagcctccctcagaaaccatggaggaaatagagcacacatgcccacagcctcgactggtaagtaaagacaaaggatggaaatgtatgcgtggctatggcataaaagagttccttatgcgcccgcagccagcgaggaaaacgatgcttagaggattttcatgtaaatgagaagagcgctaccgcctaatccttctcagctgtttatacttagcttctataccgggcgctgctctcagtttacaaagcgttattgtattggctgggtaggaaacgggctgcttgggatatgctgtgtttttgtgcttcgggaggaggggagggcctttttccttttaggtgtgttcttgtctgaaggtaaaaaaatcctacagtgcaattttaaaatggtattctctttaccaagctcgggaagagtcccttgttaagttttaaattctagctaaggaatgcttcgttcctcaactgattttggtgcctaatgccaatttggggggaaaaaaatggaaacatggaagcaaaacttccccatccgtttgaaaatgttcaaaataaataaataaataaatacataggagtccctcaatgatttagttagaaataatacgcatttaaaacgaattgtaaaacatttccagagtgtgctgtgagggtttctcttcaggtagtggaaacctggggagctacatttatttagaaaggggttgcatgcctttaagaatgaaagtgtggaaacggggtactgagagcgtccttccgcctccgtaactgcaccgtaactgctctcccaaatttggtcgtctctctatccctggtcatgatcttttaggtagatgtgaaacttcgttcccaaccacctcagcatgtgtcctcaaggaatcaaaaacacgcatgggtggtgggttttctgtggtccgaagtcttgtggaacttggggagacctctctttgagtcccccaatccaaaagacacactagttaaagctatcctttcctttagcgatttccctcaagttaaaaggtggaatattttgattggctgtggagtttgaccctgggaagagttttttaaaaaaggattttgtgatgtagcattttctgtgaacctgcaaaattagggctcgcagatgagaaggccaacccatcataaaactgttatttcttaataagagttaataagggttcaaaggaggcttagaacaacttcctaaaaagcacaaatacagaggaagttatattagagccctgtgggcttttttyccctatgcttctatttttaaaaatgttttctcttagggcagtttaatagtaactgtgccctagcactttagccacttactgaatgacatacacagtgcagtgtctatgttctcatgagatacaaaccatcccaataagtttgttactaagggattcctttgagtcactaaacaacttatggtttagcataaaggaaaatgaccactaaaagcatattacaagattatcatatgcacatatacatatatacacataaatagagagagagactcactctgttttccaggctggcctcaaacttgaactcctggactcaagtgatcctcctgcctcagcctcccaagtagctgggattacaggcttgtgccacagcactggaccaatatatatatgtgtgtatatatatatatgtatatacacacatatatacatatatacacacatatgtatatatatttgtgcccatgcttacccaaaaatatattttttaaagtaaccacaatcttcaaatttgcatcacataccttcctgacagaggtaaagggcagaggagagaaaggcggcatccagctccagtttgtgcatcatttcagtctcttttgcctactatttttccttccatttttacctcttagctattctgcttcttgattgcttctgcctgagggagatgggcagagaaaattaagggaaagaagaaagttcaagttactttcttgtttttttaagatggagtctcactatgtcctccaggctagagtgcagtggcctgatcttggctcaccacaacctccacctcccaggttcaagcgattctcctgcctcagcctcctgagtagctgggattacaggtgggcagcaccatgcctggctaatatttttttgtatttttggtagagacggggttttgccatgttggccaggctggtctcgaactcctgccctcaggtgatccgcccaccttggcctccaaagtattgggattacaggtgtgacccactgcacctggccaagttactttccactttcactcgtgacagcttattccaggtggtaactcacaagaaccacgcaaagctggcaatgtgctctacaccctcacctcccacccattgtagaaataaggaaactgaggttcagagagggtaagtgacttgcccaagggtcacactgctttgaagggggcagagctgggatttgaacccagagctctacaccggaaaagtggaagatctttcttctataacatactcataagtgagatacattcccttcccatctttttggcagttctggtttctgtgtgtgtgtgtgtgtgtgtgtgtgtgtgtgtgtgtgtgtatcatgcacatgcataggtatgatacagatgtacataagttgaactgttgaagcacctgctttgatttacttatgatacaaaattttccacgttgttcatcattgtcatgggctactgaaatttgactctgtttaaacaggggcttgcaaccaatttataaaacactactaaaattttcaaattgccttctctcttattagctaactttgatcactgtagggttatattctaaatttagatttatactttatagcctaactttcctttgctaatgatcttactttaataactaaggcacatgctaactacttaataaaaaagtttgttgatgaagagagtgagcagcaagtgaaaacatgaaattarcatttctttctctggtttttagtagtttctgttgatcttgtagctttgctagtgtcttcatatttcaaattgtataaattctgcatttctcccagcacccaggcatatagctccaaattgtatgtgggtcactgacaccacagccatcaacagagtgtggctactgagttgcttaactaactatggaaagtgtatgaaatatttgcagggggcctgtttaggattgaagctccacacttggattctccttcagagggcaggctccttctcctagttgctgaaatgaagtggggagctggcatacgtgagtgaataaatagactttaaagcagtctatattttagatccctgtaagtaacaaattgataataatattgcagatatgattgaattatatttcaaggggaagttcttctgccaggaaaacttgtagtttctctacctgccttattcttcattagaggaaaatataagaaaggagacgattaaatagaatgcagtaactctgataaagaaattagaaaagaaataacaaaagcattacctaggttttatgatagagcctatattttaggaatataatcttactactcttaccattttaccatggtgctctgatttgagatgcttctgagaactctttacattgttacaatgtttactcttgattcttgacttgttttcagttctttactattttcctgattaaacatgatgcaaggtgactcatcagcttgactgtcaagatgagaaactgagtggccttgggtgatatgatgtaatagcccttcttggaaatctaactcctgagatacaaggactcctctgagcaaggactgtgtcctcatatcttcccagccctcagattatgcctagaaagatcctctgggctcagcaggtgtcccagaagccctttctaacaaggcccagccaccctgaaagttgtctgcttgagaatttggttaatgaccttggacaagttcttctaggggtgcattctgttgtcagaaggaattgtaattctagactgcaatagtcacttccatgaagatggatatactatggatcaactgagaaggccttggaaataaaaaagggttggttcaacatgccacattagcaggaggagttcatttcgggttttacttcaaagtggagcagtgccaagagactgctgtcttgcagaaggtgcattatgtcagtttggaggtagcatgctcatctgctagtattcaaaaagatgaccagatttccagagacatcaatggcttcctttgctaatattgccatctacttagccacccagaacagcatacattttaaaagtgaaacactcttaatgcgcaatattggcgaaaataaacaaacgtgagcttccttgggtatttactgtggtcaactggaattctgcctaaggttattattaggtatcttcctgctggtctctatccaaatgcaacatccatgtcttgcaaattgatactagtcaggtgtatttagcatggaatcaatcaattagtttcttccattcttttaggtttgttctctcactacccctccaacccaatttgcctaatgctaaacccttatggaagaaataaacctaaatcaaatatrataggtagcttctgtgttttattttgatgatttagcatatagaaatcaaaagagtgcatgtatatgtcctcaatcaggcagtgaggaagatttaaagtatttagcaatgcagagttttggaagataactgagagaaaactgagtctcttaccaatccttaccaacccctaccatccccttacccatgggatccacagtcagccaggtggttaacaacttccagacacagcaatgcaccaggtgctgtggagakaaataaaagaagtgaatccaaaccccttgcccctaaaggggcatttccgtttaatagaaggtagtagtttggtttgtggaagcatgccaggatgctgaaatcccttaagagagcttttttgtaagtttgactttaacatattagactttcttaaaagctattttttatccattgaggggaagtacttcccagcagggaggactctgttaacccaatccccaagttaagaaaagtccctgcatttgaagaaaaggttttacttgctcaccccaatacatattttgggacatggaaaggatcaatccatttttgagtggatcttaagcccccattgtgggtcacatactggcctagaactctagaacagctctgcccagtagaaatacagcatgagccacatgtgtaattgaaaattttcaagtggccacagttttaaargttaaaaaaggtgaaattaattttgtatccaaaatattatgtcagcatgcaatataaaaattattaatgagatcttatattattttcttcatactaagtctgaaatccaatgtgtatattgtgcttgcaatacatctcaattcggactagctaatttcaagtgctcagtgactacatgtggctttacagggagcttagacacttgtccagccctgttaggatcagttctgaggacctacaatgataaatacttttcatgttgcacagttcacgtatacatatatgtagtcataactaaaaccaaacatcacttttccttacttcatgttttgcactcttatactttctatgctatcctatcttattctatttcagttaagagactgttgcagtaatctagatgagagttaataagtttgaaattatagaaggacagtgggaaaggagagaactagatggatatgggaaacactaaagagataaatgccccaagatttgataactaagtctgagcatggggcaggttcagtgaaagatcaaggggccaggcgcagtggcttatgcctgtgatcccagcactttgggaggtgaggcaggtggaccacttgaggtcaggagttcaagaccagcctggccaacctggtgaaaacccatctctactaaaaatacaaaaattagccgggtatggtagtgtgctcctgtaatcccagctacttgggaggctgaggcaggagaatcgcttgaacccgggagacggaggttgcagtgagccgagatcatccctctgcactccagcctgagtgacagagcgagactccatctcaaaaaaacaaaaagatcaaggaaggcacagtttgttttctggctccaactagtgagtgccatcactgagatgggtgtgccagggaagtagagtttgtgagagttatgtctgaggtgccatggggacttccacttggaggtgtctagttcatgtttggttggggaactcaggagagagttctgagctggagatatagatctgggagatagcatggaggagatggaagtgaaattgaggcagtgaaatggatgagagtgaaattgagatagtttctggactgagaaggaagtggatggagatggttacctaggaagagtgcctcaggataatcccactacagggctaattctagaaagtaactgaccctgagccatcctatcaggttcttagagggggaaaatagaggagctgtaattaaagctattagactcctccttctattcatctgtctctacatgaaatctggttaagctaatctactttatcccagaatcttcccaggttggaaccctaagaaagactacttaaagggccaatagaagaaggatcatgaaaagaagacagagaagtatttctcaaataactgggagatcaagggaccaagggcagggtaagtttcatggagggaatgtccaatagaatcaaatgcagtagagagatcaaatgagttaaggaggaaaagtttcctttggatttagaaagaagaggtcagtggtgatgtttcagtgaagtggtgggagcggaggctggatggcagtagattgaggagcctataggtggtagggaagtggaagcttgactgagagaggaagcagatagaatgtacagtacccagaggtggacaaatcagggcttagggttactagagactagcttttccccttccttctttcgttcctttcatcttccctcccttcatctttttttccttttatttctcattcctttcatccatccaagatgtcagatcttttggttggctcattcttttaagatgatagcaacttgtgcctaaatataaatgggaaagagccagtgggagagggaaggggcgatggtgatggggacaactgatgaagggaatgtctcttaggctggacaggttgggctccagtgcacaagtggaaggattggcttcagggagaaaaaaagacacctctcccactgtagtggcaaggaagctggcaaggatggtttgggcaagaacaagttataagaggaagggtactgaaagttgaaggcctctctatctgatagcctgtttttcatctgtgaaggtggaagcaaaatcatggtggcttatttctggctagtacggaactataattctggtatatcctgggtagttgagtccagccccaggatatgtcctctcctgaggcctccaggctgtgggtagggagaagtggaaaggctgagatggttcctgatgagatgcagtgatgagagcaaatggatctgcttcgttgtggcctctgggactccacaccaatgcccatcaagccaagtctagatctggccagggagagctgaactagcccacggtgaaaggacagggggctgtcaagacaaatgtgctaaagcttggtctggacttgctggagcccatagtcttgttccagtgtcagttttgccattgaattattgtgtgcacttaagcaaatcactttcctctctggattccattctgtccccgacaatggattggatagatccttagagtgtgattctagctttcattgccttggaacttggtctactgcagtatgttctgtttgagctcatgctcctatcaaaagtctgggctaccccattcctcaccccctgttggttttatccatttggggtaaaaacaggttgcatgatcttatggtaagacacactggctaaatatgaataacaaatgttcacaagcactttgaagttttacattgatgttgtacaaaccacttctgctgtcttctgttttattcttcagatgctttctcagacaggttgaatgtattccaaatcatatatggaatgttctattcattgtttcgggaaacctgtgttgaatctcttcttaatgtgaacagtagcctcctaatttatctatttcatactacagaagtttgaaacattgggccttctttgaggcatggcagtatgggcttgaactatagaggcctttcttaatcaatgttgtccatctaagcttgctacttggggttaaagtccagcaatgggtcaggctgtagtcccaaaactcttacatctttagctggtgccccacacaaagcttctcagtgacygttagggaaataaatgcaggaaaataattatcccatcagatcactggggggaagaatgaaaaggaaaaaaaagcaaggaaggtagaaacaaactaagtcattgcaagctaggcctaytttcttccaataatctcccaggtaacagcctctaccttgctaggatctgattacccgttgctggcctcagaccatagcattattgttttaacattcctaccttcctctttatcccagcatgaactgggttgtatgggaggctgggaagctgaccttgcttggggataaagagacagtttagcactcaacaatcttgaaggcagacttgaaaacacagtgattagaaaataaagcagtgagccctggtagtgtgcgcctgtgtaatagtgtgcagggccacacggggctagcctattgagcagaattcattttcatataatctcctccctcccgccaaaatctttgacttggtgtttttgttttctactcggtaattcatgcatgctgaacctgacatcaggatgctgagggttatttaaactgtcatttaagaaaaataacaacggtaataggttaatagaaacatcatgaatgatgtgtacagcctattgccaaccaaatgatgttgaaagcccattcctggtacatgcaggcttctgtgtttcatctctggtgtgcctaatattgactgtaggcacagtcacataataataaattctattgtacctccaaattgtttagttataaggtaattgttctatatgggatgcaaggctagtggtctcactcctttttctccatgggcaagtcggggaattgaacaaccattcacagtgcacactgtattgggcactgtgttgaatgctctatatgtattatctcatttaatcaggctgcagacccatgaaataagcattactattcctcatgttataagtaaggaaataaataatcaagtaatttcccaaagatccaaaaagatacatatgtatatttttgagatgaagtcttgctctgtcacccaggctgggtgcagtggcatgatctcagctcactgcaacctccgcctcccaggttcaagtgattcttctgcctcagcctccccagtagctgggattacaggtgcacgccaccacgctcagctaatttatatatatatatatatatatttttttttttttagtagagatggggtttcaccatgttggccaggatggtcttgaagtcctgacctcaagtgaccctcccgcctcggcctcccaaagtgctaggattacaggcgtgagccaccgtgcccggccccaaagatcaaatattaactgattaagctgggagttgaaattaggtttgtctgacttctaaagcccctatttccatgacacatagttcacaaacttcagtgagcagagaattgcctgctcaagctcccaggtgattcggaagcaagatgtgcctagatgcacttttagagatgctttatttagccctcccagtcatatctgctgtgtttgggaacaggagtagaaataaatcagatatctgtgttctttgtagtaaaactagaaattcaatgtaaatattttgacccagcagttgcattcctaagaaatttgtacacatggccaccaaaaaaactagtattaggatgttcttagcagtgttattcataataaccccaaactggaaactacccaaatgcccagcagaagcagaatggattaaaaaaattgtagtacactcacacaatttaatgctgggtagcagtgagattgaagaatctacaaccacctgcaggaatatggatgaatctcacaaatgtaacattgaatgaaagaagccagatacaaactaatatgcgccacatgatttcatttctataaaatataaaataaaataggcaaagctcatctttgatgttagaaatcggtgtagtggtaggagcatgggatggacgctggaagtgttaggttacgtgatatgtggctgtgtgtacttagcttgtgaaagtccattgagctgcacttaggatatgtgtacttttcttttctttgagacagagtctcactctcacccaggctggagtgcaatcgtgcaatcttggctcactgcaacctccgcctcccagttacaagcggttcttctgcctcagcctcttgagtagctgggattacaggcatgtgccaccacacccagctaatttttgtatttttagtagagaccaggtttcaccatgttggccagcctggtcttgaactcctgacctcaggtgatccacctgcctcggcctcccaaagtgctgggattagaggcatgagccactgttcctggctgatatgtgtacttctctataagtctattattctttagtgcaaagtttaaagatattattattcacaataatgaagaaagggaacactctacattgtatttcccatttccaaataattctggtgatctaataaactctaaggaaaggcatcacatcctacttacaattatagctcttggctgctaacagagcttcaaagtgctcagcccttccaggggccagtatatccagccccaaagagagtctagtgagcacttgaacgaaacaccttatgtctaggaccagtccagccctagtcaggtaatctgtgaattaaaatccgtggcccscaattgtgtactatgcctggcctcacagtcagacaggttgtgggctgaggaaatggatggcattggttaggtagcaagagtacctcagaataaccctgctacagggtgaattctagaaaatagctgacccagagcctttgcatcagggtttgggaaggggaaaaatagaagagctgtaattaaagcttttagaatcctccttttatctgcctattgctacaggaaatctggttaaattaatctactttaccccacagtcttccaggatggaaccctgagtgacaacatttagagatccaatagacaaagagtcaggaaaagaagacagagagtacttctcaaataggtgggagatcagaggtccaagggtaaagcaatcaccttactggtagttacagttttcttgtaaaatatggtttctgttaaagaaatcatccactttgcagaaaatatcatctttggaacatctttcctttagtgactcagaaaaaaagaggttttattattgaaatagaatctagcaaatacctcaagctgagacatgttagaaatatctgtacttctatccaagtatattgcaaacctcccacactgcataatttgttctaatgcttgtttctttcaatcttcaacaatgttttctatatgtcttctaaatatatttgctgacaaaggaatgcattttagtttgacatcagtttttttttctacacattagagcagctagttttactgtagcatgaagaatagatgattttgcaatggtatgagacttttgttttttctctattgagttatggaaactcaaaaaggcttctaaacatttatcgttacatgtaacagtattttgtgacatgctggattgagtatcacatgactcacaacattgaaacattaaacatggaaaaatcatagaggtttatcttcatgttctggatgcttcattttaaaatatgttaattacaataacttcataccatcattagctaatatctcaaggtgatatttaatgttattggtagcagatatttctaatggtcttctgtgagataattttcaattcagctatcttcttgtcagatcagattgggttgtcgtggttggtacctgataatgtggtggctgcagaacttttacagggagtagaagggtcagctctgccattttcttgttgttcacttgtgtttgcattatctttgctttcctatttcattgcaggaaatgtttttgttgttgttgttgttgtttgtttgtttttgagatggagtctcactctgtccccagcctggagtgcggtggcgtgatcttggctcagtacaacctctgcctcccaggtacaagcgattctcttgcctcagcctcccaagtagctgggactacaggcatgcaccatcatgcctggctaatttttgtatttttagtagagacggggtttcaccatgttggtcaggctggtcttgaactcctgacctcgtgatccgcctgcctcagcctctcaaagtgctgggattataggcgtgagccaccgcgcacggcctgcaggaaatgttttaagccacctgctgatttatgtgcattggtttagttaaaactagataatataatccacaaatacctttatctaggctcaggtgaactgcagtatattgcaataagctgaaagcaaatgaaaaaatgtcaggcgatgcaggccacccaactttcacattccctttaggatacctcatgtatttgatgtggacagaaatggggcaccagtgtaaacccatatatcagaattagaaggccaggcgtcatggctcatgcctgtaattccaacacttcgggacactgaggtggaaagatcacttgagcctaggagttccagaccatcctgggcaacatagtaagacactatctctacaaaatttttttttttaattagatgagcatggtggtatgtgcctgtagtcctaggaggctgacgcaagaggatcgcttgtacttaggagttggagggcgcagtgagtggtgatggtgccaccgcacttcaacttgggtgacagagtgagatcctgtctcaaaacaagcaaacaaaaatagatatttttcttggtttttgtaaagctttttttcttattttttgacatgaaaaataaatacagtaagtcctcacataacattatcaagaggttcttgggaactgtaactttaagcaaaatgatgtggaatgaaaccagttttaacataggctaatttatgtaaacaagagttaagttcgtatggcgtatttctggccacaacaacatcaccaaacttctttttaaaattttttattgatatatatactgagacggagtctcgctctgttgcccaggctggagtgcaatggtgtgatctcggctcactgcaacctccatctcctaggttcaagtgattctctcacctcagcctccggagtagctgggattacaggcgcatgtaacgacgcccggctaatttttgtattttttagtagagacggtgttcaccatgttggccaggctggtgtagaactcctgacctcaagtggcctgccctcctcggcctcccaaagtgctgggattacaggtgtgagccaccgtgcctggcctgattacattatatttgtatatacttaatggggtacatgtgaaattttgttacatgcatagaatgtgtaatgatcaagccagggtatttagggtgtccatcaccttgagtatttatcatttctatgtattgagaacatttcaaatcttgttttctagcttttttttttttttttttttttttgagacatagtcttgccctgttgcccaggctggagtgcagtggtatgatcttggctcagtgcaaactccgcctcccaggttcaagtgattctcttgcctcagcctcctgagtagctgggattacaggcacgtgccaccacacccagctcatttttgtatttttagtagagacccggtttcaccatgttggtcaggctggtctcgaactcctgacctcaggtgatccacccaccttggcctcccaaagtgttgggattacaggcgtgagccaccgtgcccggccacttttcaagctattttgaaatatataatacattgttgttaactataatcatcctactctgctatcaaacattagaatttattccttctatctaactgtatgtttgtacccagtaaccaacctctcttcatccctagccccgctcacccacacacacttcccagccactatctcaatgatagtggtatctatcattccactctctacctccatatgatcaacttgtttagctcccacttatgagtgagaacatgcagtatttgtctttctatacctggcttaagtggctctgaaaagagcctttgctttttgaaagtagaagttgttcacttggagctggtgtacttggtgagggccttggtgttgtgagacacagtgtgattggccatctccctaggcagcaggcacaagctgtatggatctccctggaggtgatcgtcgagtacttgtaatgcatcaggaatgatgcacttgaagatattgacaaatgagttcatgatgcccatggccttcgatgagatgccagagttgagatggacctgcttcaataccttgtaaatgtagatagagtagctttccttgtggctatgcttgtgattcttgccatccttctggctcttggtcacaccaccttcttggcacccttctttggagcaggaacagacttggctgattcaggcatgtcaccacaaatcaataactatactgagaaagaagccacttcaacaccaccacacttctaaataaagaccaaaacactgctagtatcattcaacattgaaatacatgtgagctatgtatacatttaagaaagactaataaaaacaagataattatttgccagcttattccagttcagggtaatgggtgactgggacctatcctggcacctcagggcacctggtgggaaccagacctgaacaggacaccatcccatcgcagggcacactcacacacacaacacattcataacactgggacaatttttttttttttttgagacagtcttgctctgtcacccaggctggagtgcagtggtgcaatcccggctcactgcaacctccccctcccgagtagctgggattacaggcatgcgccaccgtgcccagctaatttttgtattttagtagagacagggtttcaccatgttggccaggctggcctcaaactcctgacctcaggtgatccgcccgccttggcctcccaaagtgctggaattacaggcgtgagccactgcgcccagcccacattgggacaatttaaagacactaattaacctgctgtgtacatctttgggatgtgggaggaaaccagagtacccagagaaaacccacacagatatgaggagaatgcgaaaatgcttcacggacagtagccctgacctggaaccaaaatattttttttttctcatccacgttataatgaaaggtcatcgaacaaaatgacattattcaaggatctgaggtataaacacaagtgttgctgtctaatggattgtcttgcccatcccacattagaaaacattggtttaggcattctaaatcttaccattggatccaaccatcagggagaaaaaaactgtattttcagggtgcacgttcgtttggccccttraagaaaatgcttttctgaaccgctttttggtgctggggttctgccttacatggaaggcactatggagacaaacataaaaaaacaggactttctggctaggcgcggtggctcacgcgtgtaatcccagcactttgggaggccgaggcaggcggatcacgaggtcaggagatcaagaccatcctggccaacatggtgaaaccccgtctctactaaaagtacaaaaaattagccgggcatggtggcgggcacctgtaatcccagctactcaggaggctgaggcaggagaatggcgtgaacccaggaggcagagcttgcagtgagctgagatcgcgccactgcactccagcctgggcaacaatgcaagactccgtctcaaaaacaaacaagcaarcaaacaaaaacaggactttctgtactagggggctgttgttgagtgtatcagtaccgatgttactacagtattacccatcataccctttaaggtggcaccacgggaggaatttctctcagaactcagcatcaggaaaatgctgtgctttttcctcaatagctattttgctttgtgcttaaggacaacattaactttgttttcctctttgctgtgactactgggagcttaaagccatttttgtagtcttacctttttgaaatatagaggactgtgatatgcatttctttgggctcatttcacccctgacctttagaaaacaaacatattttgactgggcgtggtggctcacgcctgtaatcccagcactttgggaggccaaggcgggcggatcacgaggtcaggagatcgagaccatcctgggtgacacggtgaaaccccatctctagcaaaaatacaaaaaattagccgggcgtggtggtgggcacctgtggtcccagctactcgggaggctgaggcaggagaatggcgtgaactcagggggtggaggttgcagtgagctgagatcgcgccactgcactccagcctgggtgacagagcgagactctgtctcaaaacaaaacaaacaaacaaacaaaaaacatcaaaaaacatatttctcctcctcaccccagatcttgcaactattattttaaactttcaaattttatttttaaaatcacctcaagttctttggggaaggaggtggaatatgaatatgatataacattgttattgatgttcactataaacttaaattcaattatctaagaaaaaattatttagaatgtggaatttttatatcttggtaaagattgttttctattgttaatagcatctatgcatttaatgagtctaagaggctattcatggtaagttgcacttccatttcaatggtgttacaatgtgaaaaaatggccaacactgattttaagataatatctattgtaagatccctcctactctcagagatgctaaaatgtggggagaaatgtacattttagaatcaatgaaatgtgactttacttatagtactatgagtcttctagctatttgatattcactcactgctgtgaggttggaaagtggccgcatgagatggagtttggtttataagtggtcagtgttttaaggaagcctgtatctccagggcataataaaaattctgatctctgatcaccaaaagggcagtatgtactaagctgacctagatgtgagcattcaggcactggtttactggtttaaaaaatgaacttattatgtgggaactctaaataaagttggaaaatacgtgttgtttttttttttttttttttttttttttttttgagacagggtctcactctttcacccaggctggagtgcagtggcatgcaatcacagcttactgcaggcttgacctccggggaccaagcaatcctcccacctcagcctccagagtagctgggactacaggcgtacaccaccatgcctagctaatttttcatagagagagggtttcgccatgttgcccaggctgctctcgaactcctgaactcaggcgatctgcctgcctctgcctcccaacgagctgggattacaagcgtgagctactgagcccagcctggaaaatgtgtttttaaaagatatttaagataatttttaaactgtgctcttgttttagttttaaccaacttcaagatacttattctcaacaatagaaaaataggcaaaggacagattattctctgaagaaaatacaaatggccaataaacatttgaaaaatgttcaatctttttgtaatcaaaataatgcaaattgaaacagcatgctaccattttttggtctataaaattgacaaaggtaatactcaatgccagtgagatggcagcaagataggtgctttcatacgttgtaatgtgagtataaatgatacagcttttgtaggaggcaatttaccaatacatgttgaaatgttcttcaaatatttatctttaaaatgttcatacccctgatctaagtaattcagtttctaggcatctgttataaggaaataatcagaggttcagaattatgtttagcatgttatttatattagtaaagtataaataatttaatattcaatgatggagaagtatttaaattacggttctttttcagtgaaatgttttacagctatcaaaattagtgaggttgaaaactatttaagtgacatgataagataatcatgatatattgagtgaaaaaaactgtctatccggcaagattccaaacttgttaatatgtatatatgtcataccagaaagcctaaaatgaaatatagaaggagttaactatagttgtctctgggaagtagaaagaattattggtgacttttattttcctctcttaactttcccaaattttctataatatatattatgatgatgataagaaaaagctatgaaagattgacaaatatatttattttattattgagtttaaagtctgtatttgtctttatcaattatcattctcactcctgtgactttaaattcccccattcagcaaatattcttaaggaccttctatatgccaggtactgccctggggaatagggatatagcaatgagtagacagaccaagtccttgctttcttagagcttccctaatagcagggagagacggagcttaaatatacaatgtttcctcatctgatgacctggacctctcttctacctgcatccatgccctgagctgaatgagtgaatctagtctaatggctttatatatcacatactctctcagtttctaaacctgcatctctagcttagtcctttctcccaaacaccagacttatacatccaactgtctacctgacatctccacttggagatctaataggtgtgtcaaaccaaatctgtgagaatggaattgttaatttccccatccttgttgtccctcccacccctagacctactcttccagtgttttacccctcctagggaatggcaatgccatccttccagttcttcaggccagtagctttggaattatcctgattcctctcattctttcacaccctacatccaatctgtttcaagttttatggatccaaaatctatccagaatctgaccacttcttaccacctccgctgcgatcaccctgacccctgcctctgtcttcttttgcctgattattacaccagacacctcagtggttttcttgtttctacctttgacctcttacagtttattctcaacacattagccagatggtcttgttaaagctaagtcagatcattatcatgccttgttcaaaacgctctgatgcccagcactttggaaggctgaagcaggtagatcacctgaggtcaggcgttcgagaccagcatggcgaaaccctgtctctacttaaaatacaaaaattaggcaggtgtggtggcacacgcctgtagtcccagctagttgggaggctgaggcaggagaatctcttgaacccaggaggcggaggttgtagtgagccgagatcgcgccactgcactccaccctgggcaacagagtgagactccctctcaaaaacgaaacaaaacgaaacgctctgatggctcccatctccctagagtgaaagccagtctttacagtgtcctaaaaagctcacacgactgggtgcctctcatctcctttcttctggtctcacctctggctacatcttttcttttttgctcgcttcctccaagcatactggccttctagttattcctggaagaagccaggcatgttcatgcctcatggccttggcccttactgttttctctgccaggaatgctctttctccacatggctcacttgatcctttatatatttacacatacatcaacttctctgactatcctatttacagtgatacccccaacactccctattccctttccttgccttatttttttctataacacttaatcaccctttaactaaaatactacatgttttatgttcttttttgttgcttgtttattatttttaagtgttatgagggcaaaattttttgttttgttttgttccctgttgtatcctcagaagctagaacagtgcctggcacacagcaaggactcaaaaagtgtttgtctgatgttagaaaaatgaattacgggtagataccatgaaagtaatttaaaaattttttaaagctcaaatgagttttaaatattccatatacctgcaaatcatatcatttaacagttaatttctggataatagtttttatttttcaaaatactcctcttttcttaatatagacctccctcccccatccctgctacatttgggagacctgagccttgattaaattttctgcatctctgaatttaaaggagaggagatatttctttaaatttatttttgcattatgaacattgcatgaatgcattctcattttaaaaataaaacaaaatgacagacatatatggaataaacaatgaaatctcttcatctcttctctcaaaatattatctccttcccaagaggtaaccccaattaacaattcaatgtgtatcattcaagtccagtgctgtccagtagaactttctgtgatgatagaaatgttctatatctgcattgcccagtatagtacccagtagtcacatgggttattgagcacctgaaatgtggctaatgtgaatgacaaactacttttaattttatttaattttaattaattataatttgaatttaaatagccccatgtgactaatggctaccatattagcacagttctaaactatttctttttcttttcttttttctgtttttttgagacagagtttcactcttgtcacccaggctggagtgcagtggcgtgatctcagctcactgcaacctccgcctcccaagttcaagcaattctcctgcctcagccttccaagtagctgggattacaggtgtgtgccatcagacccggctaatttttgtatttttagtagaaatagggtttcaccatgttggccaggctggtcttgaactcctgacctcaggcgatccacctgccttggcctcccaaagtgctgggattacaggcatgagccacygcgcctgtccctaaactatttctacacaattacctctctcttttcttctttttctctctcttcccccttctctctctttttactataaatgacatcatactagatagcatgtatacatacatattatacatattgctttgtgacttgctttttgcattcaacaaaatgtcttagatataattccctgtcagtacatacgtatctgtcttgctgttttcaatggtgcctgttacttataacatgtacattccatacataactaaatgaaaaaaatggatatttcttggtgctgaaccacatactgggcctcttttttcttctctccagtgacatttattggtgatgactttgcaccagctgcctgatttaagagtctacataatcagtgacacagtctaagaatccagtgattcgtgtgtgttgggcccatggttaactatattatctatttttttctgtcctctctatcttcaaaagacaaaatattctgactccacaataaataaggttttaaaaatatgttcagaaacaagtaaatataaacctaacagtatgaggctgctggattagattttgtgatgtctttttgtaattctgaatttgtggttctaaagctgatgagtttcacagcaaaaggcctacctggaagaagtagattctttctgaagtcctgttcttatctttttttgcatatcctgattaaaatgttctgtctttgtaaaattcttttctaccagagacattcttgagatggttataactttagttactctgggtaattcacttttcaattgatttctatgcttctaacatacctcatcagcattttctagctaatgtttgagcctgacaaactgttatagacacggtattaaccaaggctctgtcaagacacagatggctcactctaaaggtgaaattgaaagagagtttaataaaggtaatacttacaaaggtatgggcagggtttaaggaaacctcaaggaatagtatagtatccttggcctagaaacaatgggggattgccatcccccaggctggtaggggcaaggggtgagtgtggttaccagaacctcacacagacagctctataaagaggaccccctcacagaagctgtgaattttggtaaaaggacagaaccaacacactgcttcctagcagagaggaagccagggagacaaataccctgagctcactcttgtcctgacctccactgttttgcacgcttcccaaccaactggaagcaggaggcagagatcccattggtgcagtccattggggaagccatacagaaaagagtagaggaaaagcatagagaagggtagaaagagagtggattctggagaggcaaaagggaagatatttattacccacacattcttttagttaatcctcacaacagcttatcctcctttcataaacaaggatactaaggcttgagaggttaagaaccagcaatttgctaaaaatcaaatgtaaaaataggaaagggatattaaataatggaggtaggatttgaactcaggcctgtctgacgggattgccccactggagttaagaatagcttagcttggccgggcgcggtggctcatgcctgtaatcccagcactttgggaggccaaggcgggcggatcacgaggtcaggagatcaagaccatcctggttaacacagtgaaaccctgtctctactaaaaatacaaaaaattagccgggtgtggtggcgggcacctgtagtcccagctacttgggaggctgaggcaggagaatggcatgaacccgggaagtggagcttgcagtgagcagattgcgccactgcactccagcctgggcgacagagcgagactctgtctcaaaaaaaaaaaaaaaaaaaaaagtatagcttagcttaaacaagcaactctgcagttggcctatcaccatcagcagtactgtgctaagttctgattggttgattagcttgttgtctgattggtccagttgtcagtcagcgatgtacattgcataagtgcaggttctagcaaccatttttttgcacttaagtaatatttgcattgtccattgtccagtacctaatagcttttgttttaagtaaatatttgacaatgtccaactgaagagattctatacatgaaatgctcaacatataatgtcttctttaaaagcctgatgaaatgtggctttggtatgattctatggcatagtttatataaccagaacttatgtgacaaatgggtaacatattcaccttgtaatgactgagtattttgaaatcttcaattaggtagaaagaagttttattgcaacctagctccaagtctgtggtctggcaaggcccttgcatatgtgaggtccagggcactgggccagggcttcttaaccctttatgatccttgctgtcttctgctaaacacgttgtgcacatgtaccctagaatttaaagttatatatatatatatatatatatatatatatatatatatatatgtaaatctcatgtgccaaccaaaccccaaatttggaatatggctctctagaagggcatagtctgtcttctgtgatcttcacaagttcagaagcttagtttctatgattttcatgctcaaaagagtagtggttttccccaaatctgacgttattgaaaactgaacatgaacatgaacatgccctttcaaacgaataccttctcccattctaaaacggtcattcttcactttagaagattgctgctgcaaagccaattctgttcctgcctttcttatctctctcctccatttctctatcctccaaacccctagcatcatattaaacatgtatcatgtgctaataaacactacaaaatgtgatctggctgatttaaagtctaacctgaggcttgcaaataactacaagcaagtcatttgacctacttcattaagtctggccaaaaatatggttacatgcttttatttcttcagttaattgtttgagttaccccttctctatcaggaaatcatgtatccccttttcgaggtttttccatccctatagtctaaaaatcctgagggtttcctcagctcacagggagccaaaaaggtaactgagtttgagggatctaccactgctgttgcttcttgctgtcacttggtgtcaccttgaagactggttcagtgaagataatatctacctcacaraggtgttgtacaaattaaatgagcaaatacatttaaagtgcttagtatatcgatggatacatggcactaagtaggtactcaaagatttagctattaccttatgttatcaggccttagttttatgtagggtctacaccagaggatccctggaagcatctcagctttggcaaatggtgaagttagttcagttcctgcccctcccagaagcctctatcttactcacattgtcctgaagttgatctgcctctagtatatggaagagacagaacctaaggagcatagaattttttataaagcaaatgatttgttctggctcagagaaggagtttttttttaattgtaatctggtgtgtttggactgaaaaaacattgtctcaggtcaccgggctggttggtagtagctgggccttaaccaaagtcttcctgaatgcagagcttgatcaactcaagaagtaccctgctgtgctttagaaagcaatgttctggacagcaaggctgtggctcatttattttttcattctccccattctgagcacattgctttatacataacaagaaatagctcttctccatatcaactgctgttaaagatagtcacctgtgcacacatgcaaacacaaacacattcgcacatttaggaattctctctgccttccatctctttgtttctccttctttcctacttctaggccataataattaagaacaaaatgcacggtgcatataaaccttttcttcccctttgagtaactattgttgctttacaacgttccctatctctgttttaattaccagatttcacaccatcaagaacacaccattcttggaaaatggcaacaccttatctcctctttaataaactttgtgagtagcacatacaagatctccaaatagtaatttattttaggtcatgtgaaaaaggttcattgcccacatatattaaaaggtaatgaatcattaatgtaagctaatcccacttgccaatccatttatccatttgggttgtgtgctaaaagtccattcataagtcaatttgcagccaggtgtggtggtgcatacctgtagtcccagctacttgggaggctgaggcaggagaattacttgaacccaggagacggatgtggcagtgaggtgagatcgcaccactgcactccaacctgggagaaagagtgagactccatctcaaaataaataaataaataaaaaataaataaaaatgagtcaatttgcttgtttctgtgggtaactatattatctattattatatcatattatatataatagtgaataataatagcagtaataatagctacagtttattaagtaccaggtatgttacacatattatctctgcttttcacaacagccttgcaaaatgaatagcccattttatagatgaaactgaggttcaaataagttaaggaacttgcttttaagcacacaaagtcaaaaatatttcctgcctcaagtatagctcctcctgaagtggtagtggtgggtcactcatgactttcctcaccacatctgttgggccccagggtgggcgcctgaccgaacgccagccaatcctggttaaggcctgatttgaaaagatgaacttggccaatcagattctcccttaggaatttgaattgggaaacatggaaagagtcaataagttggtaggagtctagggctgaaaggcacaatggaaagttgttaaatgagtgttgtgaagagaggctgaggaggccatgatgggccggcctattagagctgaagctgtggggcagtggaaagcaagcagcggctttaatgcagtggaaggaaatggagtcagtgggggtgggacagaaaggatcatgtgcagagagcagccaagttggtgcagagcaccttctctggggccacattctgcccctttcctgcttttccacagtttcagttccagggtagtcttaaaagaaatcctccatcctttgagctaatgttagtgagtgtctgttagtgagtgtcagttcctttcaaccagaagagccaaattaaagtacatggctagtaagtgctggagaggggatctgaacccggggtttgtggatacagagtttttgttcttgtcactgcacccctttgctacattacaaatgccactgtggtctaccacagcctatgaggtcgccataatgtatctgaaaaagaacgaatagtgaacccaagtttcctgaatccttgtcccaagtcttggtttgcttccagagccctgraggagaaggtgagggctaagaaaatctcagataactgggaggcctccagacaacattgagcttctagggtggaagggactgcaatggggagaggggatggggacaggggagggatcggttctcgtcagtgcagagaatgggggctccccaagggcagggattattggtcttatccctacttctatccccagattccaagatagtgcctgccacttatttgaatgagtgagtgaatggataaataaatggcagaagtgagtcatagcccctgtccaaatgtatggatcattcttcagtctagtgtccccaggttaaggaacacatcttaacctgtctccatctctaagaaacaattgatacagcacagtgaataatgtttaccatgactgatccactttagctttaaaaatcacaaagatgatgtagtggtgactgcaatcacggcacagttcaaagactacaaatggacaactctggattgcatttgccttgtttacaaaaacaccgcttgctttgtctggagagagtgaggttttcattttaagaggctgactaaaaaatgcagggccactttctgggcaggcttccaagtgactacatctttctcacagcgttccccagagccccagcccaagctgcctggggcagggcctctagccgctagtcgctgttgaagctaccacaggagaagtcatctgcagcctgcccaaattgctgtgcttttaagccttcccaaggcacagataacagctttggcctttgcattgaaagagacatcagagtttgtcattggccaagctggtgtgtgtgaaatataggagatggcgtgccacgcttctgagtatggcactctttccagccragtctcctgggtgtgggtgagtctaaatgtttgaagactgccctcggttgtgaaatgttcgaagctgggcattgtgactttccaagggcatgacttggcgtatttcttaactctaatgagcctcagtttcctttttgtgaaatagggatagtattatcctatgctctagaaggatagaagtatctattcatcacggggtgctgcgaagcctaaaagagataacagcagagtatctcatctagtacctggcatactatagacactgaagagcttttgttatttctgaagcatcagtaaaaaacaaaccaaaaggtttcagtgatgatgccctatttttatgtctaacagtacagtatttctctgagactcagtggatatatttgacttcttaatcatacctgtgtagccaacaggaataaaacttcagaggaagttagtgccaaaggaaagyttgtcagactgtattccctttctttttctcccttctagaccctgackgcacctgccccatttgctgatgaaaccaactgccagtgtcaagcaccccatgaaaaactgaccattgctcaggcccgcttaggaacaccaggtgaggctgtacttctttgtcttaaatgggccctgtcttgacattttaaagtatcagaaaggggccgggcgtggtggctcatgcctgtgatcccagcactttgggaggctgaggtgggtggatcaccttgaggtcaggagtttgagaccagcctggccaacatggtgaaaccccatctctactaaaaatacaaaattagccaggtgtggtggtgcacgcctgtagtaccagctacttactttgggaggctgaggtgggaggactgcttgaacccgggaggtggagattgcagtgagccgagattgcgccactgcactccagcctgggcaacagagcaagactccatctcaaaaaaaaaaaaagtatcagaaaggcccatcattatttgtgcagcacttgctttcaagcagagagttgaacttagagattataacgcagtgcaagggtaaagaagggtaaacactagcagtgataaaccagaccaaccaaaggagccaagaaaaagatgcatcagaatacagggagtttgagccccagctttgtcacttgttagttctacagccttgggcaagtcactagaaagatctgaatctgtttccttaaaacagggataacaatacctacctcacaaggtttctgtgataactagattcatcaaaagtaccaaagcatttttaaaaccatgaaggcatatacaaacctaagctactataattattgccattcttaaaagtatgcattttttaaaaaaagtttctagtgtgccttaaaaagagtgggttgtgctatagaagtttgttcattcattcatccctttagcattatgccagaggatggatagggaagagatttggaaagaattataaggtaccatctgtttttcaagagacaagacaactagatgtgaaataaaaaacattagtagcatgtgtgcaggtgcttaggggttaaaacctgcaacacagatgataactgattcttagagaatggcagattcatttggcctgagtgatcatgcaagacttccgggagggagcagaacagacattttaggagaactaagatttggactgtgtgggcagaagatgcaaaggtattgcagacaggtggaagaggaatagtgaagacagaaatagacagctgtgtaggagtgagtgttgttttagttgattgggatggggtgaaaaataagactagttgaacaggtaaactttaagccatttaacatggcataactcggccgggcgcggtggctcatgcctgtaatcccagcactttgggaggctgaggcaggcaaatcacttgaggtcaggagttccagaccagcctggccaacatggtgaaatcccgtctctactaaaaatacaaaaattagccaggcgtggtggcaggcacctgtaatcccagctactcgggaggctgaggtgagagaatcatttgaatccagaaggtggaggttgcagtgagccgagatcacaccattgcactccagcctgggtgacagagtgagtctctgtctcaaaaaaaaaaaaaataataataatataaaataaaataacatggcataactctatggtttctagttgccattgcagaaaacaaamaaaaaaaaaaacaaacaaaccaaacttaagagaatccatggaatgaagaacagtttgcttaacaataataatggatacttattaagtacttactatgtattaagatctttatatgtatcatgtcatttcactatcacaactctatgtgattagtagttttagtatttcacagatgaggaaatgaaggtttagagaagttgtgaatctgcacaaggtcattcactactaagtggcagtggttcacactggagcctgcattagaatctactagagggcttcttaaaacccagatggctgggttccactcctagagtttctgattcagtccaactggggtggggcccaagaagttacatctctaacaagtttccaggtgatgctactgctccagggatcacactgggagaaccattggtaagtggtaaagttgggatttggtctcaaacctattggtcttagagcttgacctctcaaccatgacactgtgcttcctataagaatagccttcaatagagtgaagtgaggagcagagtaggcagagttaggaagctttcatgtgagctgcttttgaaaaaggcaaaacaaggttggggaggtagcacagagcagccaaagctgttgttcccaggctttagtgtacaaagaatcacctggtatgcttgttaaacaagcagatttcctgtttcattcccttcttcccaaatctgggatggggcccaggcaagccatctgcattttaaacagatagtcagggtgattctaaagttagtggtctggagaccacacacagaaataccaacccagcaatatatccaagggatgccaaataaaagtccaggtggctgaccgggcgtggtggctcatgcctgtaatcccagcactttgggaggctgaggcgggcagatcacctgaggtcaggagttagagaccagcctggccaacatggtgaaaccttgtctctactaaaaatacaaaaaattagccaggcgtggtggcgcatgcctgtaatcccagctactcaggaggctgaggcaggagaaacgcttgaacccaggaggcagaggttgcagtgagccgagatcgcaccactgcactccagcctaggcgacagcgcaagactctgtttttttaaaaaaaaaaaaaaaaaaaaaaaagtccaggtggttatgaagaaaacagacttgacctaaagttaaagggtgagcatcaggcccaaactgaaagggcctctacctttctagggaaaggaaagggaagtagaacttactatatatctgtatatatctgctcgatgtgatgctctgtactctttgcaaagaccatgtgagatgactattattgtatcctttctaaagaggagacaaaggagacttgcagaactgaaaagtaacttgtcaagtgtcctagttgactgggtagagctggaatttgaccccaagtccattttgcctcaaacccctgctttgcctactgcaacgatctgccttatgaatcatggtccacagcaggccatggagctaagtgaaaacatgctcagacagtagctgtgatcttctgtagtggcaggactatgccatgctcactgctgtttcatcagcatctagagaaatacttgttgcatacgctgcggtcaataaatattttgtgagtgaatgaatgaaagtttggaggcaggcgggtcacctgaagtcaggagtttgagaccaccttggccaacatgatgaaaccctgtttctactaaaagtacaaaattagccaggtgtggtggtgcatgtctgtagtcccagctacttgggaggctgaggcaggagaatttcttgaacctgggaggcagaggttgcagtgagctgagatcgagccgctgcactccagcctgggcgacaagaatgaaacttcacctcaaaaaaaaaaaaagtgtgggacaagagaagtagttcttcctctggaaatagaagcagagagagtttgttctggyattttgagctggtatcaagctaactgggtgaaattgggcacctgtacattgcctgctgccaagcagtttaagcagtaataagatggtggtgtattttgaaataatacaggtcattagagggggartgagatggaacaaagatgaactcctgatctttagaagagaaattctgcccactaacctgaggtgatgaccctgggaaattatctaagaaaatccgtgatgttgatgagtacctagccagggtacttgtgttagaaatttctttatttagaacttcaaatatcaggccgagggcggtggctcatgcctgtaatcccagcactttgggaggccgaggcgagtggatcacttgaggtcaggagttcaagaccagcctggccaacatggtgaaaccctatctctactaaaaatgcaaaaattagccaggcgtggtggcgtgttcccaggtgatgctgctgctgctactagtcctgggaccacactttgagaaccacagcataagagcaactgtcggcagtggttagaaggagtggtagggagattatccaatatcataattgttggagcattgtactgttagcagaaaagctcggagaatttttaagaatcttgctgtttgattaccatttaagaaaacaagaaaaacgttacttttttgaagggtttgttcaagagtttcaagaagggtttggtcaagaagggtttggtttcaagagtttcaagaagggtttggtttcaagggtagtaagcaatttacctgtttgtggcactgtcttgagcgtgccctcaaaaaagacaaaacatagcagaatttggtatttgataatgctcttcaagattatagttttttgtttgtttttcttttgtatttttagtggagctggtttcgccatgttggccaggctggtcttgaactcctggactcaagtgatctgcccatctcagcctccctaagtattgggattacaggcatgagccactgtgcctggcctagattatagctataactggactctcttaccatctcctacactagccatattttatgacataatataattgcctaaaatgtgttttacaaatttagaactgcccaaacaggggctgggggtacaaattctagaagaggtaatgacaaactctgcccatagctcttagctttttgaccttgtttgtgaggtcacaagggtgatgaaacttcaagagaaagaacagaataaatcaaaaaagcaatcagaatcggcacctttggtcttagctagtccagctgtggagctgtgcacatacacagtgttgtatgtattctgatgcatggagaataaatcctgtcttgacataaaggaaaagtccaggagattgtttcataggttccttttcattaaaactgcctttcttttctctctttctttctttctctctttctttctttttttttttgacaggttgttgctctgtcacccaggctggagtgcagtgttgcaatcacagctcactgcagtcttaacctcccaggcccaagcaatcctcccaattcagcctcccaagtagcttggaccacaggcatgtgccaccatgcctggctattttttgtattttttgtagagatggggtttcactatgctgcccaggctggtctcaaactcctgggctcgagccatctatccaccttagcttcccaaagtgctgggattacaggcatgagccaccgtacccagccctaaactgacttttcttaaagggaatctcggttctgattttctactttccttttcaaaaaggaagtttgtattatctgtttccacagtgtgtagaatttccctgactacatttttcaagagccgccttaatgaatctgccttattcatgtatcatctgtgatgtaatttacttaataatttttctttacatatactcactgttctaaaactttaatgtattttaaaaagcaaacatcaatcactatcatttacagaaaatagtatcattagctagtagcaatggctaatgataagcagaaggtaactacaaagtttatataaaactacataaattatataaaataaatatgtaactataagattttaaaagcttaacttgtgccactttttttgcacatcagttatacaaaaaacagtactagttgccataattactgggtgtttaataatagtttctgttttgttttaaagacaagaattcatatcagcatgtagttttctagcaggtaccaacaaggtagaagaaagagtggtgagtttgatttgcactcaaacatcatcgtaaattggttgtatgacattgggtaagatgcttaacttcactgagcctccatttgcccatccatgaaatgataagtctactttcacctggctccctcatagggttgatgcaaagattaagtgaaatacatgtgttttgtgaattgtgtgtatttctaaggtactgtttaaatgccttaaaatagccacaatccaagccttgttaatagccataatcaaagatgatcaatcactattttattgttgcttgaatctgaagcaaataccaaaaaacgcctaacataccccacagtagtgtgaatttaaacgtaacgtggttggtgattacctcctgtttggctgtatggcaggtgtgtgtttaactttttaaacaactgccaaactgctttccaaagcgattgtaccactttaaattcctatctgcagtttatgagcattccagttgctctgcattctcaccatcacttggtatggccaattaaaaaacattttttagccattctagtgtgtatgaagtgttatctcattgtggttttcgtttgtatttccctaatgactaatgttattgaggatcttctcttgtgtttatttgccatccttgtatttattttctttagtgaaatgtctgttcgatatttttgctttatttaactgggtggtgggttgttcatcttactgaggtttgagagttctttatatattctagatacaagtcctatattttgcaaatattttctcccagtctatgactcaccttttcatttttgtaaaaatgtcttttgaagagcaaacgtcatgagtctcacaggctgcatttaaggtgtcaccccaggctcagttctcatctggaggttaactgttgttagatctgcttccaagctcactcaggttgttagcagaatttatttccttgtgactgtaagatcaaggggtgagcttcttaccagttgtcggccagaggccaccctcagctcctagaggccacctgcaggtccttgccatgtggccctctccataggccctttcacaacatggcagcttgcttcttcaaagccaccagtgcagaaagacagtaagtctgctagcaagatggaccctttttgtttctttttgtggttgttgtttttgtttttttttgacaaagtttcattcttgttgcccaggctggaatgcagtggtgtgatctcggctcactgcaacctctgcctcccgggttcaagagattctcctgcctcagcctcccaagtagctgggattataagcgtccgccaccacgccaggctaattttttgtatttttagtagatacggagtttcagcatgttggccaggctggtctcaaacttctgacctcaggtaatccacccacctcggcctcccaaagtcctgggattacaagtgtgagccaccacgcctggccaagatggagtcttataatgtaacataatcatgggaataatgtctaccacctttcccatattctactgattagaagcaagttacaggtcccacacgcacttcaaggggtgggaattacacaaaggcatgggcaccaggaggcagagatcattaggagccaccttaacgtctctccacgatagccatgcaatagttgtactctgacatctttttttgttttcaattggctcctggtcattgccaaacctccagcttcacaggtcagtggtatctcacatagatgctctggaatctcacatagatgctctggagagtccccagatgcctaaaagcatatccagaaaaatctcaaacaaaagattaaaacagatcaacatacaaactaaaaagccatactctgtttttttttaaagctttattatagagtatttcaaacacacacagaagtagaacaatataatgaaccttcctgtgcctgtcactcatacctaacaaccactaacccatggccagtcttgcaccatgcacacctctgtctactctgtcctcttgaatgatttgaaacaaaatcccagacttcctagaattctgtgtatatgtctgaaaaataagagctctggttttattaaacataaccactgtatcatgatcttacctgaaaaaacaataattccttgatatcaccaaatattcagtgttccaatttctaattatcttatgtcatcatttatatatagcttgtttgaacccaataatgtccatactttacagtaggttgatatgtttttaaaatctctttcaatctgcagatccccctttcatttctctttttctttctctctctctcttttttgccttgaagtttatttgttgaagagatgaaagatcagggtccttttttggcagggaggggagtcctggagaatttcccacagtctggaaattgctgacacaccacaatttttaaaagtgagcttattgcaaaatcaactttgtaaatactcttcagatttactaaatggcctttttctcagtaattacgtcttctttctttacttttctttcctccctgcttcctgaattcatttctcttgatcacctctgaatcaataacaaaaagttttacaaaactgccatctgctttcccctggggtttatatcttaaaacaaattttcctcaattgaattcacattgaataagaacattgaaagcaaggctccctcattagacagtttgttatttcaaagcattttctatttactgtgccttatttagaatacagtataatcctatgaaggcaattctgtttgttcaaatttgtgtataattggaaataattgcaattccctatctgacataaagtctctcaactttttttattagagaaatttaatttattagaaacattgtatcatctgaatctattaatgtaacatttctttatgttccaaattaatgaggttgcattgcatcaagaaataatcacaattttaaatctaagtcttaaagatcatttaacagaagttggcattgatttcttttttaaatttatttttataacatcaatgtaatacatgcatatatatatatatataatttgagacacggtctatctctgccacccaggctggagtgcagtggcgcaatcagctcattgcagcctctgcctcctgagttcaagtgattctactgcctcagcctcccgagtagctagtattgcaggcgcctaccaccatatctggctaatttttgtatttttagtagaaacagggtttcaccatgttggccaggctggtctggagctcctgacctcaagtgatccacccctgcctcagcctcccaaagtgcatggattacaggcttgagccaccacgcccgactatttttaaaagtcagtagtactcccagcttataaagaaaactagcggtccctttctccaccttcttcacccctgattcttattccctgtaggcactcaacacttgacagtcaactttccataatgttgttgacatctctcatccattgtcattgcctttcttgttttctctgcccttgggaggattatatctttttaacttaacttttaactttaacttttaactcttaactctgtaacttttaactcttagtaattgttgtggtgtttctgggagaaagtagagataatgtgtatgttcagttcaccatatttaactgatggtctttgtatttccttttaaagaacattattagctcacgcctgtaatcccagcactttgagaggctgaggtgggcagatcacaaggtcaggagtttaagaccagcctggccaccatggtgaaaccctgtctctactaaaaatacaaaaattagctggatgtggtgctgagtgcctgtaatcccagctacttgggaggctgaggcaggagaattgcttgaacccgggaggtggaggttgcagtgagccgagattgcgccactgcactccagcctgggcgacagagcaagactctgtctcaaaaagaaaaaaaaaaagaaaacaaaacaaaaaacactattgtggccacatatgtctctttccttctcactgcaagaataaaatgtctctatgttgtttgtagccgtggagatgaggtgacaagggtgcttagaatgagagcactttgatatgagaaactacttctttctcctgtcatccatttttgaatcttcttggattttcacattctagttcctttgttgagagtctagaaaggtgtcaaggttggcaaaatacatagaattttctatataaatgtaggaggcatcttccagagtatcatgatggggatataacagagctgcaacttccttcctccaaccagttaaaaagaataattttgtgacttgctttgtctaccaaattgatggaagtctatacccaatttctctctctgacttgaaggggatgggtctttggcctggctgagcaatagtgttatcctggtctcctggttcctggaggtgctgtactgaagtgtgtccctcttcctcttggaacagcactttttagagcactagatgccactgtctgtgtgacctcttcacttttgacctttctccctaggaaggactatagtgttggttgttcatcttcagccctgagcaccacttctacatgcaacattacatcctgactctcctccctttgaggcgtatgtccctaatctcttattataccaaagaggttagggagtggccttgcagtggtatgctagtaaaggtttaacagctggtcctctagcgggaaataagccctgatttgtagcatttgccaayttctgtcgtggaagcactctatcgtggctgacttcaggctaccaacgtgacctggagttgggaagaaaggttgtaaggtgagccatgtgaacagattccagtacatcgttgcctttgagaacagggacttggggtcttcattcaggactgccacacccaaggatgaagccatttgccttttccattgagctcctcagttactcctgcctacgtgttccagctgggctgactctgccggctcaggcacctagactccactctgggtcaagagaactcctcagtgctctgtttttgtctcttctgttggctaaaatagtgtgttccctggtttgatcttaagtttgttatgtttttgctctgctttgatgtcttcagaagaacccctttaaaatcaatttygtgcactgatatgaaactgatggtatgtagagattgtgtcttatccagaaagtttcttacgactgatagaaggtaactgggattcctcattctgcagttctgttaacagtgttttctttctcccacagctgacaggcctgtcagagtatacgccgatggaatatttgacctcttccactcaggtcatgcaagagcccttatgcaagcaaaaacactgtttcccaacagctacttgttggtaggaggtaagaagtgcattttctttttgtctagaaaactcttttattrtatgctttctgaaaagagcccctttcagagttccatcagtaaaaatctcacattgttaatgcttccaattcagcccatactggctcgcttgttcactgcctgaaatttaaaatgatgtttgaaaaaccataggggaagttacatcatgggattgtataaccctgatcctcagagagagatggactgatagtaccaccaagggtaaatgcttcatgttttccattaatgcctttctattagtgtttaaggcttgatccaaattatgttcctaaaattttctagagggataagagaagcaatattattctgatttcaaatctcaaagaactaaagggagttaggatgatgaagaacaaacaaggtcatcgtctatttcttttgtgtgacctgcagcacttaagacaatgttgtgctaacactagtggcttgtaacagccccacttagttgaatttgtagcagtgtgttaaagacatggagatttatataccgaggtaatcttggttcacaacgaagggaccaatttactcgctaagtctatggaaagagaaggatcgttagatgtggactgaaattttcctcctccaggaggcctatttctttttggctaaaagggatagtacctgactaggaagacctgtatttcacttgtgcagcttcaggaaggagcatattcattcagagtaatcagtttttgtggcatataaactaggcaccatcaagtcttacacctctactgggggaaaaaagtactggtaagagactacataactgttttttaaagaattttgttaccttctgcaattaaaaaccackttgtttgtttgtttgtttgagacggaatctcactctgtcgcccaactggagtgcagtggtgcaatcttgactcactgcaacctctgcctcctgggttcaagtgattctcccgcctcagcctcctgcatagctgggattacaggcatgtaccaccacgcccagctaattttttttgtatttttagtagagatggggttttgccgtgttgtccaggctggtcttgaactcctgacctcaggtgatccacccacctcagcctcccaaagtgctggcattacaggcgtgagccactgtgcccagccaaaaaccacttgttggacatttaagaggaactcttctgcaggttttgccaagggtggtgaccacaggaccattgaatggagttctttccagaaggaggaaatggtggaaggcaatggttactgggcaagtcatgcagagggaacccaaaacaggcagagaacccaacccttgcttacttccctttagcctgaaaaccattccttgagagagcactaccacctggagtctggtcctaggctactggggccctggagagacctctgcagtgtttgggctttggtcatttgggtggcctaagtttggaggtggttaggtgtgggtcacagttaacaggaacactagctgtggccctgggttatcacatccaaagtaagataaaaggaaatgtgtagttttcagtacgttcttgtaaattggaggaggcagtcagttaatatcagcagctctctaggtcattaggcaacaatggtttcactgactcactgatttcttcatctgacaactttcttttttttttttttttttttgagatggagtcttgctctgtcacccaggctggagcacaatggcatgatctcggctcactgcaacctccgcctcccaggttcaagtgattctcctgcctcagcctcccaagtagctgggattataggcgcgtgccaccatgccgggctaatttttgtatttttagtagagacggggtttcaccatgttggtcaggctggtcttcaactcctgacctcatgatccacccgcctcagcctcccaaagtgctggattacaggcacatgccaccatgcccggctacttttttgtatttttagtagagacagcatttcaccatgttggccaggtctcgaactcctggcctcaggtgatccacccacctcagcctcccaaagtgttaggattacaggcgtgagccaccgctcccggccccttcatctaacaactctttattgaactcttactatgtgccaggcatttttctgtacactggggatgcagccatgaacaaaacagactgtctatgtcctcagagaacttgcagtctgagggagaggcagtcattgcccactaaacaagtaaatatgtagtagtggtactatgaagaaatataggaaaagagaaaagagtgactgggcggaggaaggagggatgttttaggtataaaggtcagggaagacctctctgaggaggtgacatttgtgcagagacctgaatgaaataaaagcactcaaaagccagaacatccagtcttccttgtgcaggattctcaccagtcaagacaacagtgtgaggcaagcagagaagacatggtgacatgttagttttttgatttgtrtatcttaaggaggctttccataaaagcacagatgattcagtactcagggaaattaatatgggcagaagtttggagccaagaaataaagcagaagagaaggagaaaaatttcaataagaaatcctggactttttagcagctatagcaaagggggccacacagtcattctatcactctcaaactctagaagctgaattgtaccatcaggaagaactagtttttcctgcctgagttctgagataactgtttcagagggtcactgtgtaaggggcattgagtaatccaaagaacgatgtcctctatagtaggtttacacagaatttcagatattcccttaatggctattacatgggttgtggaagtcaagggcatattgaactacttggatgaccatgagactgtatcctttggtaagtgacaaggactggagtacaggaagaaaataaaacaatacagcatcaagctataaagaaatagtatgtagacttctgggaacagtgacagagtaagagtgaaagctgggcatggtggtgcatgcctgtagtgccagctacccaggagactgaggcaagaggatcacctggacccaggagttcaagggtatagtgagctatgatcgtacctctgcatagctattgcattccagcctgcacaacacagtgagacttcatctctaaaacaaacaagaaaaacaccaaccatgggcaacacaaacaataataaataatttcagtgtgttcttttctctgtagatttcttattcttatcatctcatttaaaataatcgaattgtaatactatgaaatatcttctaaccactctgctaataaaattcagtgacatcctggctgggcgcagtggctcacacctgtaatcccagcactttgggaggctgagttgggtgaatcatctgaggtcaggagttcgagaccagcctggccaatgtggtgaaaccctgtctctactaaaaatacaacaaaaaattagcctggcatggtgctgcacgcctgtagtcccagctacttgggaggctgaggcaggaggattgcttgaacctgggaggcggaggttgcagtgagccgagatcatgccactgcactccagtctggaccacagagtgagattctgtctcaaaaaaaaaaaaaattcagtgacatcctgtatttcatatgtctccattaatttaatatttgatcccaagtctgttaaatggaatctctaacctcctgtgtataggcagactgctatgggggcatggtataagagctcaaatcccaagagtggcattgctgtctgggtgtgatttcccaaatggtgaatgcctcttggtaaaattgtaaacaaaacaaagtgcaatcttcctttgatgtacatagtaattgccttcctctaaaattctgtgtctatcataactgttgcagaaatactttgtgattgtatgcaaaacaaaggcagattctagactcaaataattttatttttctaagttttttatttaatcatttttttttttggagatagggtcttgctctgtctcccaggctgaagtgcagtggagcaatcacagctcactgcagcctcaaactcccgggctcaagtgatcctcccatcttagcctcccaagtagctgggactataggcacatgccaccatgcctggctaatttttctgtttttgtttattgtagagatgggatttcactatgttgcccagactggtctcaaactcgggctcaagtgatcctctggcctaggtgtcccaaaatgctgggattacaggcatgagctagcacactcaacctcaaataattttaaatattatgcagggactttcaaaaatcttgcagggatgtgggaaaattctcatgcagagctgccacatgcattgcaagatgactagcttcattggcccctgcccactgaatgctggtagctgcctccaaccattatgacaattaaagatggcccacagatttccaaaatgcttcctagagaatgatgaaatccttgttgaggaccactgtcttagactaggagtcttgaaattttgttccccacaatctctaaaagaattttgaaaaatctgtataccttcttatacagtttaaagcagatgtctaaaatttatatatcaggccgggtgcagtggctcacgcctgtaatcccagcactttttgaggccgaggcaggcagatcacatgaggtcaggagttctaaaccagcctggccaacatggtgaaaccccatctctactaaaaatacaaaaattagctgggtatggtggcaggtgcctgtaatcccagctactcaggaggctgaggcactagagccacttgaacctgggaggtggaggtttcagggagctgagattgtaccactgcaccccagcctgagtgacagagcgagacgccatctcaaataaataaataaataaataaaataagtaaataaaatttagatatctgcttcttaatttaagtagttataaaagatgtaaattctggaatattgtgagtattagcctttttaaaaattaataaactttattttttagagaagttttaggttcacagaaaaattgactggaaagtacagcgaatccttgtatactcctttctcgcacaggcacaacttcccctactatgaatatcctgccccagcctgatgcatttgttacaatccattagcctacattgacacatcattatcacctcaagtccatagtttacattagggttcactcttaacgttataccttctatgggtttggataaaattttacattgtccaaactcatagatgtacattgtataatgacaggtatccacaatgatagtatcatacagatactatttttactgccctaaaaatcctatatgctctacctattcatctcttcctccctgtaacccctgacaaccactgttctttttagtgtagttttactttttctagaacatcatataattagaattatacagcatgtagctttttcagattggcttcttttacttcataatattcaattaatgctcctcaatgtcttttcatggcttgctagctcatttctttttggcgctgaataatgttccattgtctggatgtaccacagtttatccattcatctgccgaaggacatcttagtggcttccgcattttggcaaatatgaataaagttgctataagcatccatgtggaggtttttgtatggacatacattttcagttcatttggataaataccaaggagtgtgattgctagactgcatggtaggaatatgtctagttttgtaagaaactgccaaactgttttccaaagtggctgtaccaggagtgggtatagctcagaggtagagcattcaactgcagatcgaagtggctgtaccattttgcattcccaccagcaataaatgagagatcctattgcgtcatgtccttgccagcatttggtkgtatcaatgttttggacttttgtcattctaataggtgtatagtaggttgttttaattttcaatttcctagtgacatatgatattgaacatttttcatgtgcttcctggccatctgtagatcttctttggagaggtacctgttaaggtctgtagcccattttttaaaatccagctgttttttttcttattgttgagttttagagttctttgtatattttgggtagcggtcctttatcagttgtatcattttcaaatatttttcgcccagtccatgtctttttttttttttttttcgagaaagagtttcgctctgttgcccgggctgcagtgcagtggcacgatcttggcttactgcaacctctgcctcccgggttcaagcaattcttgtgcctcagcctcccgagtagctgggattacaggcatgtgccatcacacctggctaattgttgtatttttagtacagacagggtttcaccatgttggccaggctgttcttgaactcctgacctcaggtgatccaccaacctcggcctcccaaagtgctgggactacaggcgtgagccatcgtgcccggcccccagtctatgccttgtttcctcattctcctaacattgtctcttgcagaacagaagtttttaattttaataaagtccaccttatcaattgtttctgtcacggttcatgcctttggtgttgtatctaaaaagtcaccaccatacccagaagaaacccatctgggttttcttctgtagagttttatagtttggcattttacatttacatatagtttggcatttacatttgatttttgtgaaggatgtaaggttatgtctagattaatttttttttttttttgcatgtgaatgtccatttgttccatttgttgaaaggtctatgtttgcttgcctttgctcctttgtcaaagactggctctctgtatatttgtctgggtctatttctgggctttctgtctgttccattgatgtatttgtctgttctttttgccaataccacactgtcttgattactgtagctttatagtaggttttgaagtcagatagtgtcagttttctgacactttcttctccttcaatatcaatttggtttttctggatctttttcctttccatataaacttttatttttatttttatgtattttttaagagacagggttttgctctgtcactctgaggccctacttgagctcctggaggtaaaacccacaaaagtatttgtcccctggcttcttgaactcttagacttgtccacactgaggtgccagcgatttgtcagtttaaattttcctatcccagcactggttcctggggaggtagctctgcttgtgggtttctgctctagtaagctaatattctctctatctgcctgtttctctctccaattttgggagtagtggtttgccctgtgacctcagttctctgatggatctaagaagacctgtagatttgtcagtttgttcagtttttacttgttgtcaggaccgagtggccacttttaagctccttacctaccagactggaaaccagaaatccaatattgacattttaaaacaaaattatgggccaggcgcaatggctcccgcctgtaatcccagcactttgggaggccgaggtgggtggatcacttgaggtcaagagttcgagaccagaccagcctggccaacatgatgaaaccccatctctactaaaaatacaaaaatactagccaggcgtgcacctgtagtcccagctactagggaggctgaggtgggagaatcgcttgaacccaggaagcggaggttgccatgagctgagattgcgccactggactccagcctgggtgacagagtgagactccatctccaacaaataaataaataaatacataaataaaaaacaaaattgttaccccatcactttaatgcatctattggcatctaaatactataatgctttgaaatatatcatcaacaatttacaaaacatataacaagctattttttaacttttaaatatttataagtttcattttttccctcaaacttatattttcattctgcttctctcccataatttttcctaatgtgatgtgttttaatgtttgcaaatcttttagtgatcactgtatcatacttctctgaaacaaaaatatgtatataaattagagcataactaaccaaagcaccacattatatacactttgrtaaataattgttaacatagacataaatttggacagcaatgtatctcttaatgagatgaatagtatgtacctggagatgtacttatggatgaatataactgactgctagaatgaggcagggtttaacatcaattttatccctattttttccttgtcatagttataagtgctgaaatatgttgttcatgcaaatgtgtagatagaatggaaggagtttgttacagtgatgccactcaattctttgaacttctgagttatttaccaaaaataacaacataatttattattattattgccatcaaaagtaattttaatggtctatcaagtgacaatttgttaagatcctccttcaaatttgttgcaagcaatggattagaaatgacctgacctgcaaaaggatttgttgccaagctattagaatcatttgctttttctctttctgggacttctaacaaaaggctatatcaagagttattaaatgactcttaattatatcccttattcttttacttgaaagcaacttattcaactagatatagccagaaaggatttgggaaatggaaatattagtaatttaattacatcattgccaatcaagtaatttttgataaaatgcttttatcatttgcttacaaccttttttaaaaaacaaaatctcagggctacagtttcagattactaactttgcagaaaacaccatccaaccaaattggcaaaaccagtcctcattgtcaaacctactaaaaacctacaaaccaagaaaatgtcttttcaattcaaatgcattaatgtattttcagttcaaatgtattaatgtatttcaagaagctttataaaaaacactcaaaaataaatgatagaatggattatgtaaaatagaatcagtcaagattaaaatgatgtagatctaatataataagttataaacaagacaagacaataaatcaatgcacttaatttgtagtaatgcaatgtaatttatacataaaattatgtgatatttatacgaagaagagtatgatttttaaaaggcatgttattccttctctaaatattggcacacgtgtgtgtgtgagtgtgtgtgtgtgtgtgtgtgtgtgtrtatatatatcaaattctagtgtttgccttttgggaataatcaaataaatatgaaaaacagaaatagttatctttagtagataccatgactaaacttttcctatgtatttaaagatagaaagggggcatatattattaaaaagtaattggtctggaggcagataataattttaytttttgttataaagaggtagaaaataaacattatagacaatgagatgaattaggatgacctgtaaatagaataaatattttatgatataagttgataacacaggtttttaacttcctttttaagtaatgcgtatgaagcctgtaaaaaattatgtaaatgttttacccatgtgtctattccaatgtatcttgaaaaatttgataattctagaaaatattctagtcacatttctaagaagcagcagtaccagcctatatagctttggtttattgaagtgattttcaagtaaatagctggaaaaaagtgcttactcttatctacaagagaaaagccatttttaggattcaatatgagtgttaagaatagctgaaaaaatgcttacccttgactacatgaaaaagccatttttttagaattcactatttctttccaatgctccttttgctttgagttcttgggccttatccctaaagatccatgtgttttttgacaatagttgggagaagaggcaaagttgttgggcaaaaatttgcattattctccactctaccatattgagtttctaacactaggcttcacctgtaacagaaatgtgtgtaagacagggaaagacaggaagctttcataggttcatggtgctttgaatggtcactaactgagatttccatttggtttgccctgaaggctaaatcgccctccaccccttccaatgcaacatattaaggtttgggtggtgcctttcttttgtaaagtggagtaagcatggctttggacccagagactttcttgacctagttaatattaggaaagtgtaccactggaagttgaatctggacattgattcgtttaaaactagctgttcatggataccttttgaaaagtctatgtggctgggtgcggtggctcatgcctgtaatcccagcactttgggaggccgagtgggcggatcatgaggtgaggagttcgggaccagcctgaccaacatggtgaaaccccgtctctactaaaaatacaaaaattagccaagcgtggtggcacacgcctgtaatcccagctatttgggaggctgaggcaggagaattgcttgaacccrggaggcggaggttgcagtgagccgagatcacgccactgcactccagcctgggtgacagagcgagactccatctcaaaaaaaaaaaaaagaaaagaaaaaagaaaagtctgtgtgtgtccatgagggtatatgtatcgtagtttaaggagacctttatcttagactgtctttctggagaatgacaaaccaaccaacttaatggcagacaattctatactgaggaaagttagggaggtcttcaagaataggtgtcctgtgttgttggttgaaaggctggatcttgattactgtatgtgtggtcaacatgtaaaatgcttacagtgagttaaatgggcctgccatattaactagggtcccctttccatatgcaggtaggtttgctgtaggagttcccttgggtggagcgaagacttcactcatgaaaccactttggtcagggcaagtatggggacaagtatttggtagaaatacttggtatttgtcagaaatcatttattaaaggaccagaaactgtgataactggaggtactatagtctatttctcaaccttaggcagtaaaaggcaccacaatcgtcatggttttgccctatgattataacaccagcactttttttttttttttttgagatggagtctcactctgttgcccaggctggaatacagtaccatgatcttggttcactgcaagctccacctcctgggttcaagtaatcctcccacctaagcctccccagtaactgagattacaagcatgcaccaccacacctggttaacttttctattttaagtagagacagggtttcaccatgttggccaggatggtctcgaactcctgacctcaagtgatctgcccacctcggcctcccaaagtgctgggattacaggcatgagccaccgcacctggcccaatacctgcacttctaattttttaagcatgtagccagtaataatttgaaaattcttctatgcaagcttaccttgttggcattattttagtgaattgagactctccacttgtaaagctcttttttccttcattttaatttacaagtttgtgtcatttaaaaacaggccaaggaattaaaatttatactagtgtgtttttttccctaaaaaaatttttaaagagtcaccaaatagccacctctgcttcgcaggagggcaataaaaataacaacagtaaacatactactactactatagaagacataaagattactccacaaacttgtgtttattttattatattttaattggaactaaatattctttaagagtcccttttgcctgactggtaggaaattcagtctcagtcttttttttttttttttctttgagacagggtctcactctctcgcccagactgaagtgcagtggtgtgatctcggctcactgcaaactctgcctcccaggctcaagcgattctcctgcctcagcctcctgagtagctggaattacaggcgtgcaccactaacgcccggctaatttttatgtttttagtagagacggggtttcaccatgttggcctggctggtctcgaattcctgacctcaaatgatccacccacctcggtctcccaaagtgctgggattacaggcatgagccactgcgcctggcctagtctcagactttactgggctctctttacctccccagagtcaaacaagtgtccacaatgtttatagaaacaggagcggggcctccagtcttcaacccagggctatttttgcactgccctcactgtctgagcccagataattactagaagggagcagattcattgcacctatcacagttcagtcacctgcagtctgttcccaggtagaactcccatgcctagggcctcacattctcatctctcttgaggtcctgccactggcatctgctgcttgtgggatccatagacatttggccctttccctgcaatttggagagatctcctctctcattgtcttcttctttccagaatacccctcaagttgctctggcttcaggaaaacagcagccaggaaggcaggctgtctactagcaacttgagctcacagcacctacaaaggagtctgtaccacggggccctcatacctgcttggagtagggggcagggaaaagacagaacacaaaatctgaaggaatagatccatgaatgatcgtattttcctactactattcgtaaatggctaacattattcagcattactctctgctcataaagatgatcaaatttaattctcaaaacttcaccatgttttaaagaccagataactgaggctcagagagtttgagtaacttttccggtaatagcagagctgggattagaacccgagtctgttgggctcccaagctcaattcctatgttgtattttctctcctgtgggagcacagtgagctgccagcataggttagttgcagcatgagttcccagatagctcaatgaattcatccatggaataccgctgcccagagctctccatctggttgtcagagtgcatttgccaagactcaagaacaacagtgctgctttgggcgtaattaatgtttagacaataactggtcagcatgttcagctgcttcttgaggtcactcctgggataggaaaataggaccctgtattggcataaacaggatgtttgttttctttgtgctctatcagtaggccattatctcggtcatgtagaagttataccaaattgctcaggtgcagattcagaaagggggaggatgtggcacggcctagttttgtgctgtttaaaatagaaaatggaaaatggatgaatctgaaatccatttctgctcaatatgattctcagggtggtattttaataaggtcctaaaagaacattcaaaaagtcttagattggttttgaaatcatattgcatggcccataaagaattcctgtttatggggtcaaaaactaatatagtcaataaatcaayacatagttattatggccctactacctgtccctcctgcccaccttcccccccacctctgggcataatgggtgatttaaagacaggcagagctcttgactcaagttatttataatatgcttcagggttttcaaatgttgtcttcatcagaatcatctctgaagcttgtcaaagacagagctatctgggccccactacagacttactgaatcaaaaatctcagggagtgagctgggtttctttacatgtgtttaacaagctccttgggtgattctgatactcatcagttttcaggccagacatatggttgatgttgttttggtaatataaacttttataatagaaaacatctcaggaagtatgtataggagatatagaggcatatatatatatatttatatgcatctagaagctcattagtctctcctttgcgtgtatgttgttgaaacgttcctgtaggccaggcgcggtggctcacgcctataatcccagcactttgggaggctgaggcaggtggatcacttgaagtcaggactttgagaccagcctggccaacatggcgaaaccccatctctattaaaaatacaaaaattagccaggtgtggtggcaggtgcctgtaatcccagctactcgggaggctgaggcaggagaattgcttgaacccagaaggtgaaggttgcagtgagctgagatcgcgccattgcactccagcctgggcaacagagggagactctgtgtccaaaacaaaaaaagaaaggaagaaagaaagaaaagaaaagaaaagaaaagaaaagaaaagaaaagaaaagaaaagaaaagaaaagaaaagaaaagaaaagaaagaaagaaaggaaagaaagaaagagagaaagaaagaaagggaaagaaggaaagagagagagagagaaagaaagaaacgaaagaaagaaagaaacaaagaaagaaagaaagaaaagaaaaagaaggaacctgtagataaatataaatctattattgtaaataataataaatatttcttgagtatctatatgtatcaggctttgttaattcattcaacaaatattgttaaaagcctactaggggccaggtatggtacatcagaaaatgaaacaaaagtccctgccctcggggaatttataggggaacaccaacaataaaactaaataagacagctacatgagacaagtgtcatggggagaagtaatgcagcagaggatcacaattcagaagagggtgggtctacttgggaggctgaggcaggagaatcgcttgaacccgggaggcagaggttgcagtgagccaagatcgtgccattgcactccagcctgggcaacaagagcaaaactctgtccaaaaaacacaaacaaaaaaagaagagggtagggggaaagacttgagggagaggagaaggtgagctctatgagtatttggagcacaactattccaggtttggagaatagtgcaaggcccggacctgagaagaagcattcaagaaactgcaaggccggggagctgggatacactaggagactggtcagggaggcaaggagtgggcagaggcrtaggtcttgtcagccactggaggactttggttttactctgaatgagacaggaagggttctgaatttgggaatgacacagactgacaagcttcaacaggctcattctggccaatgagaataggttgttgggagtgggcaaggctggaatcaggagatcagttaagaggctactgcagtcatccctgggagagatgatgaaggggtggggatgggagcagtggaggtgctgagaaaaacatggcttccgggtgtgctttgaaggcagagcctgcagttttcctgatggcttgggtgtggattatgtgaagggactacaaaagaaggttttccaaggatgctgagtgtgactgttggctgtgcttactctgtggccagatttgattctgggtgtgggtcatcattcagttccaagaaaatgatcatatttttgttcttaaaacacatcttgtgagattaggcagtatttgtcttcctgtgtctggcttatttcacttaacaaaataacctccagatccatccatgttgccataaatgacaggatttcattctttttcatagctaaatagtatttctttgtgtttatataccacttatatatggaatctaaagaagctgatctcatggaaacagagagtagaacagtggttaccagaggctggggaaggtagrtgacgggggacagggagaagttcatcaacgagtaccaagttacagttaggaggaataagttctggtgttctattgcacattagggtgactatggttaacaatattgtatatttcaaaatagctataagacagaattttgaatgttcttaccacaaagaaatgataaaggtatgaggtgatggatatgctaaatatcctgattagattattatacaatgtatacatgcatggaaacatcaccctctaccccataaatatgttaattattatgcatcaattaaaatttttaaattaaacacatattgtacacttaacattagtgaatttgttggctgggcacagtgcctcatgcctgtaatcccaacactttgggaggctgagaccggtggatcacttgcagtcaggagttcgagaccagcctggccaacatggtgaaaacccatctctactaaaatacaaaaattggctgggtgtcatggcacgcacctgtaatcccagctgctagggaggctgaggcaggagaatcacttgaacctgggaggtggaggttgcagtgagccaagatcacgccactgaactccagcctgggtgacagaacaagattctgtctcaaaaaaaaattagtgaatttattgtaagtacataatattttaaagaaaaaaaaatttcattgcaaagagcagtcagggtagttctgactggccaccgcaaggctctcactgggatcttggtaaacagggactgtacccacaatgatatttcttcctgacacataggagatcttaggaaagctgccttggccaaccaaaagataggatagtgaatagtatttattgttcagtttgtttaaaagcactttttttctaagttctcgaaacatcttttctaaggctgatagtggaagatatccccatttgagggttcaggaacctgagatctagaaaatataagagatgtggaggccgggtgtggtggctcacgcctacaatcccagcactttgggagcccgaggtgggtggatcacaaggtcaggagatcgagaccatactggttaacacagtgaaaacccatctctactaaaagtacaaaaaaattagcctgggtggtggcaggagcctgtagtcccagctactcaggaggctgaggcaggagaatggcgtgaacccgggaggcgaagcttgcagtgagctgagatggagccactgcactccagcctgggcgatagagcgagactctgtctcaaaaaaaaaaaaaaaaaaaaagagagatgtgaaaggatgaactctactagatcaaacctttgattttatgactttcttctcttgattgagtgacctgatgtgtagtgactggccctcaatccagggaacagaagtatatgtatttgtgtgtgtgtctgtctgtctgtctcacacttgggttacaaagtacaataatctagtaaaataattggaactgattgttcaaaccattcaaacctcctgtaaatcaggcctcttggttcctctccttctctccctcctgtgtctgttcatttggtcattttatttctgaatggtaattttcactgaggggtgggataggaaaataaaaagatatgaaagtcacattaggtagtgtagagaataattttaatagaagccacagtggagaatgcagatgtaattagcattaaaatgaaattctgaattgtcggtggattttagcttactttgctctccaaatcctttgttccctttaaaaactgagtacaattatgacaagcacctagcgaggctgtgcttcttttgtcctgctgaagaagccttgtctgaaccagggtggctgtgagcaggtcctgggccgagtaatggcatttaatgcatttgcctgttttagtttgcagtgatgatctcacccacaaattcaaaggtttcaccgtgatgaatgaagccgagagatacgaagctctcagacactgtcgctacgtagacgaagttatcagagatgctccctggacactcacgccagagtttctggaaaaacacaaggtacttctcattctcccacattctctaagtagcaagattagggagtctggttctgcagccaagactacggaaagcccaaagtctctctcaatttctaaaagaggtaacttcaggaactgtcatgtggaactgcttgatgtggcacctttcgtccgcccaagcccgaggactggtatcctctcacttctttgagtgtgggccctggakctaaaccgcccaggtccaaatcctgcctctatctcttcctagttgtgggaccttgaacaagatatctaaccacactgtactcrcttacctcaactgtaaaatgggatgatgttggtatcttccttgtggacgtgttttgaagatctaagaggtaatcttagttaagcagttagaacactggctggcccatagcaagagctccaaaaatgtcattgtcaccaccatcaccaccgtcattattgatgcttatcgattcacaggcattctttttcatgggacaaatgaacacacatcttatccagaaagtcacaggtcagcctttaaagaaagaactttatatctatgattttgtgaccctgagaatcctactgacataagatttttattagttggaaacatgagagattcttttgatctgcatcaaattatgtgctttgtatctccctaccagccccacattaggagctattctttccttttataagcagtacaaaaaaaataagattaagctgttctaagaattttcttttctatttttaaagccacgatgcagaagagaatagagaacactgataaatgtgcatgagtaatagctgaagagacaatttcccagtgagaataaaaagaaaaaggaaaaactacaatatgatttacttccagtaatcactaccacatttttactaagcatctattgtatattcaacatgtgctaggcattatgggggatacttataatgataatgatggctgtaatttattgagtatttaccatgtgcccggcactgtgctaagggccttgtcattatatgaattgaattcaatctcacagctaccctgagaagttgttattatacattggagaggaaaaggaactaagtttgagtactaagaatagaattaataataataataataataaacatttattgaggatatactccgtactaattgtttttcagcatttttacataattatgtcatttaatccagtgattctcaactggggtgagtttgccctgaggaacatttggcaatgtcttgagacatttggggttgtcwcagctagaggggtgctaccggcttctagtgggtaaaagctaagcatgtgccaatgcacaggacaactcccgacaccaaagaattctccagtcccgaatgtcactagtactgagcttgagaaatcctaattgaatctttcccctaacttatgagttatatagccagcaagtagtggggcagggaatcatactactctaaactatctctaaactacctctcaagtatttaactactgctactctaaattacctctcaaggtagagtgaaaccccattataaagggcttgttatacagggctttaaaatctaggcaaggagtgtttgcttgatgttgcaggaaacaggaataaagatgagcaggcatgaggatgaccagaaaaaaacaaaaacaaaaacaaaaaaacctgtttaaggaggataccccatgtgacagcaggatggcttggagaggagggggcctacagtgaggaaggccagatacaagttggtgtcagtaatctgggtgaccaggtcctggatttggtgtagttgcaatggagagaaaatgatgggcacacacctacatatgcatgtgtgcacacaaacacacacacacacacacatcccagcagaacctagggtgagtgaaataagtagagaaaagaggcttattccaaggtttgggtctccccaagacccaaaataaataaaataaaagtgccattggaaggggtcactcgttttcaggaagatgaattaaattcaggacaggacaggacaagatgatttaaagtgacagcaagtggtaaaagagagggatgcagtgggaattaagcccacctggcctggtgccctggcagcccgctaaacatggcctggtgccccagcggcccactccagtctttaagccttgggtaaatctaacaaattttctagtttcagcaccttatgtcccaactgaagtagtaacatgtggcctgcccacctcacaaggtggttatgaggatcgaatgaggaaagagacaaattccttttcacagtataaaatgtgacctaagtgtgagtgcccattgccatcaatgggacaggaaatgaagatttgggttcctcatcataggagggatgataaaaattcaaagaattaatgagttctctcaaggagaaactttagatgcagaaggacagaagaccaagaaatcctactctctggggtaggacaagaaagagggaccagcaaaggagagaaaccaaaacatttattcttctagttcccattatctcatagaaatgaaaatagttggaaatacatttcagccaaggattcaggtctccactataaatgtaacatacaactgccttattttgaaaaggcattatgaagtcaccattccccccttcaaatctgcagacatgcacatccatcccagtggtgacatcactcttctctctcttcaacagattgactttgtggctcatgatgacattccktattcctctgctggctctgatgatgtttacaagcacataaaggaagcaggtgaggcattyccctgtgctcacctgtcaascacatcacaataatcaggtgcaataagagacatctgtctgccctgggacatctgcagtgtatacaaacagggagttacaactttaggtgtcccccaggcrgcttctacaagccactgttagcatgtgctaaggctcagttatggcacagataccatttaggtatttatataggaatgaacctgagcaccaaagtgctcaacttcaggtctaaggcttaatttccggggtcatcagacgaaaagtgcaggaccccattacttaaatggcagccattttcctcattcataattaagtcttcacaatgagattattggatactcccaagaaatttccttccagaagcaggtagataactggctagttaataatctggactccttctgtccaaagttagtcctgccatatttctagtgtcatcttgtcacatgttagtaatattatcaggtaccatatgtggaggcaaaaaaaaatgggtaaatgttttaatggcttggcttattttctgctattttactatctaccatgcatctcatctataggcactgtaggtacacccatgcataccttcctacatacattaaaccataatctggcaggtgcagatactatagtgagttaccatatgcatagggatttcaagaagtctagtgctccctgcttatactagagccattgttgacatgtgccatcagagccatcttccccactcctggggaccaatgagactccactcagcttgctcccaccatttcccactcagcctgctgccactacagccttttcttggtactcatggaccttcagattcttgaggtaggatgggctcctaagggtcactgacccaggctcctatctccttcttggcatcattgccagctcctggcagaactgatgcttttacattccccatgatggagaactccctgccttgtgaggcagcccgttccatcttggatggttttggctgtcattgtttaatatatgaatcccctgagtgcatctataagccaggaattgtataagagaaaatgaataagacatagacctcacccttgagagagagcagagacagacataaataattacccaaaatataaccagcctgtggcagagtatatacaatacagcaggccagggcagcatgttcgaaggtgggactgtatgaagcacagcgtgtctggagaaaataaacatgttaatgtagtgtagggtgtgtggaggtgggaggcagagatggagactggcaggacaagctggttgaggcttgcttccatatgaagttacatggaaccaaatactgttctgaggcaggggagtgtcgtgatcaggtcttttgtgtgggaaggagcaactggggggccataagtggtttccataactaaacttaactaggaaaccccatttccacagctgacagaaaaaaaaaatacacttgacatgtgaaatcattcagactcttctaggtttgtacttagactgtgtagagtaaactttttgcctttttctcctgaggtgatctaagtttctggagcactctggcctggcatgggatggggatctttagttgtgaggtctcaagacctgcttagccatcagccccacttaccagacccctgtggcagcctctgagactctgtcatctccccactttggcctgagactgtcacctccccactttggcctgtcctggccacagcatctgccgcaggattcccttccctgtgctataggtgtgctgcccagcagtcatgctgatcttaaatcttggcttccttccatattcctctagagagtccccaggaaatttaaaaactgtcctccataatctactagagggcaagggaaaccaggcaatgtcagtaagccatgtcaggccctgtctgacctgcccgccatgttggcctctgtaaaactatttctttccaaaattcctggccataaacaaggtgccagtggccctgcactgagctttctaaaggggtctctttcctgcccctgcccctggtatttgaacctgagtcagagcaagggacagaccgcactcctgttctctcatttctgctgtccgcytcccaatccctctctgcactcctcccctcaactcccagaggtgcttttcttcttcctggagagcagaaaactgccccttaattaatttcatgccttcccagggttaatatacactccagggcttatagtcaaacattctgtaccctgagtctactcagcctctggttcttaatagttcaaaagacacttctgggatttataataccctttttatactcctcaaagcttggctcttcctagtggaattcttgcctttcttaactcttctttttaaatgagccttaaaaagagcctgttttagaagttgaaggctgaacacggcctcctgtactctcagcttcatctgcctccccctgaagtcatcgagttctcagtgtccatgggaacagggcctcaggacagacatgatccctagaaatgaaaacaacattggatactattttgaaaaattattgttacataaaatgtatgtattctccctgatggcatttttgttggttcacactccttgtgggccagcctgggaagctccatgccatcccctgcagggctggtggtggggactgtaccatcctcttaggaaggacttcctgagaagtcaagagcattggataatgggaggcctgacattctcaagtctcaatcttgtttgtgaggagttccaaggaaggaaacctcatacacttcggacttggaagtctgctctggaactggagaagaaactggcagatgcctcagttacatcaagatgggttacagcatggcgtgattaatatttatttatttacttactttacttacttaatttatgagacaagttctcactctttcacccaggctggagtacagtggtatgatcatagctcactgcaacctcgacctcctgggctcaggcgatcctcccacctcagcctctcaagtagctgggactacaggcacacaccaccatgcccagctaattttaaacttttttgtaragtttccctatgttgcccagactggtctcaaactcctgggctcaagtgatcctcccacctcggcctcccaaagtgctgggattatagctatgagccaccatgcctggcctgataaataccctttaaagtcattgtaagatctgaactatgagccagctgctcctttcctaaaattgccataaggatttgttatagaccagtgcttatgaaacttagatatgcctcagatcatctgtggaatcttgtgaaaattcagattcagattcagtaggtctggtggggccagagattcccatttctagtgagctctcaggttgttagatgctgtaggtccataggtctcacttacagtagcaaagatctggaccaggcattctcatccagctgagttatccccagggtttcttgaatcagtgtttcctgggggcagtagttccttggctaccttatagtgtataggaataagcatttggtggcagttttctttctgggtgagtggctgtcagtgagctaagaatatgttgctttcctgatttggggaataaaatgtcaagttccagttgtttaggtgtaggaacaagtccaacatttttctaactctagcaatccagcatccctattgttgcataagaaagtgactcctaaagttagtgacttaaaagagcctcttgatttcactcatgattttgtggggcaggattttagcagaggcttggctgggtagttcttgcttggggtctctcaaacagttgtaatcagatgttggtgggggctgtggtcatctgaaggctcgactgggctggggctcccaggtggtacacttacgtggctggccttggatgctggctatgatcatggcrctcagttgcagttgccactggggcatacaggtggcctcttcatgttgcttgggcttctcacagcatggcagctgaaaggtaatatctagagagaaagcaatcttgacagaagccacaaggcttcttctgacttagtcgtggaagtcacacagagttacttttgccacgttcatttggtacaagcaagtcactgaggccagcccagattccaggggaagggaattgggccatctttaatgcaccacaatgccctttccaaattgaatagtcaggtagcattttacttgccctagtagcacaggctaagactcgatgtaacttttcctatgtgcaaggacccttccttgtgctccatcaaatctgctctgctgattccttagcaggagggagaatcacagtaatgatctatttgggacccaggtagagaaggccagaattcatcatgggagaaagatgctcagaaatggcctcagcatccatatttggctttcatactcaaatcatggcttattttgaaagtcaaaagtctctttaaatgaaaccagagatatcaagggcatgacttaagctttacaacactctgctctgcttgtcagaactatgtgtcaaaatcctctagcaaagctggatgaaaagatggagcttaaattaaatagactgtaaggtccacattactcatcaccattctaatattgcctactactgttgaaagtttccttcattaacatgtgctttgctgcttcttaaaatagctccataaccaaatgccgcaattctgaaaagcatgataaaaaaggttctctgatcatgctcattaccgaatatttttagcagagcaataattaggatttgaaggaagccgggtatctcattatgtcaacagaggacttggcttctttcagagacctacctcccaaccagccaaagcaaatctctccctaagccaaatctactttcagttactcaaacacagagacttcaccttctggcttcaaagaaagggtaagctcatggcatcaatgtcttacatgacttgctaaaatccattagtcactagagaatcgtcttattatttcagcaggaggggtgtgggtaaaatatctgcctgctgaaagatgggatggatttctcaccagaatgttccccactgttcccacaaaggtggggatgtcgtctgagggttcccccacccaccagagcctcctgcacagctgggtcaatttgggtgctatttatgttcgtgtgtttagatggttacatcttctgccttccatttggttttccgtgttagattcttccctcctagaaagtgataaaagaagtgtttggcctagtggcaaaccccaactgtcctctgaccatggaacataagaaactggatgttttgtctctaacatcagcagtgccactctgctactgatactataaatgtgcaaatgacatcaaaagaaagctccaaagagacaccctcattggggctgcaagatggaaacattcagagagaactgggtttggaagggcacttagagatcaatattcatctagtcattcattcaagaaatattcctatggtgcctgtttgtcacccagtgctgagaatgtagaagaggacgagaaaggcatgatcccttccctagtgtagcttatagtcaacaagacagttgttgaacaagttattttataaagatcttgctgtatttggagggaaggggagtggtccatgggaaggaacaacacaccagaagacctagtctgagggttgagatatttgcttgaggaagtgacactaaagctgaagcccagtggatgcccaggagttaaccaggtaaagattgtgtctgtggcagagtgaggggaggggaaccaaccctttcaggacactgaagaaacccagcatggctgggctgaggcagggtcagcctactgcacagctccacagaatacaacagcagtccccccctgcagttgtatagcaggggggccttggtttagggagtgaaagggagagggtctgagataaaattggagagaagcacagggaagagacatgcaagctactgcacagccaagttaaggatttgactctgaatccagagaagagcagaaagccagtggagggttttgagcagacctctgacttgcatttagtaagaatgctctgtagaacttgctctctgggttgaggcagacaaaaatgacattgctggagactggttttgaggttcttgctgtgatctttgaccaagatggtgttgaattggtttaggatggatgaaagtgagtgaattagggaaacatttaagaagtagattgggaacttggttggatgtgggaagtgagagagaaagaaatggcacagatgagtcccaggtcatcatgtccaatcacctttttctcagctgaggagactacagttaagtaactcgccttcagagggtttgagtgacttgcccacgtctacaaaccaagaacccagtgcccttgtccccaggctttgtccatactgtcccatgcctgatgcctctgactgagttgccgtaatgatatgggatagaaagatctcagttgccaacaacatgtcatttcagttcacaacagaagtgtaagcataaacctgattcttgcctttgttaatatttgtgacctctttatagctctatatctgttgatatacccacatttatctttgaagactttaaggaagttctattagaacttggcatcctctgtgcttgtttattttttactcagccccacatattctagatgaaagggcctttgagtggtgaaactaccatgtacagtagactgttcttaggaagataaatcatctaaccatccctacaggcatgcctttagatcagagacgacacaaatagtacactttttcttcttttcctttagtataatgtgagcagacttccttggagatgaagcagagttgctgtgatctaattcattgactcagttgttagtcttcatttactttctcactcaatttccatttattgagcaccttccatgtgctagacacaggggctgaggtgggtgctggggatgcaaagacagttaaggcactatcagtgctttcaaaatgttcattttctacatggagacaaatatttaattttttttgtttgtttgagacaaggtcaggctggagtgcagtggcgcagtcactgctcacagcagccttgatcttggactcaagtgatcctctcactttagtctccgaagtagctgggaccacaggcgtgcaccaccacacccagctaacttttgtattttttgtaaagacagggttttgccatgttgcccaggctgatctcgaactcctggactcaaatggtctgcctgcctcggccttcgaaagtactgggattataggcatgagccaccatggctggcccaatatttttgttaatgaaagataagttaggttctgaatgttgtggattctacctgatgacgtcagaaaagacttcccagaggcataaccttgaagctggactttgcaggatgaggaagagctttgcagttaatatgagcagggagggggtatccagggcagaaaggaaaggctcagcatggataaacagcaggggccaggcaagtacatggtatgtcctggaaacaggtctgggatgatgaacatgtagcatttaaggtagagaggaattccacggaactgagggtggaagagtcacttggggccagacgtaaagtcttcattggcatacccaggagctccaactttgtcctgtaaagggggaccattaaaggagatgggtcaactgaggtgatcttaatttttcctctatccgctcttttctacttgaacagggatgttcgttccaacgcagagaacagaaggcatctcaacatcggacatcattaccagaattgttcgtgactatgatgtttatgcccgacgtaacctccagagagggtatacagccaaggaactgaatgtcagctttataaatgtaagcatgccacctcaaaccctctgaagaccaccatgccacaccaccaccaccagtgctgctgtttattgagcacttactaagtgctatgcagtgttctccctctctctctctctcttttttttttttttgtgtagagatggggtctcactgtgtataatattttaagtttgatttaacttgtttttttttttttgagacagggtctcactatgttgtccagactggtcttgaactcctgggctcaagcgatcctcctgcctcagcctcctgagtagctgggattacaggcatttgccaccatgcctgtgcagtgtccttaacgctttgtatttattttctcatttaacccacacaataacccatgatgtattattatccccattttacagatgacaaaaccagtatctacaggggtaacataaattaaccaaagaacacaggtagtgagcttcacattttataaaggtgcttccttgcttccctcctcttaccccaaactctctctttagagtttttagacttgattgaagggtttctgggagatctgccccttgtaaaaggcaagagttatcttctgctgaaaggaaagggaggagggaagaggcaatgaaagctaaacccagagaaacttttttattctaacgttttaaaattttcatttgattaaggccttacagatgctcattagaaaccttaatggccatttttcattgtccaaagaaattacagctgcttaaataaagcctaaagtctttggcttccttttgtagttctaccatattgttcccacaggactgctgttagtttaataatagagcaactgttaaaacaatatttcagttctggcatacatgtgcagaacatgcaggtttgttacataggtatacacgtgccatggtggtttgctgcacccatcaacccgtcatctacattaggtatttctcctaatgctatccctcccctagccccccaccccctgacaggccctggtgtgtgatgttcccctccctatgtccatgtgttctcattgttcagctcccacttatgagtgagaacacgcggtgtttggttttctgttcctgtgttagtttgctgagaatgatggtttccagcttcatccacgtccctgcaaaggacatgaactcatccttttttatgtatgcatagtattccatggtgtatatgtgccacattttctttatccagtctatcattgatgggcgtttgggttggttccaagtctttgctattgtgaatagtgctgcaacaaacatacatgtgcatgtgtctttatagtagacaaagaacattaacagtgacttagattccctcaggatgccatttttatataataataataataaaaacaatctttaaaataagcaaaacaagctgttaaaaagcaaagagggcagcccagttgctggagatgatgttagtgattctgagcaactgtatttgcctgggctgtgaggtgccgatatctttgattaaaataagaaccctccgtacatacagaattctaacccccaaaatagacgctgtattttcaaaggatgattcatcttcaaagctagatacttaaaattacatgcagctataattatccaatagctcacacaattgatcattggtaccttcaaaataggaggggctcattaattgtgaatcgttgatcatgagttgtcctcacaaggcagggagtgttgagagtctaggctctgtaacttcatataagccgggcaacaaaatgtcaggaaatgtcggaaaatgtcaggtttgagtggcacyggaacaagtggctgaacataattcagtcaaagtgattatttagtatctgatagagaataaagccctggttatttcaataaattaaactgtctgttctttcaaattgaattcggtcaaccatccaarcatgtcaagccattttcaaaagttattgctcactctctttaaacggcgtttagataagccacttagctcaaggaaccgtgcaggcagttcggatgcactcrctgccttcctgtgacgacaaacctggctgcagttcagagatgaaatctaatgtgttgcatgggcgtgtagacaaatcacggaacctcagaggtgacagggacctgatgccagtcagtcacccagtccaagtccctcaatttagagatgaggaacgctgagcccagaaagggagcctggccaaggtccttcaggtcagggagaggtagaggcagcagcaactccccagtctcatgactcccagcccagtgctcattcagctattctgtgctgccctgagagccatgtatagtaactatttccagtgcagaatgaactgtggaaaagaatgatataaaggcaacagctaacatttgccaagaactcatcatatgctcatctaagtgttttacttggattatctcatttaatcctcatgatgggcctacaagggtgggtaggatgactatgtccaacatagaaatgaggaaacagaggcccagagaggttgaacaactcacctaaggtcacctagtaagtaacggaagacagagtgacctcccatagcacatatatgtatatatatagctctcagtagcaacacacatagctcatgccccagcctgaggctgcaggaaggtttggaaggtcgaaatcaaggactctttamccagttttgcaatattccaggtgtttcaaaaacttccgaaacacaggccaggcacagtggctcatgcatgtaatcccagcactttggaaggccgaggcgagtggatcacttcaggtcaggagttcaagaccagcctggccaacatggtgaaaccccgtccctactaaaaatacaaaaaattagccagatgtggtggtgtgtgcctgttattccagctactcaggaggctgaggcatgagaatcgcttgaacccgggaggcagaggttgcagtgagctgagatcatgccattgcactccagcctgggcaacagagcgagactccatttcaaaaaaataaaattctgaaacacaaaatgaactttagtcccacatagtaaagaaaaatgataagccttacccctttaggagaaacatcatgatttcatgggggaagagccacatgttattttcatggttttaatactgctctcatcaggtaacacagacaaatgcctctgccacttaatactaatgaaacagccaacatacactgagcatttactaaatgctggcctttgtgccaagcactttgcatgcattgtcacagcaaccctaaggtagggatgattattatccccaatttacagatgagaagactgaggtttagaggtgatatgtgacttgcccagcatacgatggtttccaagcacataagtagacattgctgcagaaagactataagaagaacaaaatctgagtctagagaaactatcagcacaaaagctttcatcaccaccaaggaaatcaatacagttaaattagcatagtggaaaatattacagtggaaattttagtataacacataggttctaaggcccagttaatggcccacttatttcaagcaatattgttttaaccatatcccagtaaaacagcgaactcaggcagcttctgaatagtcattgtgtgcacaattcatacttttgtctaagtcccagcagaattgaatggggttatttgcccaatatctatgcacaacaaaagacaactgtgtgttttttattctcctcttatataagtgaatccaactcaaagacatttaaaagaaagaagatattaaaaccacttgtagttccctttacatatccaaatggattaatggcagatgacttttcttacaagagatgtgcctttccatcaacctagcccttgggaaatggcaacatcttgactcttcaggttaggaacaaatacaaattggaataaaatatgacctttaatgtgaatgattgatctctctcatgtcctcttggataaatctgttttttttttcctgtaaactttcaccaggagaagaggtaccgtttccagaaccaagtggacaaaatgaaggaaaaagtcaagaatgtggaggaaagatcaaaggaatttgtgaacagagtggaagaaaagagccatgatctaattcaaaagtgggaagagaagtcaagggaattcattggcaacttcctagaactgtttggacctgatggagcatgggtatgtaatgatttcactttaccccacaatgatgagtgttttcagtttatcctcctttttatggagccactcaagggtgccccttatctcagatccactgcatgccctctactttaggcatcagcctgaatgacttcaagtccatgtcacttccttactgagtttctgctttactcgtcaatatggcacccagtagcacacaaagccacgtctggtttcagtttctagttcttatccagagcttggaagccatctggtgatcacttgagtgtctcttacttcaggagttgatgctgtcgctcatctcagtctcccagttggggatgatgaaactttgggagtacagatgaagtgggctagtggcagcacggagcttgtgttacaagacatggatcatgggatcttggatcaactactggcatttatgttttggggaggagaatccaaagaaatgtactctgtcagtcagtttttgttgtgaggagccctcctcttttactggttgcaagacagagagagaagaagtaggagtttgccctgcatctgtgcccatcgtgccctgattttcccctggtttttcatgacacgcaagtkttgggataaggcacaacagtctttggggactgaggacatgatctgaatcttaaaactgagaggaaatgtagagggtctccttgcctaaaatctgaacaactttgaatgataactatggaaagggaaaagaaaattctggaaacctccactggtactttattggtatttctattgtgcatgcccttcccaagtaaataccagtattgtcaggagagttgatgaggggtctgtaaaagagattcgaaaagtttactttagagacgctaaagggttgacgagggttgtatgaaagagatactaaaaacaaaatttcctcctacaacaaaaagaaaaaattccatttgatttctctgattttaagtagcctggatttcctattataatatgagaagtctctaccaaaatccactttgacttaattattttattgacgggttgtcactgctacctctgcttgtttgagctcattcattataggattatctaaaagtgaaacactcaattagtaatagaaaaagaacaatgtttgggaagttgggagagatgctttgcttaacacctggcagcctctaagtgattatagacgtgggtgttataggccaaccatgtcctatcggctgagtctgagaggggtgaaaggtttacaaggactgcatgagccttcaaagactcctagaaagagctggcaagagtggaggagccaagggctgggctccttttcattttccccaggcctgttaaaaatttcagctcagataagttaattcctggtacatttcttaatgtttttgtctatgcatggcactatgcataaagaagaacataaaaacagacaaagtacagaccctgttctctcgtctctatgacatatggtatgaaattttctatttaatctagtgtgtattttaatagttcacattttcacaactaatttccaggctctaaagaaacagctagtggtttttaatgaaaccatgtaggtgttcattcgtttacagggattcagaaacctgtctctgctgataagagttggtatagtaactcaagagggtggatgttttctccacttggagtgagtaaaggcagggaaaaaatgtaatttcccactttgggaggccgaagtggatggattacctgaggtcaggagtttgaggctagcctggccaacatggtgaaaccccgtatctactaaaaatacaaaaaaattagccaggtgtggtggcgcgtatctgtagtcccagctactcaggaggctgaggcaggagaattgcttgagcccaggaggcggaggttgcagtgagcccagatcatgccaccacactccagcctgggtgacagagagagactctgtctcaaaaatatatatatatgtgtgtgtgtgtgtgtgtgtgtgtgtgtatgtgtgtgtatatgtgtgggtatatatgtgtgtgtatatgtgtgtatatctatgtgtgtgtatttctgtgtgtgaatatatgtgtgtgtatatgtatatatgtgtgtatgtgtgtgtatatgtgtgtatatatgtgtgtgtttgtatatatgtgtatatatatgtgtgtgtatgtgtgtatatgtgtgtgtgtgtatatatatatatatatatatataatttgatgaaaactttatagaccttagtcatttcaggctcccagtgaaggtgaaatagtagctggaattgttcttgggagtctgatgacagcaagccaaggtgatttttaagaaatgaaacccagtttagagactggaggtttttctttttaaaacttgctattagtgtcaaaactgttattaccattaatttaccatatcagccagactaagacattactttttttctgttgacgttaaaaatacaggaatagttacaaggatgttaaacgccaagataagtaatttgcttttcatgaatatgctattattataataattccttatttgtgaatttgggactggaactcatttcttaaaatagaagatctgtattaccggcaaatacagtactgttacaaacaacccaaacttggaaaggcacaaaatagaaggatttaagatacaagttctggtacaatgagataggtatgcagcatagtatgtaacttatagtgggtattccacaaatgtttctgggttaaatgaatgtatgaatgaatggatgtatgaagaagacctattcacagaaccttccagcatctgcaaaggatttgtgtgctaaagcctaaatcccccaccccatatacgtgtgtgtgtgtgtgtgtgtgtgcgcgcgcgtgtgtgtatgtagacagatagatagatgataagcagatagatagccttagccttttattgcttatggtgctaggtacaggactttattacaacttggtgtttggtggatcaaattcagtacacagacgtggtgtgctttgcccttaacaatgttttaaaatttattttagggaaggcatgagctcttgtttgccatagtcacaccttgctccgctgctcctttcccctcccctaacctgactcacacatttatgcagcccatctggccccagggaatatttgaatttgctccttgtggtatagtcttttttaaagcagggtctcactctgttgcccaggctggagtgcagtggcatgatcatgactcactgtaacctcaaatttctgggctcaagcaatcctcccacctcagcctcccagatagatgggactacaggtgtgtgccaccatgcccagctaatttttaaattttttgtagagatacagtcttactctgttgcccagactggagtgaagtggtgtgatcatgactcactgtaacctcgaactcctgggctcaagagaccctcttgccttggcccaccaaggtgctgggattacaggcatgagccactgggattacagtgcctggccatagtcttttaagtctccccaagtgacctcatatttgacattaaggatgccaatataaaattgaagcccttacatgctatctctgagtagaaagtagtgatgatgatgatgatgatgatgatgatagtaaataagaaggtgatgatgatgatattgtctaaaagttgtatggcaggttgaattcttttttcaatgtccttgcacatttattctacccattttatttacttatttatttttatttatttatttatttttgagatggagtctcactcactctgtcaccccaggtggaatgcaatggcgcgatctcggttcactgcaatctctgcctcccgggctcaagtgattctcctgcctcagcctcccgagtagctaggactacaggcatgtgctaccacgcccggctaatttttgtatttttagtagagacggggtttcaccatgttggccaggctggtctcaaactcctgacctcaagtgatccacccaccttggcctcccgccacccattttaatcacacaggaaggtacattttatagataaatatatagatatagacaaaggcctacaaaattatacgatgaaactttcccgtggtctcacaggagctggtaggcggtaggatggagcctggggctagcctctttctcctggtcatgtctgtatccttcaccataggaatgtccacatgatgcagtcattttgcttcattttcctttggtcggggtgtgtcactgtagagaaactgaggtctaccaacatccctctaaggcctttgacaatgccagttgccagaattgtgcttgagaccaggccatctagatttatgataggcactctcagccctccactgtactgctgtctctaggctttctcagcaaacagaaagtgtggtatccatgcctattagttagcttttggtggtaacaaattacctcaaaacttggtggcttaaaacgacaaacatttattatctcacagtctctgagggtcaggaaccaggaagcagcccagctggatggttctgactcggtctttcatgaagttgcagttaagacgtcagctggtggccaggcacagtarttcacgcctgtaatcccagtactttgggaggccgaagcaggtgaatcacctgaggtcaagagttcaagaccagcctggccaacgtggtgaaaccccatctttactaaaaatataaaaattagccaggcatggtggtacacggctgtaatcccagctactcgggaggctgaggcaggagaatcacttgaacccgggaggcggaggttgcaatgactcgagattgcaccactgcactccagcctggggaacaagagtgaaactccgcctcaaaaaacaaatttgtgacaaatatattcatatattcataaacataaaatgtaccattttaaccttttttttttttttttttctgagactgagccttgctcttgtctcccaggctggagtgcgatggtgtgatctcagctcactgcaacctccacctcccaggttcaaccgattctcctgtctcagcctcccgagtagctggaattacaggcgtgcgccaccaccatgcccagctaatttttatatttttagtagaggtggggttttgccatgttggccaggctggtctcgaactcctgacctcaggtgatctgcctgcctcagcctcccgaagtgctgggattacaggcatgagccactgtgcccggcccattttaaccattttaagtgcacaatttagtgggattaaatggttgcattcacattgtcctgcaaccatcaccaccatccatctccagaacttcttcatcatcccaaacagaaactgtaaccattaaacaagagctccctatccccttctgcccccagcccctggcagccagccttctacttcctgcctctataaatttgaccactctatgaacctcatatgagtggaatcatacagcatttgtccttttgtggctggcatatttcacttagcatgatgtcttcagggttcatccatgttgtagcatgtgtcagaattttctttcttttgaaggctgaatgatattccaytttatgtgtacatcacatcttttttatccattgttccattgatggatgtttgggttgatgtgaacattggtgtttgagttctgctttcaattcttttgggtatatactgagaaatagaattgctggacaacatggtaattctatgtttaatttttttgaggagccgccttactgttttccatagtggccgcacagttttacatttccacgagcaatgcacagggatctaatttctccacatcctcaccaacacttgttattttctgtttctttgtttttttttttaaataatcgtcctaattttaggcactgctaatttttaagatttttgattttgagaaaagagctacaaaatatagtttgtggatctgcattagatttcccacctgagactttgacagtttaaaaaattttatctttttttaaaaaaagattgttgttgttgttgtttttaagacagagtcttgctctgtcacccaggctggagtgcaatggtgcaatctcggctcactgcaactttgcctcctgggttcaagtgattcttctgcttcagcctcctgagtagctgggactacaggcatatgccaccatgcccgactaatttttgtatttttagtagagatgggattttaccatgttggccaggctggtctcaaactcctgacctgacctcaagtgatccacccacctcggcctcccatagtgctggggttataggcatgagccactgcgcccggccccaaatttttatccttaaacaaaggtacaagtaaaatgtgaataaacatgaaaagtttcttattatgcaactggctaattacaagagaggtggtcatgagcagggggtcactctctgggtaggtgacttaaggcaagttcatttgcctctctgggacttagtcatagcatcagtaaatggggaaagtaagcatagctgccacatagggctgttgcgaggattacattggttcatacttcatttttaaaatctatattttttgagacagggtcttcctttgttgcccaggctagagtgtagtggcacaatcatgggtcactgcaaccttgaactcccaggctcaagcgatcttcccacctaggccctctccccactcaacctgagtacctgggactacaggtgcataccaccatgcccagctaagtttttcaaaattgtttgtagagatgggggtctcacactatgttgcccaggctgatctcgaactcctggactcaagcggtcctcccacttcagcctcccaaagtgttgggattataggcatgagccatcgcacccagactggctcacacttcaacgcccttagagcagtgcctggcacctgtgtcrggcaccgtgtaagggttagttgttattgatttggccagaactgaagcatgggcccttttctctccttgagtttcatcttgcttacccaagggccaaaccaaaccagatcgtaccaggaactttatcatttcttttcggcagataaaccagaatagatctgaaatactgaaacctttaaaggcatttgtcaagacatttattgccccactagatgttaagtacttctggtttttgtttgtttgtttttgtttttttgagatggagtctcgctctgttgcccaggctggagtgcaatggcatgatctcgcctcactgcaacctccgcctcctgggttcaagtgattctcctgcctcagcctccygagtagctaggattacagacacccgccaccatgcccaggtaatttttgtatttttagtagagacagggtttcaccatgttagccaggttgctctcgaactcttgaactcatgatccgcccgcctcagcctcctaaagtgctggaataacaggcatgagccaccgcacccggccgatgttaagtacttcttaaaagggaaaacttcataggagagaaatagaaaactactttcgtatggwcaggactataaatgggattattttcttgagggaaaacattataaatggaaacctcttaatacagtgagagactgaatttaaatacctttactcttggaaaatgccatgcatactcttccttatttgttatatttctaaagtgcttttcttcccaggaagctcattacaaactgtctcctgactgtattgaattccgctcctttgcaagggaaccacccttcaaaatgcaccagaaacagatcagagagctggcaaattgaggctgggagttattttgcatggatattgcattttatgaagtgcgacaccgttgtttatcattaaagattcaagttctttcatcccctcaggcagaatgttctcagctatgagcttgattcaaactatagtagacaagtcgtagatttcttagaaagtgaacttctaatggaaatcctgacaatccattaacagcaggagggctaatggctgccacagaaaatatacttaaagattacagtaataaaaacacatattttaaagtgcctgctagaagttcaagaatgtttttaaatgttgctgttaataatagaccaccaaatccttatagcatttgaatttgcctcataaatgggtttaatctaagggagtgctgttgtactgcaccttttttttctgtttgactttgaggggggcttgatatcttttggcagaattatcaatgccttaatggaaggtaaataattggtatattagcagacgtgtggaattttaaatctggaaaagacctgagcaatcagccatcatctgttattatatctgctagaggaaacttgggactctacaaagtaacgggctagagcttagaaaggaaaaatgagtgttgggggcaggcagtgctattggtgatgcgcctgtggccttaatagttccttaccaatgtcattattgtaacacctgcccttccgcctgatctccttgcrtgggttacatgagttctttcttcctactgtgatgcttttttatgataaaagtaatatatattcattatataaccattagaaagtaaagaagggactgaaaatcactcgcagtctcatcatccagagcagtctctctgttagcatttcgggttatcactyccatctgtttcccatctccgtatatgtacattccttctacaaacttgagatcatgcagaacatagtgttctaaaatcattttggctttgcagttgctcatgagtgttttctcacatgatgaaatattatttaagaacctgattctcctcatctgcttattatatcatcttggagttgtacaggtttttctaacctagttagagaatttgcagtgttgtgtgttatacattgcattgaatgtccatcatacacaataaagatttacttacatctctgattatctcctcagaaaatagaagtttttgcatctattgccaaattccccatcagaaaggcattgctgttttatcctcttaccagcagtaacatgaaggtagcccttttcctgagccctcactagctgtaacaaatttttaaaactttagcaatctgatatataaaatgtatcttatttcagccatttgcatttgttcgactactagtgatgctgaacagtttttctagctcatttacaaatttctcttgtgacttgtctatacaggccatatgttcatttttctactaagcttttcaccttcttctttttgatttataagctctgtctatataccgagatctatcatttgtaggtaaactttgcaaaaaattccmctattttttgccttttwtcttatttcatggtgttttttttttttttgaggtacagaagttttaaaattttgtgtagtcraatgtcaatgttttcctttatggtttctttctttgcttttatgctgacacccaaaggtatttctaaaacacagatytgatcagactccgcccttgattaaaatctttctgggtttcttgagtaggaaatccagtctccttgtggtgctctaggtccagaccattgccaccccatgggcatttggggttctggccacactaagcaacttagacttagtactccttacttagcrtgctctgtttagaaaggccatcctctactagcccccatggacccactccccatctccacccacctcttcctgggcattatcaaagacccagctgagacatgaccacctcttctaccctcttcttcccccmcttcctcctgtgtagcacctggtccccagaagatctctgtaacggtttgtaaaatgaataacccaaaggacaagcaaagcctaagatggtaaataggagaattggctttcagggccagttttgtatcaaaggattgaactgagtggctgggggctaaggctcaaatgtgagcaattgaaagaccccaggcagcacaggcaggatgctcaggagttggtgggatgcagcgtctgggaggctgagcagcaggcagcaggcacagtaggctgggagcactgggggcccagtggggagcttcagggaagggctcaattctgaaagcacccagcaaccatcacatgaggtcccaaactggtaaactgatcttaaccaccgaaacctcctcccaccccacagtcttccccaaactgggaaatggcatcactgctttccaatttcttggacccgagactgcagtcacttgattcccgttcctcccacaccccatgtcccatctgtcagtgagtcccgttggctctaccatgaaaacatagccagaccacatactgtaggattctattttgatgacattctagaaaaggcacaactgtagggacagaaaacacatctgttgccagtggctgggggaggggagactccaaagggtcatgagggaatttgggagctgatgggaccctcctatgccttgattgcagtggtggtcactcaactgtatgcattgtcaaaactcacagaactggccgggcgcggtggctcacacctgtaatcccagcactttgggaggccaaagtgggcggatcacgaggtcaggagatcgagaccagcctggctaacacggtgaaaccccgtctctactaaaaatacaaaaaattagccaggccgggtggcgggcgcctgtagtcccagctactcgggaggctgaggcaggagaatggcgtgaacccgggaggcggagcttgcagtgaaccgagatcgcgccactgcactccagcaagactctgtcaaaaaaaaaacaaaaaacaaaaaaacaaaaaaacaaaacaaaacaaaaacttaacagaactgtacactaaaaagggtgagtttattatacctcagtaaaaatatgggggaaaatatactaggaatcctgccatttttcagcacactgccatcatcccgggccgggccaggctccatcaccatcttggatttttttttttttctcttgagacggagtctcactctgttgcccaggctggagtacagtggcgccatctcggctcactgcaacctccaccttctgggttcaagtggttctcctgcgtcagcctccccagaagcttggattacaggtgcccaccaccctgcccagctaattttttgtattttagtagagaaagggtttcaccatgttggccaggatggtctcgatctcctgacctcaaatgatctgcccgacttggccttcaaaagtgctgggattgcaggcataagccaccgcgcctggccttggattcttattgcaacgggctcataagtgggctccctgttcctgcccccgcctcactgccatctgttcccaacacagcagtcagaatggtcttttgaaaacaagcagcagattgttaatcctttgctcagaattctccagaggtttctcttctcagaggagactgtacgtgaaactgccgcctgatatgtctctggcctgatctcccgcagtgcctccccctctcccttccccaccagctcgctccatactgccacgatggcctcctcctctcctgggacctgttgcatgggtcccctcagactgaaaggcagagttctcacaatggctgccaaggccctccatggcacagccctctgtgccttctctggcaacctcttcccaaccgcctccctcagctcctccccatctatcagccctcaaggcagccgcggtgccctgcctgcgcttcctgggtgtgcgttccatgctcctttcttggggtgctctgtctggagtgcgctgccctctgatttccattcacctggtccctccccttatctcttccaggttcttcactcaagaagcgttttctcagtggggccttccccgagcaccctgtttgcaatcgcagctgccctgctcccagccccacttgctatcctctcgccctctttttctcacagaccacagatccatctgacataccatattttgtttattgtgtgattcctcctcrtatctgtgagggtatgaggtcaggggttttgttttctgccacccctccagtccgtaggtcatgactacttgcctggctagtcagagacactcagttaaattttgtagatggaagaaaaaaaaggaagaaggaaagagtgttaagaaccagtggtagctgggcatggtggctcacgcctgtaatcccagcactttaggaggctgaggtgggtggatcacctgaggtcaggagttcaagaccagcctgaccaacatggtgaaaccccgtttctactaaaaatacaaaattagccgggcatggtggcgggcacctgtaatcccagctacttgggaggctgaggcaggagaattgcttgaacctgggaggctgaggttgcagtgagccaagatcatgccactgcactccagcttgggtgacagagcgagactctgtctcaaaaaaaaaaaaaagagaaaaaaagaaccagtggtgactgtaatcttctgtcactacccctgaatatcactcggttccttactatacatagtcttggacaacacgggatgtggtaygagtgtaggtttgtgggctcaggagttttggggtagtggctctcctgcctgccttacctttttgttttgctgctgcctcagattgcaaagttaacagatgccttctctccaatttatctttagaagcagatgttccaggagaggagcagccggatgctgcagkccttatccccgaagcagagccctgtgagcagcccaacccggagccggtccccttcccgctccccatcgcccaccttctcatggcttccactcaaaacctcacccccttcctcacccaaagcagcctcagcctctatcagcagcatgagcgagggggatgaggatgaaaagtagaggctgctgggaggcaagagccgcaccatgcaggatggggaggagggcgagagtcacagggttgcctgggtggtgtttgaagggtaatagtcacaggagctgcagctcagcagagagaccctgaactctgctaagggaaggtcttgggaccagttctctctcactctccgtacagctgaagagttgggcgaggtgcagagacttctagctggacaacctacacaaaccttagcgtctagagtcactctaaccttgctaaggaaggatgcagagttccctagagagacttgcactgatggggtgacttctgctttggtccttccaccacccyyaccaagtaaaccacctgtggcagcggctgttccctcaacctgctacttctgcgtccataagggtcctgcacgttgcctcccaccaccccagctctgccagaataaaattgtttccaatagaggtggcaaagtgcttctgaaatagtcgagaaaaagacagattccaacctcctcagtccagccactgagacctgatgttggaacgcatcagctccttccagttccatgaatgtggctcatagacaaagccttgctttaggctggttataaaaggtcatctagtgtgaaccttaactttttattcaaaggacagttttgtcaagaactccacgtaaggcctgatgtgctcctggttgtactttctcatcactggtttgacttcattgttttgcagaaattaccttaatccgtgggaactgcaacaaagaaaaacttcctaatatataaaaaagaggagctgctttgctttgcctccaggtttagcggacaagaaatgtctcctgaagcttctccttaaaggatgctattatggaatggcttttcccatttctgaccagttaacagtttcatagacctcaagtaacagtttgaggtatcaaacatagtataccaatagggggtgctacctgcacgtatctgttctatatatgctccaatatgtcatccccgggtgtatcccatgtgcaatatgagtatatagtggtggcattttataatagaccccactcctgcgctscaccataatactcctctgaaatccttggtctcaagaaacatytgttctcttgtgacttgggcactttgtcaagcttattccagattcctgtggaaacgttttatcccaaccaggaaattagtattttgttctcgtggcctcctataacatttttgggtgaaggagaactcaagactttttacagagaactgtgggctcagttatgatctcagcatctgaatggtctaggtagtatcaccattatctctggccctaggtttgccaagtaggatgaagactctaagtgttcctgctgagttgtccaaaggtcctgctccttagtcacctgtgcgaaatgagcagggagagttaaggcatagaaccaaactctttgggttattgtatgggtatgccagtaaattcagacacagagctggggtctgactgaatagaggcccaaaccagcaacttgtaggcagagcccagaatctcttgtgatagaaataccccttttcagaggccttgggaaccagccttctaggtgacaaggggacaaccaatgaaggaaggcggcatgtctttccccttcttgttggggttgaactacctccctatccacttggagatgagtgctgtctgctgtgaagcaaaactatgaggctgagctggcttggaacctctttgttcttggcactttccttctccaggactctgggaagcactcatatgggacagagggctggcaggaacatggcatgtgaagaagaaaacttctttttgcagtcaagggccacccagaatattgctcttctgagagggacaagggcctcattcttccatttggtctctgtcttccatcatgcactcaggtcaagccatgcaagtctgcctaccatttgagttagttggcacttgtagcagtgaaggatgaggccagccaggcaagggaaggtggcgggaacaagggaagagaaaaggaggaaagaagttcctggagggaggaaaggaggataaagaaaatctgctctcataaaaccatttcaggacctcactttataggtgagactctcttgggaaggcctttgtgcccctgctccatggcccagggcagatagattcacttttacctgaatcttatactctggagcaaatagtgtatcaggctgactatacatttgcaggccttacacgccatactgacaggtgccacttacgtgactcatcagataatgtcaccattgctgccaattatgggaaataactaatgcctattccagggatgagcccaaaccacacataaatgggttctaaatctcaccctcctaacctgcagtgagtccccccgttccaccctcttgaggctgcaaatctactgagaaggaatgggaaggattctacaacccaacttttgatactttttggccatctctcagtctctcccagcccctacccccacaccacctccctgctcccaggcagagaccgggttgcactttgttagggccagcaggtcaactgtaatggccaagagtgagttaaggctggaatgagaaatatgccccaagcttggaggggtaagcaggaataacacaaagcaaggaaagagattctttttgccctagtgaggaaaggaagcttcagaatgagggctggaggatagcaacttaggactgcagaagggggcagcttatgaagatgggagaaagtgggactgaagttgtaggggagcaggagggtagtgattttccgcttttctttctttctttcttttactttctttctctttctttctctctctctctctttctttttctttctctttctttctctttttctttcctctttttctttctttctttttctttctctttcttccttctttctttcattcttctttgttctttcttctttctttcttttttttttttttgagatggagttttgctcttgttgctcaggctggagtgcaatggcacaatctcggctcactgcagcctccacctcccaggttcaaggggttcttctgcctcagcctcccaagtagctgggattacaggtgcctgccacgacacccagctaatttttgtatgtttagtagagacggggtttcaccatgttggccaggctggtctcaaattcctgacctcaggtgattctcccgcctcggcctcccaaagtgctgggattatgagcacgagccacggcgtccagccgattttccgctccctttcaagtgttaactcaccccctgacaggtgaagagggaagggttccttttacgcacaaccaaggttagcaaatgcccatgcaggatatggggtccctgcctctctggttgcttcatttcagcacttctatattagctgcttatggggaccctaaaatgaactggtcacccctccaccagctaagaaacaagggtgggattgctgtgccataagtcacactgaacgacttgcttctggcaagcatgctcctgtgtgtcaggaccttaccaaggcaaagaaatgccaggctcaagaggagcaggacgtgagacattggcctggcttctaacctggtctgagtggaagagacacagcttagggatttcagttttgctcttaggctactagatactgttatttcaccccctgagggagggacaggaagagcacggatttattttctctccgtcttcagtacttattttagcatctagtcataccccagggagagatgcgagacggtgtcactggctcagctgaagcagatgagcccgtctctagcagagatgtgcctgtttcttaggcatccgttcagcactagtcttggccatcagatttttaaaaaagaaatagctcatgaggcatttgcaacttctcctctctagacttctttctagttttcctctgttgtgtcactgcgatgtgtccmgggacaaagccataagtagagcatacatacttaagactatgctgtacatataagacaagacctgtctgggttaaagcacgaccttatgcccaagcatttactctggtgctgaataacgcgaactrctggaatcagcctcccccaactctgcgcgccccctgcccccctgctcctatcccattcttgctctcaaatggaccacaccattctcaactcgtttataaataaagggatgcagaattgcactttcgtgtgtcattgtcatgtttcttaagtgtgctgctgtgtgttcctatttatgaactagctcaatggggaaaaatacaggcattgcagcagctgtcctggcccaccggctggctctgcccagctgtggccccagcccttcagaaggatgtgactgtgcaccgtgcagagcagggcaaagccttggagttgccaaaggccccacatttgacttgaaagctagttaggaacagcaccacgtggagggaagctcacatggtgaacccagtcaggaccctgcattgtaggctccactactaactgactttgtgaccttggcctaaccttttcacttctttggcctcaaggaaattatttctaaggtctcctttgcctgtaaaggtctctgaatgtatgaggcaggctgcattgccccaagcttctaccagctgtgatgctgtcactgaacgaccatgagaaagtactgaactctcacgggagaggtggtcttccagtcccctggggcctccacagccgcattggtgactggtttcatgccttcagcctccacacttctagcatcaagataaaaggctctagagttccatccacttttcttatcttgtcacttgacggaatgcttcccaagtgtacctaaactttgggaagtggccatttcaaccacttttccatctttggggaaaaaaagcttctttgatcagctagacacagatagatgggggtggacgcactaaatctggatcccaaatgtcaacagctaaggcagatgtcaatattctgagaactgtgctggtgccctccactcgccaaattaaggaaattccattaactccatctggagaggttgcgctttttgaaatgaccacagttctgacattagcctcgggtccagaataaataaagccaggctggtagtcagcaagggaatgaattttaaaatggaatacctattattcgtacaccatactatttggtttcaccacatagatcaaatgcattcttgacaggttgtatttcaagcaacagttacaagtttcttcttgacttccatgatgcctcagacatgttctcaaggggaaaacaatcagttacaaggtgtactaaaacccatatttaagaaccttgatatttgcccccaagagaattagcctttgttaatgaacataattcctgggggaaaaggtacactatcaaaagtgttcccacacatatcacacacacacagtcctcttgtcttggagtcttcattggtaactggagttgaatgtttaggcaacttctccaggtattcagcaggaactattagattaaaaggactcccatagagatgcttttgagacagagtgtgacagttcataagcatcaaagtatacttggtgatcaacttctttaagaaaccatcaagtagaaaccaatcaagagtaaaatctgaagatctcattaagagcccaaatatctgtagctgatagaagccttatgttagtcttcgacacgactataatgtgtattctagaaaaggcaccatattgactaaatatcagctgcagttgaccaaaatgtgagaaacttggagaaatggtcagagcagggttgacatgtactgttcctagaaacaattttcttttattttttgacacagagtctcgctctgtcacccaggctggagtgcagtggtgggatctcggctcactgcaacctccgcctcccaggttcaagcgattctcctgcctcagcctcctgagtagctgggattacaggcacacgccaccatgcctgggctaatttttttttttttttttttgtatctttagtagagatggggttttatcatgttggccaggccagtctcgaacttttgacctcaagtgatctgcctgtctcggcctcccaaagtgctaggatttacaggtgtgagccaccgcacccggcttcacctataaacaatttctattctccttaactttataatctttcttgagtggaggtgaaataattaagctacaagcttcctgtactctattcataaagagttctgatggagggattagctacaagtaaaatatttgatctgtaaccttcgatttaaaaagaattgatgattctctacttgaaagagttggagtactttaccctttccacagggaccttttcaacggactatacttgcaaatatccctgtcactctaaaatgtccaagtccaaagaaaacttgtcatcatctgccatrtgcgtagcaggacatgacccattacatagcttgagaagataaccagtctttttaatctgtttggtagtcatgttccactgggaatatgttgacaaaatgccatttaccagcctgatcacagacccaccttaacaccactgagtcactgattctttttctatttgtttctatatctggtacccagggattaatgatagatgaaagaagtggaagaggtgtgtattcgtttcctactgctctaacaaattacaacaaacacagaggcttaagacaacacaaatttattaaattacagtcctgaaggtca

SEQ ID NO: 94793 - DNA, 94731 bp, Homo sapiens
  misc_feature (1)...(94731): n = A,T,C or G
acagtggtcgaaacgctcaagtttatttatgctgaagaaacttaagtaggatccttcttagtatcctcacagtttcataacacattacttcttctctacagtaatatttgctttaaaggttttaacagtttctgtttgcaaaaagtattatcagttggacaatattaaatggcatgtttacaagaccaaaaatgaaagtcctcaaaagctacttattttaacataaacttgcatgacaaatagtttccagtgcaacaacctgtcatgttctgcaaccagccttttgtcagagttttgatcctttaacacttacctccttccccgtttttttcttctttaagaaaacaaacttacacttgtgtattagtttacaattactgtaagcaaatgaccacaaacttagcaacttgaaacaccactcatttatcatctcagttctgtggttctgaagtccaggaacagctgaactgtgttctcagctcagtatctcacagtgctaaaatcaatatgtcgatttgatttcaagctggggatgtgttctcatcacaagctcagagtcctctgccaagttcattcaggttgttggcaggtttcaattccttgcagctataggactgaggtacccatttccttgctggctgtcagcagggtgacatcctcagctccttagaggctatcttcaggtcctagccacctggtgttctcatgacatggcagctcacttcttcaaagccaggaggggaatggaatcatataacataatgtaatcacaggagtgattatcccattatattcacaggtcctgctcacttcatgcagagcatgtacaccaaggggtgggaaccagcgtgccattgtagaattctgctttccacagtttgctttttctgctgtccaaaagtgaactgaggtccatttatttttattagatttgatttctctacttcttgcatatataatatgaaacagcgaccaggtatggcggctcacgcctgtaatcttagcacttcagaaggccgagtcaggcggatctccagccaaagtgtttgagaccagtctgggcaacgtagagaaactctacaaaaaatacaaaaaaaattaactgggagtagtggtgcgtgcctgtagtcccagtgactccagcgactgagacgggaggatcacctaagtccagggaggttgaggctgcagtgagccatgatcacaccactgcactccagcctacgagaaagtgacaccctgtcacaaaaaataaatacataaataataaataaaaaacacaaacttttgtcttaactgagaggagcaagatggatgagacatacagtttgctaatgtgggaaaatgacatgagttttgcttagtcatcacaaaatggaatcagaagtttgaaatacaatacttcttgctcagttctaataatgaacgccaactctgctctggttcaagacatgtaatggtatttgatattgtttgaaacattacagatacttaatttttttaaatgaaagattttccaaagtctgataactgccaacacaacacatacacaacaatgctatacattaattatagaaacaatatgcagtcaaaggggaagttcagctgggtctctaatgcttcattttaaaaaatagatctgaggcaaataggataggatgttcacatttgctaattatggatagcagtatataagtgttattattttctctttttcatgctttacataaagggtcagtggatcactatgatatacgctgacacattccttttcgcaaaatctacctttttcctgtagcttccttaggaatagtaagctctgagtatatattcatgagaaaactaagactcagctcttacaggggtatgtatgtttcagagtgttcctgaacctactagtgggtgcctcagtggtatgccattactaaggtatctagttccattttcaatggcatttcggatctttctggggcaaagtaactgcagtgttaagtcatgctctgagaagcactctcgtacctgaaggaaatcttacagggtggattacaataggtttccactaaaagctttccctacttaccaatgaaaagcaggttaaagtggtattgctcattcccgttatgggaagttgggccaatttatgatgtaggagcaaaggatcacttctcatgactcaccaccctagtcactgtctaacacgaggtctcctcaagtatgttttgagagcactaagtctgtggaaagctcacggaaattgaaaccaaaccaaaccaaaaccccaaactcaaagttaccatagtcaaatacatttaggaaatattcgatcaaacagctttatctcaaaggaatataataggattctttctaaaatttatttgtgttttacaaatgtatctgatcacaaaattatttctttccaaagatgtcttttcactgctttgagaaacatgctctaacaagattatctctgatttttaaaatctttgagcagccagagaggaagctgatctttcgaaaagtcatgctgacaatcatgggcaagctctccttacctactaattcattggctctcaaagcctgctctgttatctccagttcctggctagctgtttctggatgctaaaataaaaagaagcacctcctatttctttcttttctctttgctgtttgttgaaaataattagagacagattatatgaccgtggctttcccctgagtatattgctggggttattcaaaaacattcctgctgcctgatacctgaactgacatacacactaagtgatgtatttatgagtggcaggtcacaatgcaattgtgtaaacgtttgtagaaaaagcaggatccaattcttttacttaagctgggaaatggtttggttagacagaagagagaaaagctaaaagatctgcttgatatttacattttgtcctgatagtaaggagctactaacgtaatcatgtgatgaagtgtggcttatttgggggacaataaaagccatgatagagactaaagggtgaaatatttgatctatgtagtcagagcaaattacagagggctgtggatgctcggattaagagtttacctttagttctctttttattggagcaccactgggggtttatgagttagggtacaggcttcctcaacctcagcacaattgacatttttggccagataattctttgtaatgggaaggaggggaggctctggcctgtgcattacaggatattccgtagcatccctgcagctacctactagaggccaggagcatctaccccttatcaaattaagacagccaaaaatgtcatcagacactgccaaatgtcccctgcgaaacaaaattgttgactgattgagaattaaagagtagagaatgatagaataattggtgtttgagaaggactgtccagctgtggttgtgcagaataaacaggatgttaggacaagagcctgggagaatatattagaggctgtctctttaccttaggtatggtatattgtaacagtaagagcctccaatgaagtacatttctctgtatccctgttttttttgtagtcccttcccacactgacttagggcttggccatgtgacttgccaatgtgacttgtcaatggaatatcagcaaatatgacacaagctaaagcttgaagagcacttgtacactggggcttactcgcttggaacattgccaccatgtgacaaaactcatgctagcttcctgaagacacatggcccagccaacagccagcaccagcttccagaaaaatgagtgagactctataaccatccagccccagttgagtcaacaagaaaaccacctgagagatcccaggcaagccagcagacaaaccacctagctgagccctgcccaaattgatgataatggaattatgaacaaataaaatggtagcacttttagatcactactgttgttatgcagtgataaataactgatatcggaggtctgaagtatattaatattggtagaaataagaataagaaaaatgcatgcacaagacatttggaataatttgtgtgttttttgtttttgttttgtgttttttgttttgagacatagtcttgctctgttgcccaggctggagtgcagtggcgcgatctcggctcactgcaacctctgcctctcaggttcgagtgattctcctgcctcagctatccaagtagctgggactaaaggtgcccgccaccacgcccagctaattttttgtatttttagtagagacaggctttcaccatgttggtcaggctggtctcgaactcctgacttcaagtgatccacccacctcagcctcccaaagtgctgggattacaggcatgagccactgtgccaggccaattcgtgtttcttgatgactcttcaatgaaggggcttagggaaagggcaaagcaggtcacagaacataagaattcagaaaaaatgagcacaaaggtcagagtaaaaattcaggaataaagttgtgcaagcaatcttcaaaaaagcacttctgcctaagcagttaaaaacatgaaagcatctatttttaaagacatagatatccattagttgctaacagtataaatataataatagttcaaagatttagtttaataagtatatttgtaaagctttaaaggcattaccaagccagctacttttaaattcatatggaaaaatcaatctttagaataaacaggaaagcacataagctcaaaatcaataacaacttacattgcactaatgataagattcattgtattagctgtccaactgtatacaactatattcacttagcaattaggttgctaagaccaggacttctaatggaatgcctctcataatttaccagttaaattttcagatgggggttatcagtagtagttacagtttaatagaagctgttagtgttgaccatgtttattgtacaattcaagaggaaatagttccccagatgtttagcacttagctttatgtttaagaacactagcctagtaggaacgtgtcagtaatatcccttacttaatgatcacatttttaaaaaatcaaagtaataaacgataaagagaatccagaatgagataaaagaaaaatacagagtcagaaagtctaaaatgtggaggaaatggataatgtaaataaagtaaaaatgagccaaatatatcttcacaggctatgagaatcgcctaaaggcacggttacataagccgtatgacagactgagggtctcctggaaaaggatggaaaaagtgtttaaaaggatcaaaatgggtggattttaaagatctcatatccattaagcagtgttaaagaaacaatagtattgtcgaaaaaagtgtttaaaaccaaagggtaacctacctttggatatgtaatttccataaagtttgtttaagtaaaaaaacctacaaaacgacctcagtctttgtttaaacaatgctgtctgccaaacgattttgtttatcaaattttttctcaggttttggagacaaggattgagaaaaaatgtggaattggagatctggaagatctgtgtttaagcagtgggaccttaacgttagacgcacaaaaatgcgttaacgaaagccagtaaaattgagaatggggtcttctggtaaatcttgtactttggtttgtaagaaacttctatataaagaagtttatcaagtttcgggagtaagataataaaatgcacttaacccattcggaatcctacccctacctaccttacctctgtgcggttagcttctgacgcgcgcgccagcacgttctgtggagaagcggagcgctgggctctacctgagcagcgcttacgccgaagggcaatgctccccccgaatcccagttccggccagccaggtctcccccacctgcgcggcaagcagcggtggactccggggcgtgggaactggagaagcggtggcgcgcgctcctcctccctggctgggcggagctgcacccgccgggaaagtggcgagagccacctcggcgcttgggcgctcagtcgcaggaggcgctccttggcggtgcctggagcccgggcgcaccccaccgctcccgggacctgttgggggctggcccgaaccgtcgtcgaagggagccgctcggccacccccgacgttcctcgccccgcccgacgttccctcaagtggccgaaccagccggacgagccaaactcgccgggcctcccggcggcagcaggtggccccgtccttccagggagggccctgcgccccgcggcgctccggagccctctcggccgcccccgccaggcgggatggaggcggatggggacggagaggagctggcccggctgcgctcagtcttcgccgcctgcgacgcgaaccgctcggggcgcctggagcgcgaggagttccgggcactgtgcacggagctgcgggtgcggccggccgacgccgaggcagtattccagcggctggacgccgaccgtgacggcgccatcaccttccaggagttcgcgcgtggcttcctcgggtccctccgcggggggcggcgccgggactggggtcctctggatcccgcgcccgccgtgtctgaggcggggccggagacacacgacagcgaggaggacgaaggcgacgaggacgcggcggcggcgctggccacctcgtgcggcccggcgagtcccggccgggcttggcaggatttccaggcgcgacttggggacgaagccaagttcattcccaggtgcgagtgtgagctgggggcgggaggttattctggcgcttcctgcttgcttcttcccacttacttgcaggtgtgcagacccaatggcccccccctagtcttctctgtgagttgcttgtcttccttcacctactcgctttgacttttccaagatccgctagagttaagaaaaaggagtcagagagtcagcgtttggggagaaagttttacgtgctgaatcctgagcctgcaaagggcggcgtgttcattacaggagctctcctgaaatctgcagctgctggcgccccgcgcgagtttaggcgcgcgcgccacatctcaccgcgtcctggttacgtcaccttctaccccaggccttaggctctcaccccagggctggggcccgggctgtttgccaatttggcgtcctctgtaatagttttctgatttgtcgttttcctaagactatagaaaaggaaactttgttgggcttttacattgctggacacaaatattgattgatgtacctgctaggcattttacagagttcacgcatttaattttcataacatccctagaaggtaggctagcttatttctgaacttagacctagaaattagacagacgttaagggacttgcccagttaaacagcagagatttgacccaaattttgtgaactgaaaaactcactttttatgtgacggaataaaatgataaaatgacacagtatattctctgctcttactgctctgacagaaataacgtgtcaagtcacggacttaattatcaggaggtaaggggatgcctgcaggtgggatttcagggcctggagggagagaggctcagattttctttttgagtttcgtttgcatttgtccatgccttggtgtggtgggtgtctccagctgctatttttcacttcatgccccagcgatacacacatttcagtgctgttaagtgtttttctgctttatgtttggattttagctgaaattttgctgagctctggctgtcgttattaagacgctctgaaaggcatcattttggttggcagtttgcacatctgagacagaacattgaaaaggaagtatccctggaaggttgtcagtgtgcttgttcattggaagccctcacttccttctcctcccaacttctccctccagcttggaaagtaaggggaatattgggcatggagagtgactcactgccatagaagggttgtgtagagaaagtgggtgtgtaacgatcttttctgttatttacaaatgagttactccccaaccagggaagtagcaaaatttaaacactgctacaacctatactctttatttgagtcatctttcatctgtaacttagtttgggtgcagctagttaaaaaaagtaagaattttaggaatgaggcagggtgagtccacatcatattggatatgatgtatgcatacatgtggatctgtttttcacagttgtctagtctcagcaacaaatatttcacacacaaccttaaatgattgaaatgacctgggtcagtgtacaaaccaggaattaatattattggtggaattattattatcatgttgcctttccaaattcttcagagattactacatttaatgggcaccggtgtcacctggtagacttgtgtcctaagcctcacctcctgatgtgagattaacaagtacaatatttgtcttcctctcatgttcaagtggaagagatctaaactgagttgctgcatcagattgttaccatggcagccatccgctgttttggtaaattggattaattctacttcacttcctcatacagctgttgaccttttcttccttccatccaaatgtgatttaaacacttttttgttattgataatgctgtcggcattatttcagccaaatgtattccataagcattaccaattgcctgccatatgccaaatactggcttaggtactgtcctaggttgctggggacaaagagaaggatagtatgtagttcatgccctcaagatgctcatggtgtggatgaaacatttttccagcaacttcatcgaagaacatttaaaggcaaagaacatttgtaggaaactccctgtattgtggacatagcccaacagacggctgcaagcaagaattttctttgaagtcttgagcttttctttaaaaagtgattaagttgttcatctttgtacacaatattttgggacttgttttcatataaaatagagtttcttctgaagggagaattgtctttctaggaaggtgtgccattccaacttgtggctttgtttcccacctggcactcaatcttatccctggggacagtctgccccagggctatcctggggagtgttcacatccagtttgagaggaacggatattaaataggaaaatgtttggttcctataaaggcaaagcatgacactgttgattttcatttaaagaatctttcaagcaaaatattaagcaattttgggttaaactcgccagtcatcagtaatcgtgatgttagagggaagataatattgcatcatgaagggatgaaagtagcttttgggatatgtgtcattgttgagttcattttctcttagaaaattgagggactttttgttttgaaggctgaggaaggagtgtccaaggagttgtgtgaccgggtaagctgagcctggcagatatgaagggtctgcaaggtcaggatgggccttgaccacttcctggtcagtttgataaggtcagccaacaggtgaaggcagcaggacagtgtgatttagttacataagagaatttgggaggacaggtgctaccaggccaagaaaagtcctggaagtaggaagaaaatgtgtgggtgttgagggtggaggggcagggcagagagccaacttataatgtagccttgccagtttctgatgcctgggtcattgtcttggtgaaagggagtttcatactcaggagatactcagtaaatgtttgccaaatgaatagaataaatcagtattctttgattcttgtttcatatatctgcattttgagagagagtgtagttcatgctgtgagcattttctccacttcttttgcaggttctctcacttttttttttttttttcagttactgttgtgagccagtcttggtgttcaaagattgccaagagaaggaaataggctgtgtgtgtgtgtgtgtgtgtgtgtgtgtgtgtgtgtgtattgagcatttgatggatggctgagagcagggatgaaggcctcttctctgacctctagtcagagctgaaacttttcagttttttctcaactcccatttgcagcaattttgagtgttatctgtgaattgattcatgctgataaattaacttagaaaaccccacattctcacaaacaggaatgtgagggtgcagctggcactggaaccactgagggtctgtgagtgggcacaggtatcccaaaagtatccaaaggagggacagcctcaggtcaggtacctgagggtgtggcaggtatagtgatgggtgacctgccaggcagtgctaggctaggatttgttgagacgtcaaaatcagcaccgttagctgtttcacatggtttgcgatgtttctacatgcacgatgtcgaaggggattcttttatttggtaatttaaaaacaaatttaattgagaggaaccaaaactttccatatgtgaattgtatagagattggcaaaacggcttaccttattaaactcaagaggaaaggctcacccattggacagcaatcccatttaattgggaaatttttaaaaacaagtagctgccagtaggcagaggcgaagtttcagtattggtgagggttgcttctccatttccctttcttgggttctagtttagcccttttcagaatgattgccttgttttgtaatagtgtagttgcttcacagctcccttaatttacatgaaacggtgcttgacaagatagaaaagggagaggagagacagaggcaaagaaagacataaatacggccgggcgcggtggctcacgcctgtaatcccagcactttgggaggccgaggcgggcggatcacgaggtcaggagatggagaccatcctggctaacacggtgaaaccccgtctctactaaaaatacaaaaaattagccgggcgtggtagcgggcacctgtagtcccagctactcgggaggctgaggcaggagaatggtgtgaacccgggaggcggagcttgcagtgagccgagatcgcgccactgcactccagcctgggcgacagagcgagactccttctcaaaaaaaaaaaaaaaaaaaaaaaaaaaagacataaatacatcaggagtgagccggagagcaagagagaaggccagagatagagtggcagagggggacatgttgagagggagtgaaacacagagctcagatggaggggaaaggaagagagactgatggattccatcttgcctcagtttctcctctttccacttagtagaaaggtggccctgagtcaccttgagatgagagaggtaaatcagctcttttctctttgatctcagctcttgagtatcttccacatgtgagcatcttggtgctttgggatgtgtttgtggtatttaaagacgaatatatatatatatatatatgtatatatgaatatatgtatatatgaatatgtatatatggatatatatatgtatgtattttttcatgctcatggccagtaatgtctggttctcatccaagaagagaagatgtgttctagctttgcaacatggtggtgggctacacccaagtcctagatgaggttcaagggtgcttttgactgtattgggtatttaccttgagtaccagatttgggatctatcattgtgcttggcataggttttatggaagtttctttaccttttctggattctgaaccgggatcctaacatctgtgtctctgtttatgtctgtatctgtatctccttgttttctaactgttgctattctgtagctttttgctttttctctttaatgtgtcctctgtcacaattatgtgtatcattactctgctgagtgggagaaacctgtctcttgataactacagctcattattggtgtatacaaatgctactgatttttctacattgatttttgtatcctgagaattaactgaattcgtttatcaaagcttaggagtcttttataggagtctttagggttttctagatataagattatattgtcagccaacagagataatttgacttcctgttttccaatttggatgggtttatttctttctcttgcctgattgctctggctaggacttccagtactatattgagaaggagtggtgagagcgggcatccttgccttgctccagattgtagggggaatgaacctttgatccttcctcctgggccttttgtgaatctgtgcatgccttaggttttatgagctctacttgctgggtggtggccacttctggttctgatatttgaatttaatctcaaggtagtaatttctttttggctttcagattttggaaaggtattttggacttctagtccttagaaggctctcagtgttagccatctgagcagtggcctgctgtgaccctcagaattcactgattgctcagagctttgctctcagaatttgaagaaagatgatttattctgtccttctggtttgtgcaaaaagaaaaaggcttaaaaagaaaaagtcttaaaacttagtgttaccagggagactgtactcccagaactacagactcttctctagcttttcctcaaacctgaacttgtgatttattcttctccaaaactactgttaaattcagttacactacccctatctctttaagcgtgtacaaatcttcatctgtttcttattttctgcccaggttatccaatcttttttcatttgtacaatgaaagtagccgtatcatatggggaaaggttagtgtgccatggtgattccaagtgtgttttgaatcctttttctctcctaagagggtatacacagtatgccttcttgcttcatgtatcacttattacaatttaggtagcacttgagtgcagtatgtagtcagaagagggaaatgggaagagaatatttattctgagtgttcagggctgcctcacctgactgtattagtctcatatgaggttgtaaaatggaaagtaaacacttgtctgtctcccagagggaagttctaatggtggaatttatctatgacacataggatttctttagaattattttgtcaaacaaacaagttcattgcttcaacttgtaaatattcagggtcttccaaacgataactgcttttgtcagagtaattataagaagagtgaattttaacccttaaggccttagtctatatgtcttataaaaacaggatatacagctccagtagtgcaaatgtttctttgattctttctctagttcacccaatattgacattgcccttgacatctcactaggcactatatatatacacctgaccctgaccttgtttctcaccttcttaaatactcaggagtttctaacacctgaaggacctgggatgtggaataatgaatgggaaaattcctcctggctcaccaaaacaccactcattctggactatggatgtttcacatcgaatgtttctcaaattgggagccatagacccttcggggtccttacatatatctttgggagttttaggagaccaaatattcttattttcattttggcaataatgtaaaataaattgatgtgagctcattccaaatcacctgcattacagatttggatgacttttgtattacagatttggctacacaatttcaaaacctgcatttgtgttcgtgaggcatctcataacactgtgtgcattgtcatgggctaaaaaggaaggcagagaaacactttggacaatcgaggagggaggagccaagatggccgaataggaacagctccggtctacagctcccagcgtgagcgacgcagaagacgggtgatttctgcatttccatctgaggtaccgggttcatctcactacggagtgcgagacagtgggcgcaggccagtgtgtgcgcgcaccgtgcgcgagccgaagcagggcgaggcattgcctcacctgggaagcgcaaggggtcagggagttccctttccgagtcaaagaaaggggtgacggacgcacctggaaaatcgggtcactcccacccgaatattgcgcttttcagaccggcttaagaaacggcgcaccacaagactatatcccacacctggctcagagggtcctacgcccacggaatctcgctgattgctagcacagcagtctgagatcaaactgcaaggcggcaacgaggctgggggaggggcgcccgccattgcccaggcttgcttaggtaaacaaagcagcctggannnnnnnnnnnnnnnnnnnnnnnnnnnnnnnnnnnnnnnnnnnnnnnnnnnnnnnnnnnnnnnnnnnnnnnnnnnnnnnnnnnnnnnnnnnnnnnnnnnnnnnnnnnnnnnnnnnnnnnnnnnnnnnnnnnnnnnnnnnnnnnnnnnnnnnnnnnnnnnnnnnnnnnnnnnnnnnnnnnnnnnnnnnnnnnnnnnnnnnnnnnnnnnnnnnnnnnnnnnnnnnnnnnnnnnnnnnnnnnnnnnnnnnnnnnnnnnnnnnnnnnnnnnnnnnnnnnnnnnnnnnnnnnnnnnnnnnnnnnnnnnnnnnnnnnnnnnnnnnnnnnnnnnnnnnnnnnnnnnnnnnnnnnnnnnnnnnnnnnnnnnnnnnnnnnnnnnnnnnnnnnnnnnnnnnnnnnnnnnnnnnnnnnnnnnnnnnnnnnnnnnnnnnnnnnnnnnnnnnnnnnnnnnnnnnnnnnnnnnnnnnnnnnnnnnnnnnnnnnnnnnnnnnnnnnnnnnnnnnnnnnnnnnnnnnnnnnnnnnnnnnnnnnnnnnnnnnnnnnnnnnnnnnnnnnnnnnnnnnnnnnnnnnnnnnnnnnnnnnnnnnnnnnnnnnnnnnnnnnnnnnnnnnnnnnnnnnnnnnnnnnnnnnnnnnnnnnnnnnnnnnnnnnnnnnnnnnnnnnnnnnnnnnnnnnnnnnnnnnnnnnnnnnnnnnnnnnnnnnnnnnnnnnnnnnnnnnnnnnnnnnnnnnnnnnnnnnnnnnnnnnnnnnnnnnnnnnnnnnnnnnnnnnnnnnnnnnnnnnnnnnnnnnnnnnnnnnnnnnnnnnnnnnnnnnnnnnnnnnnnnnnnnnnnnnnnnnnnnnnnnnnnnnnnnnnnnnnnnnnnnnnnnnnnnnnnnnnnnnnnnnnnnnnnnnnnnnnnnnnnnnnnnnnnnnnnnnnnnnnnnnnnnnnnnnnnnnnnnnnnnnnnnnnnnnnnnnnnnnnnnnnnnnnnnnnnnnnnnnnnnnnnnnnnnnnnnnnnnnnnnnnnnnnnnnnnnnnnnnnnnnnnnnnnnnnnnnnnnnnnnnnnnnnnnnnnnnnnnnnnnnnnnnnnnnnnnnnnnnnnnnnnnnnnnnnnnnnnnnnnnnnnnnnnnnnnnnnnnnnnnnnnnnnnnnnnnnnnnnnnnnnnnnnnnnnnnnnnnnnnnnnnnnnnnnnnnnnnnnnnnnnnnnnnnnnnnnnnnnnnnnnnnnnnnnnnnnnnnnnnnnnnnnnnnnnnnnnnnnnnnnnnnnnnnnnnnnnnnnnnnnnnnnnnnnnnnnnnnnnnnnnnnnnnnnnnnnnnnnnnnnnnnnnnnnnnnnnnnnnnnnnnnnnnnnnnnnnnnnnnnnnnnnnnnnnnnnnnnnnnnnnnnnnnnnnnnnnnnnnnnnnnnnnnnnnnnnnnnnnnnnnnnnnnnnnnnnnnnnnnnnnnnnnnnnnnnnnnnnnnnnnnnnnnnnnnnnnnnnnnnnnnnnnnnnnnnnnnnnnnnnnnnnnnnnnnnnnnnnnnnnnnnnnnnnnnnnnnnnnnnnnnnnnnnnnnnnnnnnnnnnnnnnnnnnnnnnnnnnnnnnnnnnnnnnnnnnnnnnnnnnnnnnnnnnnnnnnnnnnnnnnnnnnnnnnnnnnnnnnnnnnnnnnnnnnnnnnnnnnnnnnnnnnnnnnnnnnnnnnnnnnnnnnnnnnnnnnnnnnnnnnnnnnnnnnnnnnnnnnnnnnnnnnnnnnnnnnnnnnnnnnnnnnnnnnnnnnnnnnnnnnnnnnnnnnnnnnnnnnnnnnnnnnnnnnnnnnnnnnnnnnnnnnnnnnnnnnnnnnnnnnnnnnnnnnnnnnnnnnnnnnnnnnnnnnnnnnnnnnnnnnnnnnnnnnnnnnnnnnnnnnnnnnnnnnnnnnnnnnnnnnnnnnnnnnnnnnnnnnnnnnnnnnnnnnnnnnnnnnnnnnnnnnnnnnnnnnnnnnnnnnnnnnnnnnnnnnnnnnnnnnnnnnnnnnnnnnnnnnnnnnnnnnnnnnnnnnnnnnnnnnnnnnnnnnnnnnnnnnnnnnnnnnnnnnnnnnnnnnnnnnnnnnnnnnnnnnnnnnnnnnnnnnnnnnnnnnnnnnnnnnnnnnnnnnnnnnnnnnnnnnnnnnnnnnnnnnnnnnnnnnnnnnnnnnnnnnnnnnnnnnnnnnnnnnnnnnnnnnnnnnnnnnnnnnnnnnnnnnnnnnnnnnnnnnnnnnnnnnnnnnnnnnnnnnnnnnnnnnnnnnnnnnnnnnnnnnnnnnnnnnnnnnnnnnnnnnnnnnnnnnnnnnnnnnnnnnnnnnnnnnnnnnnnnnnnnnnnnnnnnnnnnnnnnnnnnnnnnnnnnnnnnnnnnnnnnnnnnnnnnnnnnnnnnnnnnnnnnnnnnnnnnnnnnnnnnnnnnnnnnnnnnnnnnnnnnnnnnnnnnnnnnnnnnnnnnnnnnnnnnnnnnnnnnnnnnnnnnnnnnnnnnnnnnnnnnnnnnnnnnnnnnnnnnnnnnnnnnnnnnnnnnnnnnnnnnnnnnnnnnnnnnnnnnnnnnnnnnnnnnnnnnnnnnnnnnnnnnnnnnnnnnnnnnnnnnnnnnnnnnnnnnnnnnnnnnnnnnnnnnnnnnnnnnnnnnnnnnnnnnnnnnnnnnnnnnnnnnnnnnnnnnnnnnnnnnnnnnnnnnnnnnnnnnnnnnnnnnnnnnnnnnnnnnnnnnnnnnnnnnnnnnnnnnnnnnnnnnnnnnnnnnnnnnnnnnnnnnnnnnnnnnnnnnnnnnnnnnnnnnnnnnnnnnnnnnnnnnnnnnnnnnnnnnnnnnnnnnnnnnnnnnnnnnnnnnnnnnnnnnnnnnnnnnnnnnnnnnnnnnnnnnnnnnnnnnnnnnnnnnnnnnnnnnnnnnnnnnnnnnnnnnnnnnnnnnnnnnnnnnnnnnnnnnnnnnnnnnnnnnnnnnnnnnnnnnnnnnnnnnnnnnnnnnnnnnnnnnnnnnnnnnnnnnnnnnnnnnnnnnnnnnnnnnnnnnnnnnnnnnnnnnnnnnnnnnnnnnnnnnnnnnnnnnnnnnnnnnnnnnnnnnnnnnnnnnnnnnnnnnnnnnnnnnnnnnnnnnnnnnnnnnnnnnnnnnnnnnnnnnnnnnnnnnnnnnnnnnnnnnnnnnnnnnnnnnnnnnnnnnnnnnnnnnnnnnnnnnnnnnnnnnnnnnnnnnnnnnnnnnnnnnnnnnnnnnnnnnnnnnnnnnnnnnnnnnnnnnnnnnnnnnnnnnnnnnnnnnnnnnnnnnnnnnnnnnnnnnnnnnnnnnnnnnnnnnnnnnnnnnnnnnnnnnnnnnnnnnnnnnnnnnnnnnnnnnnnnnnnnnnnnnnnnnnnnnnnnnnnnnnnnnnnnnnnnnnnnnnnnnnnnnnnnnnnnnnnnnnnnnnnnnnnnnnnnnnnnnnnnnnnnnnnnnnnnnnnnnnnnnnnnnnnnnnnnnnnnnnnnnnnnnnnnnnnnnnnnnnnnnnnnnnnnnnnnnnnnnnnnnnnnnnnnnnnnnnnnnnnnnnnnnnnnnnnnnnnnnnnnnnnnnnnnnnnnnnnnnnnnnnnnnnnnnnnnnnnnnnnnnnnnnnnnnnnnnnnnnnnnnnnnnnnnnnnnnnnnnnnnnnnnnnnnnnnnnnnnnnnnnnnnnnnnnnnnnnnnnnnnnnnnnnnnnnnnnnnnnnnnnnnnnnnnnnnnnnnnnnnnnnnnnnnnnnnnnnnnnnnnnnnnnnnnnnnnnnnnnnnnnnnnnnnnnnnnnnnnnnnnnnnnnnnnnnnnnnnnnnnnnnnnnnnnnnnnnnnnnnnnnnnnnnnnnnnnnnnnnnnnnnnnnnnnnnnnnnnnnnnnnnnnnnnnnnnnnnnnnnnnnnnnnnnnnnnnnnnnnnnnnnnnnnnnnnnnnnnnnnnnnnnnnnnnnnnnnnnnnnnnnnnnnnnnnnnnnnnnnnnnnnnnnnnnnnnnnnnnnnnnnnnnnnnnnnnnnnnnnnnnnnnnnnnnnnnnnnnnnnnnnnnnnnnnnnnnnnnnnnnnnnnnnnnnnnnnnnnnnnnnnnnnnnnnnnnnnnnnnnnnnnnnnnnnnnnnnnnnnnnnnnnnnnnnnnnnnnnnnnnnnnnnnnnnnnnnnnnnnnnnnnnnnnnnnnnnnnnnnnnnnnnnnnnnnnnnnnnnnnnnnnnnnnnnnnnnnnnnnnnnnnnnnnnnnnnnnnnnnnnnnnnnnnnnnnnnnnnnnnnnnnnnnnnnnnnnnnnnnnnnnnnnnnnnnnnnnnnnnnnnnnnnnnnnnnnnnnnnnnnnnnnnnnnnnnnnnnnnnnnnnnnnnnnnnnnnnnnnnnnnnnnnnnnnnnnnnnnnnnnnnnnnnnnnnnnnnnnnnnnnnnnnnnnnnnnnnnnnnnnnnnnnnnnnnnnnnnnnnnnnnnnnnnnnnnnnnnnnnnnnnnnnnnnnnnnnnataaaaaatgatgagttcatgtcctttgtagggacatggatgaaattggaaaccatcattctcagtaaactatcgcaagaacaaaaaaccaaacaccgcatattctcactcataggtgggaattgaacaatgagatcacatggacacaggaaggggaatatcacactctggggactctggtggggtcgggggaggggggaagggatagcattgggagatatacctaatggtagatgacacgttagtgcgtgcagcgcaccagcatggcacatgtatacatatgtaactaacctgcacaatgtgcacatgtaccctaaaacttagagtataataaaaaaaaaaaaaaaaaaaaaaaggaaggcagaaaggtgggctgtgcattgagccatgtgttcacataatctgaaggtgactgacaacagagtgctggattttctgtggtctaaatagaaaagtgatgggagaatgggcttttgatcatagaaatgtgttcaagatagccatgtatgagccagtcccgcacggacattgactgtggagatgtagcttggaaaactgcatccccgtcaggttagctgactattgctaattctgatgtcattgattttgtaaatgtgtgtcgattttagaaatgtactgatgctgttggtacaaggaagtttatatctgatttatgtttgttcatagttaagtgtaatatgttataagcaatgtttaagtcaactctggaattcacaggattctttttttttttttttttggagacggagtctcactctgtcaccctggctggagtgcagtggtgtgatctcagctcactgcaacctttgcctcccgggttcaagcaattctcctgcctcagcctcccgagtagctgggattacagacatgcactaccacacccggctaatttttgtatttttagtacagatagtactgtgttggccatgctggtctcgaactcctggactcaggtgatccgccttcctcggcctcccaaagtgttgggatgacaggcgtgagccactgcacacagcctcacaggagtctttaataaggtctacatgttaatcaagtatgagaaatattctaatgggacttgaaatcctcaagaactatataggayggaaaacataagtgtttcatttctcaatgtgtatttatctcctctgtcatttaaattgagggcataacactatggaaaaagtaaatgttaaatctcccaatcctaaacaaggaacgtctgtgttattttcccacagaagaaactcttctcgccctttttcctatttttcattcattcattcattcattcatttactcattcattccttcacttaaacttttttttttgtatccactgtatgcccaggactgcacgaggcactgagtacttagaaatagtctcctgccaaaagtccaagttgcttggctggtttccctctattcagaaggtgatgacatcagtgaggatataaagtagcaagaatcacgaggtagatggcctgggtccagatctcagtggtggtcagaaatcaaacagaccagctacactcagggagtttccacccctctaccacagagaagtgacgccttcatgccttcttttgcaaggttgaattgtgccaaaactttcttttgtagtccagcatcaataggactgccggtccctgtcagatgacctccaagctccttccgctcttactacactgtgggctgtgattgatggaggagggtttacaaacgtggaggcctccagagccaggcaggtaatgctgacccagtgatgtggagtctacggccagtaagagcctctgctttatatgctgggaggaaagccacttctcagctcagccacttttcagctctggacagcagctgccatgcacgatgcaggtccaaatgttgacagtgatgctgggttttaagtgcaaatttccaattttgcatagctaaagagacagtatttccagtgtgcaacctgtgaatgtgccctggttaattcaaatgttaggtttgatctcattttgaagatccctgttgattcgagcatgttgttccatgacatcctaacttagaactttaatggtgttacttatttcccttctaagtttgtgggatacccttttgacccaatgacagtttatctttactttcttgtttgctcttagatgttattgtactttacagagttatctcactcaggctcaacagatgttgttgtataatattttctacttccaggttatgctgccctaatgggtatgtcctaggggaggagggctaagctgtgaatgcattgggatgtccaggatacctatcactccgatatttttctttctcttcatctgaagctggaagtacttggctgtcacagtttttaagatgtgtgaaaagtcaattggaatgaaatgatttgtaataaaaaataagggaatttagttataagaggtcatattttctggtattgtagtattgttttctttcattgttggaattctttgtcccttaggcaaaagttgtattttagggctaagaaatttgaacagccacgaaagctgtgtgtctgggttacttttcctctttttctttttcgttttttctttttttgttttgttttggagtagtctcataacaggttcagtcaagctttgttccttaaatgttctcacatgtatctgtccttgtcttccatttttaagtgaccaggcagaaacacccaaggtaatggcatgttctgagagccccttcccatcacgtgcacaccaagagcagccactatcttcaatttcaatttttaaaattttgttttggggtgtcttctgggaatgttcagccttgatgccctctgtgatcatttacaactgtaaaagtatggcacatgctcagatggccatttcgtcataatagtatctgatcaattatgtattttaaatgtctagatagaaagcaaaaaagtatgaaaggagttatttattctgaaatccgaatgcagtggtgaaagtatcacctattgttagctccctgtatctacctggtgcaaggatgaagggtttatgggaggtttaggcagcatttcctgatttgttgcccatctgcctagcatggtgatctctgccatttcatcccctgggatgacacagtcgtctcataattcttgcttctatcaaacagaattacagtctgctctgagctgaggtggaagaattcatgaagagccaacccacatttgtttagaaaatccattttaggatactcctgtgtcatgttttctgatgggaatgctgtaaactagtgttagtgtttgtagtgcaaaatactttttcttttcctccttggggatctcttggtatcgcatgtacttcaaactggcagatatggtttgcttggggatgctaatgaatgaattacagtgtaggcatttctgcttgaacacagtgtatacattccagaaaagcctagtgttctgcaaacatacacaaggcatatggaaaaaaaagtaggaatggtgcagacaactcgatatctatacttctataatgagaatactcaaataagcagtaataatcctaataaaatactagcacagtaaaaaaagtcatgcgagattcttaatagacatagaaatacagtagttcagaatacctgtgggtatcttaaaaatgataactattgggtactaggcttagtacctgggtgatgatgaaataatctgtataacagagcctcatgacacgagtttacctatgtaacaaacctgcacatgtacccctgagcttaaaataagagttaaaaaataatctgaaaaagtgtttaaacatgaaaatataggattttgcagggttttttttttttttccgaaggtgaaggaagcttaatggaggtgtagggttgtggctgcttagttagtggagcaaggacaaaatgcacaaggatctgagagaacccagacaacacaggtggacagtctgtgctaacagtacaaccacagtgcgaaacagcatcaggtccacactgcattcctctgtagcctgctgtgtgcagctgttaatggacttgcatttcagtggctgttacttgggggcacactgggaaaagtcatttctgctttagcatacttcatttactgacctagggagtgagctaactgatggtgcaggtacctgcattatggcagagaagtcctaaaaaaacatcttgagtccagaactcatgggaagctccagcaaggcacaaagacagaaatgaatgtcagattgattctgtgaacacagattcaaggttttgtgttggtctaaaaggataatgcatcacctctctcctaagagattatagcaaatgagctgtcttcaggataataaaagtgctttagtccacaaaagttcagaaatccattaggttgttagagtcctaatgaccctggctaaaatgaaaatatgatgggatagctgagcacttggagccttgggaagtgacctgccctgttgaatgatatttaaaattaaggttcttatcagtaacaattaaagttcttattcagctcttttcatcagtcctagcatacattcactgtgaagctggtacattggtctacattgattagccccaatgaaagtgcagtgatttaagacacttgtattagttagagttctccagagaaacagaaccaataagatgtgtgtatgtgtacatacatgtacatacacacagacacacatataaaatgtatgtgttatatatataccatatgtacacacatatctctttacatattatttagaaagagagagattgagatatattaattttagggaattgactcgtgtgactgtggaggctggtaagtccaaactctgcagggcaggatggcaggctggagacccagggaggggttgaagttgcagtcccggtgaaaaggtcatctgctagcagaattccctcttcctcctgggagatcagtctttgttctgttaaggtctttactgaatggatgagactcacctacccacattatggagggtaaactgctttactcgaagtctactgatttaagtgttaatctcatgtacagagtaccttcacagcaacatactcacatgtttaagcaaatatctggctactgtggcctagacaagttgacataaataaaattcaccatcatagccactaagaaagtttttcaaatattctcagttttgagatcacagagcgtttttgaatgcttctagcttgtaagtaacagaaaattcaaactatttgaatcaggaaaaattcctatacatatattatattcccccaccttccaaatgcctaaacactccacaacaaagtaccaaatttctatgtcaactttaaagttattaattttttttttatttcccaagaaaaggcttgccctacatctgcttatggctctgagatgcccctctgggaggtcttattattcagccttgttcctacccctctgtcttcaccctacaatcccactcttcatcaaaatactcataacttcaaactgagcacctcacagaagatacatcttggatttgggcagccatagccgtccagcaagccacacaaacattttgctttgctggactttcctgggcaaattcactgctttctggcttcccttcttcttctccttccttctcactccttccttccctcctttctgcagatgctctgtgaaaggaagacattgtgccaagaagtccaaaggctgacattttaatgaggaacaggaagaaattttttccagtaggaatgggttctatctgctatgcccaactactagtttttgtccccgagttggaagttactaacagggatgtaatagagagcacagggaagccagaagtattccatcaggtataggtcctaaagcagccacaagagagctgctagattcattattccgttcccagcagctcagcgggcactggtgttaaatcacgtcttctctctgctagtcaagggcgtttctagaagtgcaaactcttaggtcccaccgcagactcactgaagcatctgcattttaacagaatccctgaatagtttgtgtgtgtaataaactttgctgagaaaatgagaagcgagagtgtgggatgtggccacatctgctgggcagatgctttcaaagaggcagaaaagacccagaaaaaaaaatgctgaactgaggtagaagagataaacttcgctgacttcaaaattttgcctgggggtgcttctggttatttgatatctgaattttgagatgttcatgactgagtttaccttgaggatacagtcatttatgctccatcaagtattctgtatattttgtgaatgtattcttcaaagacaaaaccacatgcaaaaaaagcacacagaacgttaagtgtacagcttgctgagttttcagatggaatgcttgaataaatcagaatgcaggtgaagaaacagaacattttactacattgcagaagcccagggtccccccccmccaatcactgcagacccctctttccagagaagttattgtcctttgcttctgttttgatgttacatacataggttcatacaatgcatttggcttctttcagtcaccatgatgtttgtgagcttgtagtttaaaacttttattttcactgatgtagtctattccacagtgtgaaaataccgcaattgatttatccagtttactaaaaatgtccatttggataatttctgtgtcatggatgtcacacatagtactgcagtgatcatctgtcacaagtcttttggtaagcatatggacatgggcaacacattggtcagaaaaattgtttgcaaaatcactgaagctttccgtgctaactcagggtcatcatatgaagtctagctttatcccgggaggtagtagaatgatatccccagggatttgtggagatggtggttcagcttagcattttaagttaccgtgtggagtgtttgtccttgccrtcaggctgccaaatgacattttactattctcagtacttccttccttcctgggtcttttgtctgttgaagttttggaaaacaaattatcagatacattagaattgtgttttaaaagcactgtttgaatgtagattatttctaaaccaagcaggggtgtctcagaggctgtttttctttttttttctgactttccaacctccttttggattcttcttagtcagatacctgagtttcagatagctggagtgctgccatcattttgaaattataatattatttgtagttttactcctgttccatttttattcatacattaactcctttttcaattttgtttattttggagattcctcaagtagatgctgtagttctaaattatctttttagaaattcagccacttagagagataagcacaaaacatggagttatattattttgaatacaaataagaagtaggtgcccagccaggagtgggcatggttcatgctgaatgaatccactggagtctgtcagtcacttcatatgttggtcactgaaattatttttaatcctttctcttttgagtcttaggggaatgcttaaaaaactacacaccaagataaacaaatactactgctttgtggattctccttgtccactcaagcaaattattgtaataactttatgacaactttctatatagttcttgcatttaaagcaacaattaggcatttattcctattttctttagtagcttttgtattcattttgctgcccagagggtatgttattatccaagcaggtgagagaggagtgcagctcagaccacagaactggaaaccaagggaatgttaaaggtttgggataaaaaaatataaactgagataaatgtaaatatacagcttactgaaattgcttttccttatctgatgaaccagtgagttaagatgatgactcaattaagggaagactggtttttcttttcttgacttttcttgggggttgaggtcagcctctgttggcagatggtgtttgcagatctgaaggctgtttgctcttttagtgaactgtggctttgggaacacaaaagtggaccagtggcaggacaactgatccttgaataatgtgccaaagtcggattttaatgagatttttggctacctttttttaaaaacacacttcagaaaatcacccttccgttctgcagaaaatcaaatgaaaaaataattaaactttccagcaggttgctgggaaagcagtggagtggacagatgatgggcagtggggtctgtctcaggaggcttctgctttgtggagaatgtaccccaagcaccatggagtgagaccgggagcctctcaaagggtcttacttcactgttgaaatgtcaaattagagatgtcagcaacattttatttcaaaggggaaatgtgtttaagaaattcataagaaaatctctacaactaattttacttggtttgatacttttgatctatttttgtatgttttcataaaacagactgggacactgttattgatttatctttgtgtttgatggttgggtagcaaggtaggtaggtaaaaatcagtgattcttaaaattaaaagtagattataaaactcggtgacatgtcttttgggacactaaacaaataatatcacatatataaatagttttaacataattcaaagatgtcatagacaataatttcatgcttaattacattaactgtcatagaaaactaatgtaacctttgaaataggcttttaaaaaggccagagcaccgggcacggtggcgcatgcctgtaatcccagcactttgggaggcccaggcgggtggatcacctgaggtcaggagttcaagaccagcctgaataacatgttgaaactctatctctactaaatacaaaaaaattagccaggcatggtggcgcgtgcctgtaatcccagccacttgggaggctgaggcgggagaatcgtttgaacccaggaggcagaggttgcagtgagccgagatcgtgccattgcactccagcctgggcgacaagagtgaaactctgtctcaaaaaatatatatataaaataaaataaaaaggccaaagcaggttgtgtagaattctaacaaattttcttgccagtgttatgtatatttgagcataaggtttatttaactgtaaacaaaacgtgatgaggaaccaaacagttatctttccatgataccaataataattcagaattaaatgccaactatttaataatcagtggtaggtattcaatatayaatcagtgctaattcaggaaatatatttgctattgaatgaacaagtagaatgcacttatatattccagaatgtactgatttcgaaagagaaattgttctttactggtattcatgattctgtagtatattaataaatcatttggagattttagaatgacaagcaaatccttatcttttgtagaagctatggtgagttayctatgtatgcaatatrttgtctttgttgatcgccatagaatcatgtaatttaatttatttttggaactcacatatatgttattaacaaatataaataatattttgttaaaaatgcccccacatttattattgaagtatattcaaaatatattcargatttgatacattggtttagccattcagctgatgttgagattgcagcaacctcagcccacaaaaacacaaacctgaggtggagtgtattcatccatttttgtactgctttgaagaaatacctgagactgggtaatttataaagaaaaagaggtttaagggactcacagttccacatggctgggaggcgagggaggagcaaaggcacatcttacatggctgaaggcaagagagtgtgtgtaggggaacggccctttataaaaccatcagatctcatgagacttattcactatcactagaacagcaccaaaaaacctgcccccgtgattcagttaccttccatcaggtacctcccatgacacatgggaattatgggagctacagttaagatgagatttggctggggacagagccaaaccatatcatggaacaagataaaggggcctttgcatgtcagaaatagttccagataccagcaagacagacagtttcttgagttggacttattttcagctttcttagcatctgttatatggtaaatagtgggcgcatccccattgaaaacaatgtgaaaggagaaagggaaaaaatagtgaagaaggcagcagcacgctgaagactggtgcatgctggtgcgtgtaaagttcagatggaatctgctgtgctttctagaatctcctactttctcactgtgttcagcaggagagaccctttttatcttggcaatcatatttcccatagttagtcctctccctaaccctgtgcaggcaaggcttagctgctcactccttcacactgttgccttctttgtcctctctgagtcagagttctgagcctgtcgcagatccagtataaaactccaccttctccacatcagttcacgttgagcccttcttctccagacctcctgcctccttccttcattcattaatggagaagctgctgcaggtcaaacctgtaggtgccgggtgctacaggggatatgagactgatagggtaactgggaaggtaaaacagccacagaaaactcaatacacagaactcagataaagagtggcaggggataggaggggagggatttccctgtgactggagtattcagggcsgactttsagaggtgacttttgggaaagccttgactgatttgtagcatttggcttctagatagcatatatgaaaggcttagattctgatcaaagactgagattaaaatatactttgaaaagggagggaagaatttgtttctcaacttttgcaatctcaaaaattgaaaaaacaaaacaaaaaaaccagaacagtgatgtgaaatcagtcaagaaaacatgcttcatctgaactttgtctccttgttgaaaagttacatattttgtattgagccttctacaaaatacttgaggacactgagcacctaaggatggaaaaagagtgaagaaaatgagacagaaaactagagtggccatagaattgattccctaaaccaggacttgtttgagaataaaatgaggataactaatatactttaaattatataattttatcaaaacactattttattatctgacaaattgtttttattatatagtggtcctatgtactagttctagtcaaaaattttaaaaataaagttatttgtaaaatatataaaaggtttacgtacattgaagcaaaaattcttatcacttatgtgaatattaaaaagtgcatgtgcaaaatagtactggaatatattcacgtattttaatgttaattctatatctatctctaatgccagaattagtggtacttttctgaagaatacatcttcgttcaatgtggtcgtattcttaattttttctataatattgcttgtaatctttagagttatggtttcattttttgactattaaatttgaaattgttgacatcagcagttgactcttctgtgtagatcataattttttaattaagaagacactctcaagtgttgaactataattgtagagtaaattctaagtggaggatatcgtaaattcttttttgtcttggtattgacatgtaaatgttaacatatgtgaataattcagtccacgattgtcacaggttctatgtctttacctcctttcaaaatactttctttaacaaatactttgacaaatttattaacatttataagacaagacttaccaagttgtgttcgtttatgattctttaaatgttttccaatacttagatacatcaaaattataggacttctcaattccatcctattgttacagaatataaatttaatcaagataggaagaccctcaaaagatctttctcatgagttcagatattccaaataataattacagaatttcatttgtacatttgaactcttatcattgaatttgtttaattccttagtgtcttcctgttttcaggcttacttttcaattaatttcagtctgcaaaaagcttcaaaaatagatggtagcttttatatggttcctaatgttgagtgatttgattaaagttttccaactgattttgaacaaaatgtaatgaaagcttagaagactagtttacaaaaaaaaaaaaaaaaaataggacatttacaatgatttgctaagtagttcttcaaaggctcaaagatttccaaaatctgaatggtgataagccacaatgagagaaaatgactattgcaaaaatgttgagataatgtaattatgtgtgtcaatatatttgaaattttgacaacatttcagtctacagaatattaaagtgtatttggattcagttatatgtgccaccaattccagtgtgtttctacttcacagatttcttaatttggtaaaaatataatttttactacaatgctttattcttttatttttcatggaatttgtaatagcgttcgtaataagattgtatgttctatctttgacagaatgaacttcctgaacgttgattccattcagtggatggggaaaaaaacaaaccagtgctggaattgatgcaactgtttatttttttttttgaagcatctcattgcattgatataaaactagcctcatttacctttttgaagttcttcttctgctagtgcaggcaatatacacagctctcatttcactctttgcatttgtacaagataatctgtaataaaaatttgtgcagaattaatttggaacaagtctcttgacctaagaaaaaagtcatgtttcacaggtggtatgtaagtaagccttctgcagctgcatgagtaaaattgtagactctgaagaatatggttgtcttaaaagacatagttcctgttgctcttcaggagatttatattttctggttttcatgtggctaatgataccactgtatgtagggcaccatggtatcactttagggcaccatggtgcaccatggtggaggataatactgagaagctttttttaaaaaaaaacaaaaacaaaaaaacgaagatggtatagtgttcccgtgtaacctgtactcacttttccttatttattaatatcttgctttggtgtagtacaattgttacaattaatgaactgattattgattcactattattaactaaagtccatattcggatttcctcagtttttccctaaagtcccttttttgttgttgttccagcatccatttaggacaccacgttccattttgttgtcatgtctccttatgctccttttggctatgacagttaaccatttggagcagttatgcatttatctactttcgaggttgttgctgccagaagagtttactgcgaaatgtaaaagcattgccatccaataaaataactagatatacacttaaaccatataaaaaaggtcaactcactgtagcaagagcatccgaggtactctccattgctctgaggcaggcctatccaacttctgttttctgtacatatttcatgtgcactatgcttgtaattttccaatttcccactgacttgaccacacggctgcctggcagcattttgcacatcttgcagataggagcacaactggctgactttccaggtggttggccgaggcagctgcttccaatctttctccaccaccatctgagtcctgaaggagttttctgtctgcagcttctcttgtccaagcttaatttgttttatcagtgaatgtgagtgttctgcttcctgcccctgaaaggaaagttttagttacattgtgtctggaaaaggtcaggaaaggagagatgggtttattcctgattatcttctgatttagccacatattattctatcttttcactgcatggatgtctcacacactaacaggtgaaagtggagatacaacaaattcaccctggattrttttaatgcaactgttaataagcttaaatgtacagttggtacacagtttaataataggtaatacatgttaatgcaacttgttgattaaaatgaaagggaaattctagttagatgcttcatgtggacaggatacaggacaacgaacataaactgggactgtcctaaatctgggaaggtgacagatgtcacctaaagagaaattttacataaaaattgatattgtattccttttttgcttctcagctcctttttttttgccaaagtagaaatatttttttccatgaaaaataactataatatacctacttgcgctaacactactagattatgcctacatttaacttcactcaggttaagttgatagaagagaaatacggggagagcaaatgtgcactgcaaggcaagtgctcttaaataaagagctgcatattcttacatatacatgtacacacgtatagcacatacatactgtaatgtcaacagaatgaacttctgtatatgaaaaagtttgatctggacctggggcacgatgtgaataaaagcctgttcatctgagtgtggaagggtgaggtctgcattgccccatgcacattgctatgctcagggccttatgttaatagatggtaacgggtcagcacagcaaggctcatctatccctctgcctgttagtgtaaataaaattttattgaaacacagccaaacttattcatttatgcattgtctaggctgctttcacactgcagtgatagggctaaatagttgcagcagagatagtatgtcctgcaaagccaaaagtattttctacctggtgcttcacagaaaagatattatgtacccagggactataacttttgcagactgaccttgaacatgacctaatttaattgtcccttttcagttcccagagtactgccacgcgtaagacatttctgtccatggagctcccatactacaagattttcttcctttgaccctttttgaaacaccacccagacatggacaggagacaaccatctacttctttttaacccagttggggagtggagttaagaataataatggatggaaacagtggctggcacttactgattaccaacattgtaccatgcactgtacctcacagctaccctttgctacccttaggtggtaggttatacccactttatggttgaagaagctgaagctggagaggtgaagtgtttggctctgagtcrtaaagcagatgtggtggaggaagcatttaaatctacccaggtcattccacttatcctgtgctgtattcatttatgactgcagaagccccagttgttttgaggctgtgcctgcagtaaagcgtcagcatgatgcttcctgctgtttctatcytcctgcctccattggtgaactcccagtaactaaatatcagtgattgaaaataggaagcaatttgtaatctggattgttcctagacattgaatggatctagttaactctctcatcttccagggaatttccgttttaatatcttttggggaatgttataaaaatagatacttaggtaagtaatatttctcaagatgacacaaacccagaaagaattttacctgcaggagatgtgtgtggttaaggggccctgggtgaggcatttctggtttaaaatgtagattagaaactcctctgatcagacaacagcaaaactgaagccagagaagcctcagcccctggaccaggttgtctttccaagtctgctggttgctgtggccaagttgaggagaccattgtttgttttctctagattggagagctggatagccattctgtatgcagactgagaccacagccagtcgtaagcaactctattagtgggaagaggtcatcctgtctagaaagcaagacttaaactttagaaagggaattaatatttttctgttctagtagcatagctggatttggcccttagaatttattttctagttaatttggggtttattctggaagcatgcatactatgtaataaaaatacgtttttagaagagtactttttatttaactcatatgggagaaaaaggataaacctttgcacttactgactagacaagtgtgattcgttcagggcatcgaacgaagtaggctaactggtattacattagtaagaacataatccttgttcttacccaaaaagagaaataattatactaccagattttagttgtctataatttacctattctagagtaaaagctggtgacaactcctgaagttctacatttctggattaaatgataatggtcttagatttatttttatctctgcacatttatttcaaaatcttttgtttaattccttgcttcagccaaaactgtgaaaatgcaaactcgatcatgtcatctcttgctttaaatcttgccatggcttcccatcctttcgggacatccccgccgacccccttcagtgcgctttcggtccttgaggatgtgctcatcgggctcctgctaacttctccagctccagctctcctgcctgacgctgtgcacagcctgtggctattgatgcctgtaagagaccaccccctattgcaccccctttctgcctagttgacatctatgcatacttcagggaataccccaaggactggtcatgttcacctgttctatgctgtcagtgcatcttgtacttattcctcacagaacttttcagtcatagtcagtcctgtgagctttatgcaggaaggaatttggttggcttcctagcattttcaagatctctcatggcgccccttggattgcatgcatgttttcatgtctcatgttcagatgctaggatcttagcatcagtgttcttgtggcattccttagtatagaatgatgaagacattggcatttattactgtgtgctttcgtttacaaaaactgggttctagatgcataaaacatacggtttgagtaatttagctccctattttaatgcttaaatcagcatgacttgggatctaaaggccagttttcctaagcaccctactggatcactgtgtttcttaatgtggagtgaagttgtctgtacttaactggttcccagagatgtcctgagatcagtggtgtccaagcattctacataccagccctactgcattccagatatataaacataaatatatatgtaatcttctgagtaaaatgttaatcttatgaaaatgggtgcgtgacctttaaaaagttttatacatcttaggtatacctgttttctcttcaagtacgtataatttccctctcagcttcaatgggaatatttgctatttaaggttcttatttcccagggatcatttaaaaattttaagttgtgaagttttcatcagtaattagccattgctactgtcgttcatacaaatcatcatataatttattgaacaagaagataaatgacatctaaaacattgataattcaaggtacatttttctctaattgcatttcacttgatatcttcagacacaaattaggtatattagtgttggttgctctctcagcacagatgcagagacttcttttgtcttgactgactaatgcttatgacttgatccttaatctttctttccctagtgtttgccaagtacacctgtaaacagatctgcatggwatttgagagtgcaagtgtaattgctttagatgaggccctgggtccttgatgaattcaaaatgctttcaagccttgtcactacttgtcacccttctcagcactcacttgtgccaactgggtcaggcccagaagaaaacagagttgtgtgtgtggccattgtatcgtttctgcttgtttaacctttgacgtcagaaggtaggacatgggaagaggccagtaactactacactcttgtgagggaacaaaaattatcttggcaccaagtaatggtgccaagtttattgagttgagaaatccacaggtatttagctgcccaggmgaggcacagaatataaatcttacgtagagggaccaggtactatcttttgctatgatgaagtattttttgttttgttgtgtttttccttttcctatcaggtgtgagaattgccaagagtgttatgttacagtctcttggcataccccagaaggtgcatcatttccacagtatagaccaagcgaagcacacaggcagatgggggcagggatggaaggtgggactgtgcccactgcatgtaatagtccttcccccagatagctttaagtaaactaaattgtagaaggttatctcatttttatcttattcatgctttcattcttttaaggagtcctcttgtaacgtgggtaatccttgtagcaataaaacatgtcctcttccaaagtaattttttaaaaatcttgttatattacattttcctaaatggaggtatgtacttaagacccctgaaaactggcttagcacttacttttggtgtgaagagctagttcttccctagagagcccaactctggagccaggtggattgagtgggaatcctagctctgctaaagggacgtacttgcctaagtctcctcctcagtaaataggatactagtgataacatcttcatagagttgtcatgagaattaaatgaataatatatgtaaaggcttaaatcagcacctggactacatatataaggtgatcaataaatatctactttggtatctgaatgcttcaagatagccttttgttcccttctaaaaaagagtgggtagtgattgttaagacttacccgctcataaatgttttattacatacttaatatgtgaagctatcaagtaaggaggtaaggaagtatgttaatagggaagaagatgataaaatacccaaataggaaaccataatgccaactttctaagcttaagctgactgtaacaaagaactggctttgtaacaaagaacaagtcttactggcttcatgcaatgcaaacatttttttcttacgtatctgacagatcaaggtggtcaggtagctctcctgagcagttttccaccatgtggtgattcagggatccaagcacattctatcacgaggcttagccatattggagtttttcacttyggtgatgaggatgagggagaaagtgggagagagtgaaaagagggagaaaggtggaaaagggagaaagaaggagaaggtggaaaggagagagagagaaattgagaaagtgagaaagaaagaaaaaagaaagaaaatgtgctgaagattttgtaagcgattttagaggtcaagcctagaggtggcaaacacataccatttctgtacccactccgttttctagaactagtcacatgactccaacctaccagccaagggttctggggaatcagatctccctgtgtgccctgtaatgcaaagcaagatagttgagtttccgtggtggagtcctggcacaacagttaaccatgtgacatattttctgttagtggcagacatttcctgtaattattctatttgtatgcttcactgtaaactatttttgaaattctctgtaatgaattccagaaccaacacatgacccaagaatttacaaatcattatgtttctttctcattttagaaatttgcaaaaagtgagggaatctactgagatgtgtacttctgaacattttgatgttgtacagatagccagcaaacaaggactctaggtgacagtatcttttttttttttttgtgacggagtctcactctgtcacccaggctggagtgcagtaacatgatcttggctcaccgcaatctctgcctcctgggttcaagcaattctcctgtctcagcctcccgagtagctgggactacaggcgcccaccaccacgcctggctaatttctgtatttttagtagagatagggtttcaccatattggtcaggctggtctcgaactcctgacctcaggtgatctacccaccaaagtgctgggattacaggcgtgagccaccacatccccccactcggtgacagtatcttaatgacaccctgacaggcagggttctattaaagagcaggtttttatgctttttaccttcctggtagtcagtaaatgacaaaggcaaagaagttaatgatccattgaaattatgtcagacaatctaagagtagagatttttctttcactgccccgtaataaatatggcttactattgcaaccagaatttgtactcagctctgatgggaaagataatggcagttttctgtgtcttataccaccaaataaagagacttactactgcaggtttattaataatattttccttgagcaattcttttgaatcatgattggcctctgtacagatcaagcagtttgtttataagaacaagcctggggccaggcgtgttggcacacgcctgtaatcccagcactttgggaaggcgaggtgggtggatcacctgaggtcaggagtttgagaccagcatggtctcagagacatggtgaaaccccgtccctactaaaaatacaaaaaaaaaaaaaaaaattagtttggtgtggtggtgggctcctgtaatctcagctactcaggaggctgaggtaggagaatcgcttgaacctgggaggcggaggttgcagtgagccaagattgcgccactgcactccagcctgggtgacagagcgagactcagtttcaaaaaaaaaaaaaaaaagaaggcaagtctgggagagtttacagccacatggacacaccttggggccaggcttaactaagcttcagagttaatgtgtaccttacgtttttcagtgtttccttggtctgtggattgattttgaatcccatttcttctgccagagtttagctatttaacacatagggaagcagtatgattttatggttgatcaggtggcccacagcttgagactgagtttgaatccttattctgccacttaaccaccatgttaccatgggccctatatggtatttgtttgctagggctgcctaggtatttgtggtaacaagcatcacaaactgggtggcttaaacaacacaagtttattttctcacagttctggaggctagaagtctgatatgactgtatcagcagggttggtttcttctggggcctgtctccttgacttgcagatggctgtcttttcctgtgtctttacatgatcttctctgtgtgtatgtctgggttcctatctctttttataaggtgaccagtaagattggattaggagctattctaatgaccgcattttaacttatttacctctttaaagacccatttccaaatatagtcacattctgaagtactgggataataaaggtacttcatgatgttgtggtgagcatttgaagagaggatgcatatacatttccttacacattaccaggaatatggtgactactcrctacgtataactatttttattacaattataaattgtattctatctgactgtcttcttttccaattgtgagatggctgtctgcatggcttttcagttactgaggcctaggattattgtcatctttcttgcgccctcatagcatcttaaaatgctgccttcaacagagtaatagggcaaaagcccaaggaatgttgatcaagtgggtgggtatgaattttgtgctcaggatttctgagtggtcttctgtggctgttgctttggtgtcacaccatagatggctgtgaaatgctctcagacttcttggttcctggagtggcctgcccaaaaactagacgagcacctggagaagagtaatctctccatgtcaggggcaggagacagaagttgttgtgcattgtcaggggagaaactgtaaaatcacagaaccagatcaccaaacataagaattatccaaacgttggaggtgatttttaaatcaggcagtgtgtcaaagtgattggctttcctgcaattattagctatccccaacatttctggacttaatgagaattgatagaattatttgatgctggtattatggtaagttatcatctcatgcccaaagaattgactgttctcaaaatttttggtatttcttgtttcaactggtataaatgttctttgctttaaaaagtgttgctactgtcacaacccggtcacagcctttgttaaatactagcaagcagggatccactaggatcagaagaagaaggccagattgcagtctctgatataagctgtccaaggaggccaatatgcagcccatcaatccggagaagcatggatacgctggggaatagtgggcttattaagtctacacctggctatagcatccatccatagcagatgagttacacaggcttcattaactagacacaaagggtatattattcatacatcatgctacattcctgtcggtgaatcagctcttaaactgtgagtcacggacaccaccaccctcaccaactagttcctttatcctctttcagatcagctactgaatctggttaatttttcttttgaaatacctctgaaaatgtttatcttttagtaaaagattttaaataataactatgaggactgtcacaaataaatagtgtgatacaataagaaatatgtagttggtctttgtcccatcttcctggaatacagctcctaaaacctttggaatctccagaatgatgagtgtcttttgtatggtagtgagaaggctggtagctggggacccctagaccttcaggatgggggctgracatgattaagattaagaaagactgacgtgattagaaggttggaactttcagccccatccctgacctctggggaggagagagaagctgaagattgaggtaatcaccattggccagtgatgtaatctctcatgtctgtgcagtgcaatcaccataaaacccccaaaacaatagtgtttggagaactgctgggttgatgaacatactgaggagctgggagggtgttgttctgtgcacccacactctgcttccataccttgcccaaagcatctcttccatttggccatcctgagttatattctttatgataaactggtaaacctaagtcaagtgttttcctgagttctgtgagccatttaagcaaagtatggaactgaagagggggtcacgggaacccctgatttataggtgattggtcagaagtgtacgtggcaacctggaacttgtgactggtatctaagtggggagcagtcttgtgggactgatctcttaacctgtggggtctgtgctgactctgggtagtgtcagaatgaaattggattgttggacactcagttggtatctgaaatgttggagaattggttggtatgaggaaaaaatccacacatttggtgtcaagagaattgtgactgacatcaatgcaaatatatataaaaatgtgaatttatatgaagttacttttagctgaccgtaacataataggtatattcattgctgtggtttggctgtgtccccactcagatctcatcttgaatggttatccccataatccccatgtgtctagggagagagctgttgggaggtgcttggatcatgtgggcggtttcccccgtactgttctcgtgatagtgaaagagttctcaggagatctgatggtttaaggaggagctcttcctccttcactcctcactcttctctctcctgtcaccatgtgaagaagatccttgcttccccttctgccatgtttgtaagtttcctgaggcctcccagtcatgtggaactgtgagtcagttaaaagctcttttatgtataaattacccagtcttgggtatttctttatagcagtgtgaaaatggactaatacacccactgttatgacgataaaggctgaaacatgtcttatcaggggtggrtgaaacatggaattaagtaactgattwaatgttacctaatttttctgtaaatttatatatctttctattaaaattaaaaaatacacagcaggaacaacaacaaaatccttccttattagtcccttgctgtgcattttcactgtcctcgcaggccccatctcctattgtggggaaaaatccaancatatctcctgactgctgtcttcccttccttccgttcattctgtgattgctggtttttctttccttagttcttcayttatgtttctctttcttaaaagycccctgcagagttgcctttaaaattttataattggtttaatttttatttatttatttggcagagaagagcaagttagtaccttgtaccaaaacatcaaccttgtggagccaagattaattcagccatatgaacatgttataaagaacttcatccgtgagatcagacttcaaagcacagaaatggaaaatttggccattgcggtgaagaggtattgaagtccttcctttatwagtggcctgtgggtgctttaacttgctctctgacctgggtggcaaatggactgaactgcattgtcacactatgatataggtggacttcctgagcctgaggagtctagagctttcaaaattaagccagcaatggagaagtaggtcagctaccaatcaatcagtagatcatcatgatcctattatataaactcttcaggatcaatgatgacttgatacagaacaattaagagatttatcttacatccagctgcttaaaacacacaggaaacttttatctagagaagtagatggaacactatttgaagcctggccttgttacctacatgtatgagactttgtgagcaggttacttaatttccctgagtctcaattcctgcaactgcaaaatgaggatgaatatcttcacgtcctccaggtgttaagacttagtggatgatgtcatgggtgagccctgcacactgcccaccacatggtgggtgctcagcagtgctgctttgactctctctactctctagccctcctcacttggmcctccccctttgaactgaaagccaaagaactattaaactcttactctaatacagtccatttaagccatagctagcttacataggatatctttttggtgttaacagctatgtcatgcaaaaaaaacaatttatatgtgttgcagtccaaacgtcagcctctttgccccctggaaaaactgcattcctttagcatgtattgggaaagagagggcattgtgcttgtcacagttcttgtgtgttgtgccacacggatgctccttgctgtcgtgtgctccaccargagctcccaagacgctgtgcaccctgctggtttctgcctggagcttatagatgcagcccttttaataggaggctgccctgtctacataggggcgggtgacttgtcttcaattctgctgtctctttatccttcccatccacatgatgctgaaactgtctagttgaacctttggttcattacgatgtagaaaagaaaatattttaaattcttggtatgaaataggacctttcttatagtcctggagtcaagccaaggttgatctattcacaagggatttcttatgaacatttttagtacttgactgaccatttttctctcaaattagccttctaggggccttccaggaggataaagggtggtcctcagaactccagagtctgtagagcattctggagtgtgggtcagagtcccagagttggtctcctttgagatgggacaggcagacacacacattgattcttcagagcatccaataagtattaaaacagacaaactcataggtacacacataggtacacatacacagacccacacagagatatgtgggtacacatgcatacacatgccccccatctaaagataataccatgtaaacctacgaggaaaaaaacagactggcatgcttgatgttctcattaccagctaggctgctttttcatggtggagtgagtacatcatattaatttgagctgtgttggtgtccccatccactcccttctgtgctgctggagggatccagagccagcctctatgctgagctgaagtctcctaaagcctcctttcttagctaccaaagacctcaggaagtgtttaaatggctacttgtaaaccattccttgcatgcttagccatccatcctcactgctatttttaattgggggagggttttggccattttgttctgcactgcacctgaagaaggggttcccagtgtcctggagggagccccggactaggtcacagtgggcagacatttcaccagaaattggaaattgctggggcaagcactctgtgattatgcatcaccctgatttacaaaagaagaaaaatgttgctcagaagtgaaaagggcagagagagtccattacggagcagtcccagatgcttgggattggatagctagaagaagtaggtgggaaattatcataacagagggagaaaggatatgtgccttagccatttacagtcccagagttgaccaaaaaaccgccagacattgctatggagatacacagtttctagacttcaaatagcaggtatttataagcagaaatgaactgacttcccaagcttggttaacataacctcggacaggctataagatgaggaagaagtaaataggaacagaagataataatgttactgaaaattttactttggggtctttttcctcccataatacttccttggagttttatgtggaagttgaaccaatgcatgaataaattgtgttgtgtgagggagtaaataagtcaaaagcaggtaagttgctatagcagagacccatcaaactagaagacagaaaatcttatatttaagccctgtcatttattaatagcatgtcatttgtccgaatgaatcacctctaaagctcatggtttagatgcaaatcaatgtgctctgtctccatagagatgtgatttataattgcactcctaacagaaacataatttttctaaaaggtaaccttatctacattctagaactttaggggacaaataagaataatgattgagatctttttttcccttctcactttaacatataacattgtgagttttatatagtgaaatttcaaaattatatataaccatcactttgccacagagttctttttttaatccagggttgtaactcagtcatgagagcaaaaaaaaattcagaatttattgagagcctcccagcactttgatatctttactgtttgccacaatctagtttaatatcattttatccaatttattaatttatttaatatagtcaggtaccacatcacaatgttttggtcaataaaggattacctaaatgacagtggtcccataagaatataatcctatacttttactgtatctattctgtgtttagatacataaataccattgtgttacagttacttccagtattcagtacagtcccatgctgttcaggtttccagcctaggagcaatatgctattccatatagcctaggtgtgaagtaggctttaccagctgggttggtgtaaatactctttatgatgcttacacaatgacaaaaatctcctaaagacacatttctcakaatgtatactagttgttaaggaatgcataactgtatctagttttaaaatcattttacaccaaaatggtcgaattgccaatctcattttattatgtagaaggaatgggaaatcattttgaatggggtgtttctcttcatctgtaatatatagggcttaacgtagatgaatctgaagtttctcttcatgtttcaagttcaagagtataatgaaaaggtgtgcatccttttgaatttcagagcccaggacaaggcagctatgcagttgagtgagttggaagaggaaatggatcagaggattcaggctgcagaacataagacacggaaagacgtgagtttctgggttggccattcattcagcagatctttatgaggtggtttctacggagagggcccaggcactcttctgggtgtcatgcaggggtacagcaagtccaggtttctgcagagtctcccagcaaaggaatttttactggtggtggtttttggggatggggtaagaagaagtagaaataataaataagcaaagcaaataagttcagatagtgacaagtgcagtaaagaaataacatgtgccatagtgactgggggaggaggctgcttaggttgggggtaagaggcctctttgaaggggtaacatcagagatgaggccttaggagaaggcagaggcagccttcatagagaaggtggcttgactttccatacctgtgtctgcccacacctgctgcccactttaaatctagattagagtgaaattaaaattctgtcttcaaactttggtgttttataatggaatacagtcatcacttggtacccaaggggattggttccaggactcccctgcaaccccgcataccaaaatctgcatgctcaagtttttatataaatggtgtatatttacatacaacctatgtatatcctctagtatactttaaatcatctctggattacttataatacctaatatttaacacaatgtaaatgctttgtaaagagctgttacactgtatttttatctgcatcacttttactgcttaaaatattttcggtctttagtggttgaattcgcagatgcagaacttgtggatatgaagggctgattgtatgcctttattcagcattataggaaccatttaaagttgaaagtgatatgttaccttcagtgatttccattgaagaaataatttttttataaaatatttttgggtgattaatgtttattgaaaacagaaaatagacaatgctaggttaaaacttccacttttgtttattaatttgccctgttaacactgagtggcagcaaaataatgtacaagtggcctgaacattggcatctgggagaccttagtttgcatcctggcccagattgtatctaggtggcattgggaaaataacccaacctctgagcctttgttattccatctctaaaatgggataatgcaacctacctgccttcacaggggttagacatgatgatctatataaagtgcctagcacggtgcctgcaatgtagtggctgcaccctggttgttactgtcctgctttttcctgtggctctgtgtattcctgattccttttagattcttcaccttaaatggctttaccacatatatgccctggggtgtctttgttgtcctatcttcttataaaaagtttaataagaagctggacgtcattttcaaccacataaatggtttaaggttcatggtccagcttcagagcaatggataaccccttcttcagctagcactttccttttggtaaaaaggaaagagtgaaatcatttttctgcctttttttctctccatctgctgtgtttaatctgtgcacaaattcattcatcaaacacttatcaagcacgtgttattctgtcatcatatctcattgcttcttccagataaatgcctcccaaatttgttgctggtaatggggatattaccatggcccccaccttttagaatttcatgttttgttaattacaggatcttctttagtttccttggcttcagtccggtagtggcaaacccatgcatccacagcatcatttctctattccacagcaatgacacatgtggcctgtcagtcaccacatacatgtggtctccacacctcagcacgccagtccaggacgtcactgccagctgagcagctttggcactgcgaggaaacttgtttgcctgtccatcctagtgtccgcctcacacctttctaaacacagcctctctggaataatgtgcccaggccagtctaagatttttccctcatttccttccattccacatggctcccctcggctccccagggttcttcgcccccagccctggcccagtggcctcactgtgcctgaccctgctttggctccagctgttttctttgtcttgatgattatctcttcactcctttccttcttcccaaattctgcaaagctcagaggaaccctcacttacttcttgatgccctgccctgctcctgtagccacattcacctcttcctgtccttgactcctatggcatatatagcatatattgcattacttcagttagtatttttttttaactgtaacagctttatgaaggtataactggcaggcaataaactgcatataaagtacagtatatgtgaagtttggacatatgtatgcaccatgaaaccattcccacaggcaagatcatgggcataactatccaccctcgaagtttcttcatgccccttgaaggcataacaagccttccttcctcctttctttgcccctttttgccagataatcattgttctattttctgtcgctgtagattagtttgaagttttcagaactgtatagaagtggaatcaygcaatatatgctatttcttctctggcgttttccactcaacataattgttttgagacttatccgtgtaattaatagtttgttctttttcattgccaagtagtattctattacgtaggggtaccacagtgtttagccattcatctgtagaaggacatttgagttatttccagttkttggctattgcaaattaaggtgccatgaatatgcatgtacaagtctttatagaggcatatacttttattcctcttgagtaaattcctggagtggaatgggttgatcatctatgtagatgaatgtggatttttgtaagatactgcaaacctgatttccagagtggttgtacagttgtatgattcaatcagcagtgtatgagagtcccattctttcagcattctaatcggtgtgtagaggaatctcactgtggttttaacttgcatctctctaatgactagttgtgtggaggatcttttcgtgggtttatctgccatgtgtatatatatatattttttgctgaagtatcttattaaaaatctttggctcattacaaatacagtttttttttaaaaattactatgttttgagagttcttttatattctgaatgcaagtcttttatcagatacctgatctataaatattttcacccacaccgtgacctgtcttttcattctcctaacagtaagagtataaatttttaattttttatggaccatactttttttcatggaccatacttttcatgtgatctttaaaaatctttaactcaagattttcccctgtgttttcttctataagctttattgttttaggttaaatttaggatccattttgtatttggtgccaagatatggatcaatgttcatattttttttatgtagatatccaattgttcccacacctttattaaacaagactaaccattttccactgaattgcctctgcactttatccaaaatcagtttattctatttgtgtaggtttatttctgggctctctgttctgttccattgattgatttgtctattgttatgccaatattacattgtcttgatacctattggtttataatgtcttgatacctgttggtttataagtcttgatacctattggtttatagtatgtcttcatacctattggtttataagtcttgaaatcaactagtattagttcttcttcaactttgtgcttttttaaaagttgttttgcctattttaattgctttagttttcaaagaatcagcctttcaatttctttttaaaaaaaaagcaaacaaaaactaaaagtctgcagggagtttgactgaacttcattgcgtctatagatcaatttggagagaattgacaacagtattgaaaatatgatttctctctctatgtcttctttcagcaatgttttgtgttattcactgtacagatcttgtacatcttagatatactcagtatgtcatagtttgatgatactgtaaatagtatttctaaaaatttcaatttctgattgttcattgtgaatgtatagaaatacatttgatttttgagattggtctcgtattctgtagcattgcttacattgtttatatgcagtgcctttttgttggtagattttgtcrttttctaggatgattatgaaatatattaataaaaacattttatttttctttccaatttgaatgaagctttttatttttcttgccttattgcactggtaagaagaataaaggagatgagaacattgaatgtgatgttagtagtgtagtgttcacagatgcctttataaatgcagtagagtcccttctgttcctagttggctgagtattattgttgttgctgttgttttagtcaggaatggatgttggattttctcaaatactttttctgtctcatgatcatgtttttttcttttttagaatgttaatgtggcaaattacattgattgatttttgaatattaaaacaaacttgcacttgagctaggccctaattagttatgatgtattatcctttctatagattgttgaattcagtttgctaaattttacttaatatttttgcattcatatgtggaagagatattggtttgtacttttaatgcttttgtcttattttggcgtcaggcaaattctggtctcctagaatgagttgggacgtattccctccattccagtttactggaagtttgtgaagagttgatctgaaccactaccatttctcacctgcattactgtaacaatctcttatctgatctctcagcatctacctgtcgcaggttgggaatgaaataggctagtgatcatttcctttattgaactctggataaagtacttctttttttttttgagacagagtctcgctctgtcgcccaggctggagtgctgtggcgcgatctcggctcactgcaggctccacctcccgggttcacgccattctcctgcctcagcctcccgagtagctgggacaacaggcgcccgccaccacacccggctaatttctttctttctttttttttttttttttagtagagacgaggtttcaccgtgttagccaggatggtctcagtctcctgacctcgtgatccacccgcctcggcctcccagagtgttgggattacagtcatgagccaccatgcctggcctggataaagtatttctaaaccctaaaatgtttatgtttggttttgtggctgtggatctaatgaagggacttgcagtcaagtccattttgaggccaggaaggctgcctcattagcacctcattgtgaggcctctgtgtcttcatccacatgtgaggcaggcagaaattgttgcctcacctgtaaagctggatgaagtcaagatagccccttttaaaaacgttacctttagggaagatgttgcttttctgccaagcatttcacatggattatttaatttatatggattaattaatttaatcctcacagtagttaaaaagaaaatggaggcatggataagtttagcaacttgcccagctccacagccaatgagtgggcagtaagacacgctacctctggcaggtattcagatgtgggagcatgctgcagagaggccctaccttactctctagcagactgacttcctgtcacatctccctgttttttctttttttgtattatttcctgaaattgcctttttctgtcttctctgctagaatgcctgagaacatcagttttattatccccctctctgtccccatgtccccagtcccttagaaccattggtaggtgataagcgaatatttgtacactgaattttactggctgtcaacataaaactatttgaatactgaaggtaaaatataaaattgtatcatttattaaaagaaaagtaaatttagagatgtttcagcagtgggagcttctgaatggcaatcccctgacctggggtgccttactgccattctctgctccagaagaacttgaagggacacccccgagaagtaccaggccacagggaggcactttgcatagaaatttgcagtgatgtaattgggatttagataagacatcatctctagggaaaagggttcacccaggatgccttcttgagtcctgatgacatgataggattccggtcactgtgccatgtcttttaactaattatagcaataattacttaattgattgatgtgctatggtctctatcacaatgtgagtaatagtcttagaggtgtcactcccgggtgaggtgtgtatgtaggttgtgggatcctgctcttctttcagttttgtaggtttcagttccaaaattgtggtacatctgaagtcaattggtttccttctgatatcctttctcaccttccctgtgtaggagaactgaagtcagccttaatttgacacaaaatgtttctcacctgtggggttttgaaggttaagagggtgaacttatttaaatgaacaacatatttttttttcttttaggaaaaacgcaaagctgaggaagccctcagtgacctcagacgtcagtatgaaactgaagtaggagatctgcaggtgaccattaaaaagctaagaaaggtaggcatgtggcagctggacttgtaggaacagcctcagcatctcagggtatctragccattaacaaccaaaaacatttggaatcctattgaagtggcrgatagatcagatttcagatttgttttgagactgagtcttgctctgtcacccaggctggagtgcagtggcaagatcttggctcactgcaacctccgcctcctggattcaaatgattctcctgtctcagcctcctgagtagctgggattataggcatgcaccaccatgcccagctaatttttgtgtttttagtagaggcgggtttcaccatgtcggccaggctggtctcaaactcctgacctcaggtgatccacccacttcagcctcccaaagtgttgggattacaggcgtgagccactgtgcccagcctgaaagaccttttaagggcccctgagttcctcttctgtttccaggggccacctgtcttttgcatagatttaataattattttctgatcccttcaaccattgtccataaaacttcagtttgctttccttggtcttcaccagcttagtactctcaagtcccttgtgtctggtagactgcatgcttcatgactgtttttcttggtcatgtcaaatatccccgtgtccctacccctagcttattgcaaagtgcatggtaagtattcagggaatatttattaaatgaaatgaatattgctcttctaagtagaaaattccagatctagggtaccctgatcaccaagagtcactagtttttgaagaagagcagaacttgttgaagtgtgagcaaagatgtgattagtttgtttgtttgtttgtttaatgtggttggtttttggcttttcctctatttggtttctaatgagcaggttgttttactcagtaatactctggcagttgtttaacaggtggctctatagtgggtggaggggaagggagggatgtgtatcatttgttgatttccatggtataaatactcctgtcattactgatttcatgctaccaagttgatgttactgaatttaaggttgagaagagatgcttaaagcagactctcacctgctggtacaggctggctccggcactgtactagacacacttcttggatctgtttttgtttttcccataactaatggggatgtgttagctaaaatgaaaatggataattaaaaaaggatcatccttgctgggcatggtggctcatgtctgtaaacctaatactttggaaagctgaggcaggaggattgcttgtgctcaggaggtcaagaccagcctgggtgacatagttgagatcccaccactgcaaaaataaataaataaataaattttaaaaattaactgcatgtggtagcacatgcctgtagtcccagtgactcaggaggctggggtggaaggatcacttgaagctgggagaggaaggctgcagtgagccatgattatgtcagtatcttaaaaaaaaataaaaaatcatctctgaaagtggtgatgagactaagtggcaattagctatattttgtattttatacactattgcaatttaaacctctgggatgattaagaattctccccagtagcctccttagaaaatgaatatcaatttgaaccttatatctaattttcaaaagttattaggccatgcatactatgcttacattacagaattgaacagacraatcttctgyttatgctagagccacaaattcactgagtcactgccctgacttatttctgtggcttcccaaatctttaaaggaatgtctacaagaagagatgcagcgactgatgaggcccaagtggtctgaacagtaagaaagsccatgtgtcaggagacctgaatccttgtcaaaactgtacccatttttccctgaagcacctcggatagttcacatcatctttctgatttttagtttctgatctataaaatgcaattattaaaaaactgtctttcctaaccataatgactgacattttattgactttgcagttcactaagctctttttcatgatttaaaaaatcaaattcttaaactttctctgaggaaggtataaatatcctacttttagagatgaggactgagttccagggaggttaactaacttgttcagagtcacacagctaataactgatgaagccatcttactacacagtttgtgctttctcacttattccagacttcctgcatgcctgatgtggttgttatgcaaaacagcaagatgtttatttgagagtgcattaagggctatagtttacaaatttgttacaattgccactaactgtgtccttgattctgagaaactcattttttcccgatggtttttcttctctgaagtcaaaatgcgtgtttaaatcgatggcttttctcagtcagagtcagcctcgtggcagtcatgacgttgttatgtaaacactatccctttatagcatctggcaaggtgaagaaggtccagaatcaaagcacttagacttcgtgaaatgtgggatccattttgatcagtgcataaacattccaataatgaataccaacagatccctaccattcccagaggatgtaagctgtttgtaggaaaggcattttgttgttgttgttgttgttgttgttctccaggttataaatgtgtggaaccaatttagtctggtaattgtaacgagtttgtagttgcaatagaaatgagtcaaccagcaagcaaagctcatgtagaaatgagttaatcatcaagcaaagcttaaatgtaggtatatataatcaagtgtgtttgtgtctctagcttcctgttatactcagattttattgattttagttatttaataagcatttcttaaactcaccatgaagaaaacataggtgaatctgacactaattctgctcttaaaaaatcttgctctgtagcagggaaggtaagacatttctaaataattgtaatacagaatggaaagtgttaaatgcagataatacgaaggagaataaaaagatccagattctaatgtagcataactgaaaaaagcaagaactggattgcttaatagttgaatgatttccaaaaaaggcttttcagctgtttccaaaaaagttcatttcacaacaaaacccctttttcaaatgtttaaattatttagaacaaaatttcaaatccttatggattttatgtagtttaatgatttatraagttgcataatgktgaaaattggtgacttctagaattctcatatgtatattcaaggatagtcctaaacttaaccaaagcaattcaaagtgagtttgtaagcacacaacttttatttggtctttcagctcgaagaacaatcaaaaygcgtaagtcaaaaggaagatgtggctgcattgaaaaaacaaatttatgatttatcaatggtaagaattaccttttcacttacagaaatgcacttcctgttagaccacatcctcatgctcttatttcagtgttccaggaagagcagcttaaagggaagttaatactgtagttagaaaaagtccttaaaataactttgatcaaagatactatttatgcaggcttttccctcaataatatgccacttattgtgaaagcttttacttatttttcatacaaagtaataaagacctagtgcttacattttatgtaacacagttaaccctgtgttcttccaacatcagctctggtctgtattcctggcttagtgatgaggatattagtgccttgccccttcctccaagttttttttttttctgtcgcttttccatcttacgccagccacatctacttttagtactaacaaaattggtaacatttacatatcttctgttatgagttttatttagtttggttttagattaactctcaaatttgaaagcagataaagagcattttctttcttatgattctaaatattttcactgcagagctaagaaatgagtgaggcttgcatttctttctctccatttattatctctgatccacttagaaggttcccagcttcatggtcaaatgaattcctagttccagatttttccacatcttagtaggctttgtatttggataatgacattcttgtagagttatttgtttttcttggattttctggttgatttttttggtttcttcttgcaaaaagcactaccattttcatgatatcmctgataccttaagacttatttagtctttccaatgcatgaaatttgtttagtttttctccttgaaaatattaattttggagtctataaaatttcagttttttttttttttttttttttttttttttgagatggagtcttgctctgtcaccaggctggactacagtggcaygatcttggctcactgcaacctccatctcctgggttcaagtgattctcctgcctcagcctcccaagtagctggaactatagatgcgcaccaccacgccccgctaaatttttgagttttaatagagacagggtttcaccgtgttggccaggrtggtctcaatctcttgacctcatgatcacccgctttggcctcccaaagtgctgggattataggcgtgagccaccgcacctggcaaaatttcagttcttattggactgattgttttttaaacttgccacccatatgttctgcaatttcttttcactaggcctttcactgaattgcagcattttgcatattacaattttttgggaggagagggtttcatcctcatttcggcatagcacatcctcaagaaacttcttcagaaagaacatgtgagagagaaattttctgtttttgaatatttgagaatgtctacattccccctcacaatttattaagtttgtttagataaataggcttttttgggactcctctgtgatttattaatttaattatttctaggtaccattttttttcaactacctggcagttgttggtgatctgttcatattttaaaatgaaggactagcttggtcacttaaggtagctggtgtaggatcctgtgggacggtgtgaacagatatgctcacctgaaggcctttctcccgagagagtgtcttccaaggagctctgtgtgtgaagctggcaggggaccccagttaccggtgtgagtggggcagggatattcagagagaagccttagctttttttacaggagccacttagttttaaaaagataatctctgccttgtcttcagaatccactctggctctctgctgttacttgctagggtaagatagggaatgggcttggtgggaagggtggcttactatacagttttaatctctctttccaaccccatatctggttctgtctttctggggttcggcccggtcacttgtctccttctggattctgtgtcaaaaccttaaacacacttcctctaatcttccatttccccactctgttccctttggcaacacatttccatcagtttccactttctagaagtgcatttaagtcacttgaatgctctgggctgctcttccattcttttaactgttattggttcatttcctttggcatttcattttagtgaggttttggaaggggaaaaagacaaattcatgtgctccatccaccatcttgaacgaatgtctccaatattattttaagaaaatacagaaattttcaaatcacactggtttatttttaagtgtaaaacttaaaatattaagtgatggaatttatttgtaaaaagtagccagtgtacctggtaataggtactgttgattccacaaaatgtttatcaataattttaaagcgctcattaaataaagcaagcattcgaatggttggtgtcagttaatttgccaataatgtgttgaaatacatcatgataaacccttgactgttgtagtttggtgtcaaatatcaagcataaaaaaatgaagaatgactttgagggttttgatttttgacactttattaatttatattgatttcaaattaccttgaattgacaaatagttgtttgaacactgagattttgaagagttgtggaagggtgagagtggtgtgggagggtgacaggacactttacttcatttctcccaggcagaggaaaatctgaatctaatgacccccacttttcattttatccaggaaaaccagaaagttaagaaagaccttttagaagcacagacaaacatagcctttcttcagagtgagttagatgctttgaaaagtgattatgctgatcagagtctgaatactgaaaggtatgaactttgcattttatttgttagtttgagtagaatattgagatgatcatccaggcaaaagaagctcagctatggaataatgaagagttagtaactttgctaatatcttctttactttctaatgattttattttcagtatcaggtttcctagtgttttttatgtttttaattttttaagcaaatagaataattattgtctgttttggctagtgcagggcttaataaatgtttgaattaactgggagctaaaagaatataccacagtgtcaagggttagtacttattaaagtgttttgaagtcaggaatcctggccataaaacataagaaagggaaaagtaggcaagtctattttcgtgtgtgttagttttgcagtatggtgttaataccataaaacctaatacacatacatacattcacagacacgtatttatatataaggaacatagacatgtatatttttatatggatggtaaatataaaatgcatagatatgtgtatatgtgtgtatcccctaggacatgtacacttgggaaaaatatctttttttgggtttgtttgcaaactttaatcagaattaaggtcttacaagagaaaacagtgaaatattatcgtttactacatacaagtctctgaactagataaggagttatgagtggagagtatatatatatttataatctcaaaacacagagcccacgtcatatatatatatatatatatatatatatatatatatatatatatatatatatgagatgagaacttcaaatttagttgggaaaaaaagcaaaaagattatagggtttaacaacagaagagctaaaaaatatcagaagtagtgccactaacgtagtcatggtttgggttaattgctgtgtgatcacagaaaaggttttgttttagttcagaagaggtgaagaactgtattgaagaggtgatgctggaggtgagcctaggtagaaagatagctctgtgctgggaaaggggagagaggcagccargatggcaacatcagcaactcagagctggtggcactgctgcctgccaggcactgtcctggtccttcgcaagcattaactgatccagtccacagaacatctggtgagacagggaccttcattatgtccattttacagatgggaaaagagagtctcagagatgttccaggtaaggcagtaaccaaagcagggaccagaacatagggaaggatacggcttggggaaaggtggtcagaccacagggcagaaagagacattttgaatagaaaagcaaaagtttaaaaaaaaaattaaaaagtttaaaagctagtttaaggttatcatagaaggcccccgaattttggtttaaggaacttaaattcctatagacaattaggaaatgtgtacttttatcatccagggagcagatggacaggttattgtgaaccaaacttgatagcctgggcattttgggaagctagtgatgaggtttgtatgctcaggggaataggggctggaggagagggccagtgttctgagcagtttggggaagaagccagagcttccatcataaagcaacagagggattgccacagaatgagtgtctcacgagcttagcaagcctggttctttggggatctctgtggtttaggtaaggagaggagggagagcaggagtagtgtgagatggaaagaggaaggaatcacaggaaaggagaaaatagatggagttgggattatataaggctttagatgagcagggaaggttcagaggattgaaggcacagtttctgagacgcccttagaagagactcaggaggttcagccctcgtggagaacagagctgggtcagcgagcatggggatggaagagctggtggttgctgagatgggctgaggaggagaagctctaggcttgtgatgtcggaggcggggcagagactcacaggagaaagcacaggatgtgagtgtgtttgtggagtcgcagaaggagaggaggctgctgaggccacagaggcccrgagcaggagcacgggaaagatagaaaactgtggccaaggayactcrtctttgaaaaaggtgggaaagggtctgggagggtaggtatacgtgaggcaggacttgacacctaattctcactcaaacataaaatacaattttacagggatctggaaataatccgagcatacacagaagatcgaaatagtcttgagaggcaaattgaaatactccagtaagtccgcagatcaaatgctcattacatttacatttcacttgttttttagttaataaaagacataacacatagaacgtgagttgccatgttctgaacactgggtttgcaggtcagtgggtgtttcttctcagggtgtgcacttggcatctcctcttagctttctgatgcttataatcctaaataaattattcagatgtgggaatagagtataaatctctaaacatcttgggaagtcaggggatatgtccagtgtgtctttattatgcctctataaagaaaaatggccctgagcactcagctttctctgagttctgtaccgtgagtttttttttttttttttgagacrgagtcttgccctgtcrcccaggctgaagtgcagtggtgcaatctcggctcactgcaagctctgcttcctgggttcatgccattcttctgcctcagcctcctgagtagctgggactacaggcacccgccaccaggcccagctaatttttgtatttttttagtagagacggcattttaccttgttagccaggatggtctcgatctcctgactttgtgatcctcccgcctcggcctcccaaagtgctgggatgacaggcatgagccaccacgcccggcccgtaccctgagtttttgaggcttctcttgttagtggggccacagggttctgcctccacaattctttctcagtttgttttgtttacttagaagtatatttttcttaggtttttttccctctccccaagtagaaatatacccactctgtcagctttatgactaggttatagcrgttccatcctctgaaggtcttccccacaaaacctacccctctccttcccctttcttttctacccatgctgcattgtcttctggtttcagttcccctcaatgaagtcaggtcaggtttgacctttttttttttcaccatttttgaatgcttattaagtctcacctgtggcagttgtagagttcatgtatttcagtaatccttcaagttattttatttattcattcattcaacagatttgtcagcacctcttacaggccaggtatgccaggagcaaaggatagagtgggaagtgggtgaaaaatctctttccccttatggggctagtttaggggaagaagacagaaatggatcaataatcatagaaataaatataaaaggccaaacaagagagatgcagcaaaagaaaggtacatgtcccctaaggggagcattggcctatcaaagaaggtcaaggaagtgttctggaggaagtgaggattgagctaagatgcgaagggtgaaccagccttaagctggggaaggttagccactctgtggtgtaggagctgtggaatcatagctttgctgtacaagagggcgctgaagctctgacagcttgaatgacttctgttaagtcatatggaaataagagttaggatttgaacccagacctgactgagatcatcacccaagtgtttacctgctacacgacggtacctggtggaacagtgccaggctgtgcatagaatgcaggagctgccaggagcatgaagcctgatataacacactgcgttcatccctgacctctgaaatgtggtaactggctggccaggttcaggcatttagggagctttgaaagacctgcatgaaatctgttcaatcagcggggctaccttaaggaagagtgagttccacagcatagacagttgattcctgcaaggccctgagacctttaaagagagaggagtaatcaatttagttcttgtactttaagtaatgaattatctcagtttttgaggtttgaagggaagtggtggaaagttgcagaagatgataagctattccacattctgaatgttacagctagaaaagaaagtgatgacagtgacccccaatgatactttccttgtctctctttctgcttgtttctttaccctgcagaacagctaaccggaagctacatgacagtaatgatggccttagaagtgcccttgaaaacagttatagcaagttcaacagatctttggtatgccacatagttttaccatgtatttcattctttctagtggtggartattttggtgttgatgaaaataatgtaatttcttaaaggagagcctcaagtaagtccttataataatgagaagatctttccataaaataaaacgaggcagcatttttccaaattaaaaaatatgctactcctctgaagaaataagtgtctcaatgttaaccaactctttttatagatgttctaggaatctagagataggtgtgtaagatgggatctttggcctgaaagagtttagacttgtgagtattctttatgccagtgagatgctcagaatrggagccttggatttcaaaccctcctacagaaatcagcttagctcatttggaactttaaggacctctcccagactgcatttgtcataagacctcttatcccacttttggaagtcagcttcatgtgtaagattccagggtcgtattgggatatggaggagtcagtcactaagccaaattatggttcaagaagagacacattcaaggaagttgagttgcaggatcctggcaaagtggggaaccatagtactcctttatggaatatgcagtagggtttggacgtaagataggatgaggaggagagcgtactatggcagtcatcttcgttgcaatgtttcccttgattttttgctcacatttgctcaggtagtrtaacaaacttttagttacmttagaagtttgagtagtgtgctacagttttaaaaaatgggtttgtgtgtacctatgtgtatataaaatgtttacatgaaaattacatgaactaacaaatgattacttctrtattacagcatataaataatatctcaccagggaatacaatttctagaagcagtcccaaattcattggtcattcccctcaacctctaggctatgacaggtatgttaactcgtcttaactttctgttcaagttcagaatcacagttaaaaggaaagtaaatttccttggaggtggattaaaataatagaatatactttggtcactaatttatattttctatgatgttaaaagttctgaaacatgaatcatgtaaaaattaaaagtgtttcagagagggcaaagttatttcctgaagatgttatgagttagttttatatatgctcatcattacctcatctctaatcatgtcttgtttcttagaagcagactcaataagagatgtttcagggaaaccagcagaattatagtatatgatgctgcagtgtttctggtatataatgttgaaactattggcatgatctgtaaatatttaatagctcagcataatattatatgagctatgttgcagaaaagggaaactctcaaagcaaatataaatatcactagtagatccttgtaaaatagctactgtattgaaggagtcacagaggcttgccaaaagttagaatttagccttgtgtttaatcaaatgaactgaaatattaggccttttattacttgagacctagtaatcacttagagattacatgagtgtatgtgtatgtttatacacatatgtccagtgttgctagttaattttgtaatatgtcaaaaatttgaaattagaagtgaaagcataaacaaaaagtttccgactctctatttctttgtgactttcagattcacgttcatccccttttcatttgggtacttttgataaaaagaataatgtacttaacatcctggtgttagaaatggtcaggttgccatttaggaagacctgttacgaaggcttattggtgatcatttctaagaaaattgtatcaggtttaagtggtttctactgttcactgattagctcaataaaaaaatttaatggcttgatttatagatggctgactattctgttattgagaaataatcgatttttaaaaatgtgtaggtgtgatgtcatttttgactaatatttaaaactgattctaagcaaattggggggaaaggtatacaactgaaaagtatttcagaaatttcaccatgattcattttggaaagattagacaccatgaaagcctcataagaactggagtagagctcatcaacgaaagattctaggggacaaagtcatcacgtccccagcatgtttgagtgacgtagcactcatgtgcctacctccttgagctgtaatgagaggccaccgtagcctcaacaccatgccccttctgggtgtgtgtgggggggtgattattttgacataagaagataacattttattttctttttgatgctaatataaaaatgtaataaaagcatgttgtacatcagattagatgtacaataaaattgtattgtttttatagctttatttggttttaactttaaaatttattttggctttgttctttgcaagaactctaacaaagatttaatttgttttgtacttttacatagttaattataatgaaattattgagtgttggcaagatggttgactttgaaaaggatatgcagttcaattgagtttgagaaagtttgacctgtacctatgtttttatttttacttttaaaaattttcaacttttatttaagattcagggggtacatgcacagatttgttacatgagtatattgcataatgctgagtgtgcctatattttcaatttagagtctagatgtttattcaggtgaattcttaattcagaacttsatgttttctttgctccttgtcaaaatacaagtaggcttaaaataaatcataaccagtaatgaagacatggaactgaagtagtttgtagtatattataattagaatggttttcttatgtgctttatagatggacctaaaatcagtttcagaaggagagttttataaataatgcaataatatattggcaatatattttcattgttattgttattaatagtatatattaacaataaataaatattaaaatatattamcaatatattttattgttattgttattaacagtatattaacacacacacgcacacatgcacacacgtagctagctatatagattgagttatgatataaaattcttggctcagaataaagactttgtaattgagcagtattgagagagagaaagttagttacatcatctttttaattaattttaaacatttgctaatggcataaaaatacttttgacttctcagatttacatggctcacacttaattatattaagcttaccttctctcatctaagcatatccacttcttgtttctcatatctgaagacctatgtatcgtgcccattctccctttccaatgattcgtgtaagcaaattggtagggtggtgcccagggtgtagtgggtggtaaataagtcataaccataattggtaaacttagattcttatggaaatcaaatggaaaagctaaagtaaacaggaatgtatacagtttcttatgattctcttatttgatgtgaatttctccctcacttataaaatcttcagagtttcactaatggtaagatctatagaagtcaggagttccagcctttatctgaggcacctccctccctatgaaacrtctcccagaggggtgtttccagacggtgtgtcaacatttagtggcagaaaacttacgtgtcaaatcatacattccagtcatgtttctaattgcttatttttatcagatgtttctaattgcctatcattttttgccatgttgattagaaatatgacacccagaaaagcttatcttattttgtcttgtgcaacctgagaggatgtggtcttcttcatgtatcagctcttcaagtatttgaagagagaaaccattaagagttaagttgagtacactgaatcttatttttcagctctgagggtcttgagtctgacattgtggttgccttttctgtttgggctctcagcagcccttttaagtagagatgttatccagaaatggacacaatgttcagaatatggtctgaccaccttagagtaaaaaagctcatatattctgcatacatttttatgaatacaacttgcgattgtgtttatgtcttaggtactctaattctttttgtatcaggaaataaagaacattatttttttaatggctttgtttgttaagtgtttgatgtaaggttctttatcttaactgattgctgcatagaatgaactgatggtgctttgagcattttatttcccctaatgcctaatcatgaaataacactgcggctcttagccacagtcggcctacttgattccatctaatggcatgtggtctattgcctgtatgttcttgagcatttccagccctcaggtaaattggtcttcccctttattaccaggtcatcccgctcttcctatgtggatgaggactgtgactccctggccctctgtgatcctctgcagaggacaaattgtgaagttgacagcctgcctgaaagctgcttcgacagcggcttgtctaccttgagagatcccaatgagtatgactcagaagtggaatacaagcaccagaggggatttcagaggtcacacggggtgcaggagagctttggaggtgatgcttcagacacagatgtaagccccagaaaccactgctctcctaggccttctacgtgattgaaatctgtcaccttatttgccttctatctgtcatggaaatctgttttaaaggtcatagatgtaaagcatagttagtaaaatgctttttcctccacagagttagggagaaattctcatagattgccattcagtgtcactctattccctaatattaatagcattgactgttgatttagctgcatagttttcttctttttaatccataatgtatacattttagactttgtattttaactgctgacattttttaatttaactgctgacattttaaaaaaaataggttcctgacataagggatgaagagacatttggtttagaagatgtggcttccgtcttagactggaagccccaagggtctgttagtgaaggcagcattgttagttcatcaagaaagcccatctcagcactctcgccccaggtaggtggtctccgagacactcctattcatgaacactgcttattttctgtgcagtgttacttattaggatgaaaactggcaataccgttatcattcactgtggcttttccccccagacagacctggtagatgacaacgctaaatcttttagctcacagaaggcttacaagattgtacttgctggggacgctgcagtggggaagtctagtttcctcatgagactttgcaagaatgaatttcgagaaaatataagcgccaccctgggtatggctcgtatttcggttgataatgggaaaatgaccttccttagcttgattttctcttcttcagggattacatacacagatgctcagttaacagttttctctttctctgtgtatgcacacatatataaatgtgtgtgtgtgtgtgtgtgtgtgtgtgtgtgtgtgtgtgtgtgtgtgtgtgtctcctagtctatggaaaggtctttcttgttttggccaaggcctgcttttaggaaaggaagattaaaatgacagagatatctggctgggtgcggtggttcatgcctgtaatcccagcactttgggaggccgagccaggcagatcacttgaggtcaggagttcaagaccagcctggccaacatggcgaaaccccatctctaccaaaaatacaaaaattagttgggcatgctggtgggtgctggttgtcccagcaactcgggaggctgaggctggagagtcgcttgaacctgggaggcggaggttgcagtgagccgagatcacaccactgcacttcagcctgggtgatagagtgagaccctgccacaaaaaaaaaaaaagagagatatctgcttagccaatcagatgaattgaatcaaatttagatcctgagatatcagattcatttattcagcatgtatttcctgagtcccactaaaaacaagatgctgttgtaggtacaaacgatacaccatgaagaaggctgacaatcccagcctgcactgcmcttacatcccagtggagggaaaaggtacaaaaaagaagtttagggagaggtgcggttttacrcagggtggccaggaaaaccctttctgctgaagtatttgatgttgacaaagtgacaatatggattgccactttgtcattatggtcaaaatcatagccagatatatgatccgttacccaccttcacaacagaacaatagaacaagtagtatcctgatttcccaaatttgcataatagtaaaaggagttgaagatatgcaaattatcatttatttttcttcttcgtctaaagagttcttattttgatcacccgaaatgttagaacagactgattgtcctcttcacatgagtgtctttgtaaatttatggttctctgatacactcttcaacattaacaaagctgaaagtttacttcaatttgattcataaaaagactacatacagtatttggttcagttgtcagagaccatgatgcatgtaaatgtgtgtgtgcactaacgtgtgtatatatacacacgcatatgtatacatgtttagatatacatacatttatacatatatacctacatatacatatacatacatgcatatacacaaaacacgtatctgcacctacacacatacatacacacacgtatacacctgcacattcatgcatgcccactcatacacacatgtacacacacccacacacacacacacacaaatatgactgagttcatccagtcatcagggaaaataaaacagatttttcccttggctcataaattaaatcattccccaagtcagccaacctgcagatggtgcctctgcacacacgtgtggtctgacttgtcattcctatttgaaggtcactctccttaaaggtcatgttcattcctccctccctggctgagctgtgtattattggcttttgcttcatctaaagaaggcttgaaagtaaaaagccaatggaattatttacatcgtgctctccactctcacattccttttcaggagttgayttccaaatgaaaaccctcattgtggatggagaacgaacagttctgcagctctgggatacagctggtcaggagaggcaagtgcattccgcagcgctatgggatatcctgggtttgcattaacaagccttgcaggccacttgatgttcttcatactcaaaattctataattataacatactttataattatatgcataattacatgtataattataaaatgtattataactttaaaatgcttayattctygcacatckccttcatttacctatgactcctgtgagaagaggatctttaagcttcttttgagcygatgttcagttgagacagagagtgccctttgctaacatgagaggcagcatttttgagtgcagtgacagcctgaggaactccctggctatagaacaataaatgatggagaagagaaccagtcagctccccttgattaagggcagaggcacaaaccrcatagcagacttgcatctggtgatggcactttaccttgcattcattaccgataagcagagcattaagcacagattttaatcttgtttaactccttcggaacaaaatccattcaattgttcaacccgtaagtatggggtgcctgcctctgtaccaggcattattcagcatgctgagattcagtggtgaacagacaggcacaaatacctgcccccatggtgctcatattctctagcagattgggaatttcaacatataaaaaatatttgtggttgacatgactgtatttaaaatacttataaaatattgcactgggtttcaagttagggcatgtgtgttgaggtgttctcttcccamggtgaatctcctgacccccatgtatgtaaagtcctggtatgttacagcgttccacactggtagttcctccayccacccacaatactccctaaccaccaccaccascaaaaataagtattctctagttcgtatctccttccagcctcctctgtgtcccacatgtgggttctggtagcttgttgctgaggttgaaatttttggaaactgtgctctcaacctttccctggttgtgctctggggattgtagacattcttggggttgtttggtagagagaaggattggattttctaagtcggtcacccagattctcatcatgttacctttcattgggtcattcgagacctttgaaatgcctatgtctcagtcatatattgcagttagagtcttctcaactggtgttgattttagaagaggagaaaaaaatgagcataaaagagaagaagaatgaggcaacacaaactgactgatgatgtggttttctctttctcagattcagaagtattgccaagtcttacttcagaaaggcagatggtgttttgctgctgtatgatgttacatgtgagaaaagctttcttaacatacgagaatgggtagatatgattgaggtaagaaatcataatggagaaacagaaaattacacgaggaagttttaggccatcttggaaaatgctgtctctcttctttgtcagaatgaacttgattaggaaccattgatccaagccatcaggaagaattggatgctacaggcagaactggcagcattcatctcttcctcaggatttgggcacatttccctgaagccaaggacactaatgaagggagctttggggaataaaacttctaggttttcttatagataaaatcagaatcccatcgtaagcaagtaaaaatccaggtagcctaggaagaagttattacaaacaaggagatggtgtggttggttgtgtagtgtagttgggggcatgtgggggcatccacgggcatgggaagtacaggtgaaacaccacctggatatgagcgtgcgtcaagtttcaaattgtatgggagctctcttctcttctcaaccttattctggtagtgatttgggatctttagatgtctcaaggtactaccgaaataccagttgatattttaaacrtgggcatagcttctgtgctttctgtggttaaataagatgatgtctttcacctaaggaacattcctgtcctctggtttcatggtaaataatttttaaaagtaaatgattttgaccccatttagcatgctgccaacagttactaacataacactacagttccagctatggttcagcatgctctcttgaaaaataaacttttcaactaagtatattaatacaacttttcaactaagtatattacctgtaatttaagaaggcattaaattgcagtagtggctgaacagaggactggttgctgtctgatctcaatttagcttctggcattattgttctctttctaactaaagaagtagtgtgagaaatgactgattgcaattggcagtaagactttgacagtgataaataaatatgcactctgttctaccaacttatcatggcttaaaatgattgtaaacacagtgaaagtgtgtttacatttatgtaacatttttacttcacaaaatttcccatgttatagtcatctctctagcatctgagaaatgaaataagaaaacatattatcctaagtttttatgagaaacttgaggcatagaaagcataggtagctcttgcttagagttatttagtggttaggaatagaataggggctcaaaccgaacctcctgattgaacagtggttgctgttttgatatagcaccagtgtgagcagaagattacttgaagaagcctctgatatcaagaaggaatcccaaggactrtaattccagcactttgggtagtcaaggcaggcagatggtttgagccgaggagtttgagatcagtctgggcaacatagtgagaccccatctgtacaaaaaatacaaaaattacccaggcatgttagtatggacctctagtcccagctgsttgggaggctgaggtgggaggatcacctgagccctaggaggtcgaggctgaagtaagccgtgattgtgctactgcactccagcctgagtgacagagcgagacccccatctcaaataaaaaggaatcccaaggtataattagtgcatagaggagcaatggctactcaagtgaacaaatggagatccctgggatggagcaataagtccagagaataacagataaccctaactcatccatactagtgtttaaaatccacagcaaaactgttttattgttgacattttggattagtctttatttaaaatctttgggttatgctcaagaaaaggaggcacaaaaggcaagatcagccacagtgaaataacccttatgtagagtggcccactgccataatttgcaaagcaacttcacacgttgtcatcttttccgccattggtatcacgttttcctatggtctgaaaaggaagaaaactatagaagagatgaattcttaagtttgttatggatgaaaaattacatactactaatggcatttgactttcaccttagaaaaagaatgagcacagtgaagtttctccatggcttactgtttctaatttgaggaactcctacagggacagtttatatggccactgtaaatatgggcggaaatgaatggtgtgatcattggggtaagccagaggattgagaagctgtagactgtcagtggtgaacagaccctctgaattaataattgatatacttcaatggaaaactgctgagttaaaaaatcttgtaatagaattatggataaagtaaaattatagccatttgtttatctgtcatgaatattttattgatcgaatatttgggtaaaagctgaatggagatacttgagatgtaatatctcttcccagttttaacacattcaaaactattttttgaggatctgcccggttcctgtgtagtagtctaggttctcgggatatatctgttaagaaaacagagccctgtccttatggagcttgtgttccagtgggggagacagatgaaaagcagcaaacatagatcaataaatgaaatgatatggtagaaggtgataatgttatacaaacaaaacgagagcaggttaaaaggcctgacgataaggaagtgggctgtggttttcttcaaggtagcctcactgggaaggacatatttaagtcaagacttgaaggaggtgccctttacctctgtggctttgagaagtcatttagatgcctggattcttgggcttactgaaatgaatatttgactaataactttcaagtgatgccccttgcatcctgaggtcatcaaagaacacaattaacgagcgcattaatgagcgaaacagctaattttggagagggccattcattccctttcctttgattttattacactctggagcctttcagtccaaggaaagttgcctgaagagaaaggaagtcaatgatgatttcatgttgaggcacgttttttgatcctgtatcaggaatagccccaaacccaatgagtacgcaggtatctttagtcactgcaaagagtaatttccacatgttttcatcagggctgccacttctcttatttaggaaccagaaacttgtgtttctgtgctagtcaggttgtcttcttgtattctcatcatagcctgctgaggtgggaaatgccttcattcagtccttcattttacagacaaggagactggagcggaaagctgcagagacttgcctgacctcacacagccagtgggtccagctggtggagggctgggtctcagacttgmctctgccacactcatctcacattctgtgagcttcactgtgactgtgggaccctgtgacaattgcataggctgacatgggaggcttatcttagaatccattactttgaaagattggtacttgactctttcttagaaaaatgttgaccttcaggacttttatattttgcttttgttgtaaaccagagagcagtgagtgtggaacttccaaactccctttttgtttcattatagttgaaaaattactgtgtgttttataactgtaataatgaacttggcttgtgatcactattgtttaaaataacagttgtagaaaattatgtgggcagcacagccaaatatgattctgtggtcatgccttttgagtttatattggcttgtagtgctctgtgtgctggagataagaaattaacagatatgtgtttcctttgccataaaactgattaatcccagtgccttttagtcttttcattaacctaaggatggggcattatatagaggcaagcgttatggagttagtttggatccaggccctgacccttataccttcttanttaacctctctgaatttcagttttctcttctgtgaatgggaaaatgtatggctgtttttagagatactttgaggtttaaagatatcctctatataggatttggcacaaaggaggcaaagggaaaatggtaattgctgttgctgttgttctgtggtcatcgtaatgtgtccagtgtttgatgtgtgccccattttttttttcttcctggtaggatgcagcccatgagactgttcccattatgctggtaggaaacaaggctgacattcgtgacactgctgctacagagggacaaaaatgtgtcccagggcactttggagagaaactggccatggtaagagtgaggatgcctcagaattagaagagaacatggggtttaatggctttgaagtcggtggcctttcacttttgtctacctttgcttgagaggtcctttgacaaacctcccccgtctgaggcatctgtccttaacacaggcaaaactgccatgactcccacctcttttatgccaaggattaagtcccttgggaaaataaaacaatcacataatcattttctcccattgagtatcattgacagaaaggaacccaaataatcccatcatcttcctcctccctctcacctagttcctagaaaccttctctagtcctggaatccaagtaaaggaagaaaatagtgtcctattttgaaaagatggctttggtttcagagggttataatgccaaaggcagaagaaggtacagtgtctcacctgtgtggaagggaattggatgacttcttttcttctctaagatttgtgtttagttgatataaaaaatcattcccatatacaaatgcatatgcattttggggtatgcatttgtatataggaataaactcattcctattcagattgttgtcatgggcagtgtttattctcccatcagtgtcatctgtcatcatgtcagaatgctacctagctctgttatgacctgtcttacccatacaagtagtcagatgcactttgggtcaaataaattaatattgcagcagtctgatttgatgttgatagtgttgtctgtcgtcagcaccaggaaaggactactctgtagcatacgtatgtgaacttcaaaaagaagtttcagttttaatattttaagctggaataatcgttcttgttttaaaatttagaactgcaaaccaaatgtgataaatgtcaaaactaggcaatgaaatgcagaagagattcactcaacccatatttattggtatccaccatgtaacaaacacttcattgtgtgctgggccaagagcagagaacaaagcaaacagtccttgccctcgtattgtttactgtctgagggagacagatgttaaactcatgaaatccacatgctagacatggtctcacacagatactttgaaatctagttattcttggctgcctgccagctttattccctctccatgatttcgcagagttcccaaagtttgcttccttatgcatctcttgacctccacagtcctgcatcctcaaaggcagtctctgtttcaccccatatcatcctggatgtagaagtcaacaccagcactgatggtttctaccagaaatgcatttactttgtggtgtttgcagattttctatggatttgtgggcttacgagtaaaggtcccattgtggcatttttccccatttcctggcttttctcattctccctgttctagagcaagtgtcacctccttcccttgtcccacacaggactgtttaacccacacctaggcccacaacacttagttctcctttattaagagaaaatgtctccagctagtcagacaggcacacaaaaataacttgagcaattataattgtggcaattgctgtgcatgaggatcgcagagtgctatgaaagtttatgatgggaagtcctaatacaaacttttcagggttaggaatgactgaatcttaactgcaaggaaggattacctaaaaatcccaaaagtaggtaggtgtcagactggtggagggtggagggaacctaggtgatgagaagagtaggtgcaaaggtcccaaggtgggaaggctttgcggacactggagaattagaggaaggccagggaaactgcagctctgtgagtgagkgggggatgagtgaggtgggaggtgaagctcagagcttgcctggggccacgtgaagctgggcctcattggccatggaaaagcattttcacattacctaaagacaaacaggaggcattgaaaggtttgaagcaggagagtgacatgatatcatatgcactatggctgggaggttgaataatagagaactagaacgtgtccattggtttcagcaaacgtggaggctgctggatccagaagggaaaagttagcgggaaggagrgtgtgttagctgctggccaaagggaaacagactcttgatggacatttaattcctgagtggttaccttgaactcatttttatctgtctcggaatatttgataaagaacatttggtagcatgtgttttgactgttggaaataaaaaccttcaaacatgaaatattctrtttttttaatgtaaagtaaaagtcctccaactaggaacttttcctggagtaactatgcttaaaccattttctttgtaagtactggaactctgaattcagtttcttagctattagttactcttagcatgctcagtaggaacatatttttattttactgattttaaaagctaaaatttcaggaaactcaatgaagggcttcatttaattgtgtgtatttcttttttacagacgtatggggcattattctgtgaaacaagtgccaaagatggttctaacatagtggaggctgttctgcaccttgctcggtaaagtttgggaaaatggatgtaggattgaattttcgcttgttgcatatgacacatttcttgtccataatgtgcagatagaatatatgcgggaaaacactctcttatctgtcagtcatggtgggagaaataaatatgtggatattataaaaactggcaacgttgctgtcaacactggcaaaatatctttactaccaaacaaaagaggtgcatctgaggtgtcattgacatttctgaaaaatgtcaccacaaagctaatagttgasgtgtatgaatcatttccaggaagcagattttatacacaagggactattatgaatacaactgtctattatgatattttcccgggcaaaaggggaaaaagaaacaaagcaatttgtatgttatgccagttagaaacactttgtcagaattattacccaggtaattattaagctaaggcaatagtgttaataataaataacattttggatgtacaatagaatgaaaatggcatcattaaagaacttggatataaatgtatgtgttttaatccttgaagtaattcttaggaaataacattctacattagatttttccctcctacctggttttctgctataaatgaaaagattattctttactggcctagagggattaaatatcamaaaaaggaaaaaaatcaaaatgtgcaatacaaatttcagagcaatcatctttaattgcagacaaagttaaaatataactttaggcatgtcattctttttctgattatttgtaaggttttataagaatcttaattttagtatgataattggccttttctgctagtaaatattgatagttaaaatactttgcaatatctttaatgctgtttttcaattaatgacttagggccgggtgcagtggcccacacctttaattccagcagatcccattggtttcagcaacatggaggctgctggatccaggaaggaaaagttagcaggaaggaggatgtgttagttgctggccaagaggaaacagattcttgatggacattaattcctgagtgattatttttatcatttttatgagaggcaaggctggaggatcacttgaacccaggagtttgaaactagcctgggcaacatagtgagaccttgtatctatttaaaaaaagatatacacacacacacacacrcacacmtgcacacatacatatacatatatacattaatgacttggcatttatagtgcttrataaattagagttctattaatagaatgtttggactagggctacaggataaactgttgccctcacttaagagaatcaggaaatggactttgggagtcctgcttggcattagtttgtggcagggttggcagatgccctgtattcacactcaagagtcttcgaacatttccctctttgacatcagtccaggagagagagtcacctccccctacaasactggaaatcatttttgtttaaagcaaaaacagtgctaaccttgaatgtgacctagcacattttttccttttgcattaggctgttttgtgcatctctataaaggaatacccgagactgcaatttataaagaaaataggttcaattggctcatggttctgcagtctttacaggaaacttagcactggcatctgcttggcctctggtgagatctcagggagcgtttactcctggtggaaggtgacggggagccagcgtgtcacatgacgagggagcaaggagaggggaggggctactctcttttaaacaaccagatctcctgtgaactcagagcgagaactcactcatcaccaagggatggagctatgccattcatgagagagccacccgcttgattcaatacctcccacgaggccccacctctaacaccgaaggtcagatttccacatgagatttggaggggacaaacatccaaaccatttcatcttttaaaagaaaaaaaaagtgaatatttgaacacatatacattcaactaaattagatgggktwttttgtgtgtttttttgtatgtttgtttgtttttggctgtgaatagtaggagaatcatggactaatatcacatttgtgcaaaaagagtcagagtaaaacttttatctgtcgggttgaataacagattccacgcacttatgggtgcacagggaacaccagctattttggctcaacaagctacattcagtaaagaggggagagttcagtaaaatgcagaatttgacttcactaaagatcaaataactgttggattgtcaggtttttacttttcaaatggttgtgttggtgtttcattcataagttgctgggaacagctggatggaagtgatatagttgctggcacagatggcagtggggaaggatctgcaggtctttggagcatccctggtatgccttagccttggtcagcggaacactgcattgctgctcccacgcagcagtaacagatgcagcagatcaagccttgcatgtggttactagctgctccccagcatattggaggattatggtgtcaggaggctcaaagtccattcttaaatctgtttctaaatagctatgaggtcttgaacaagtccctgtatttcttttggcaactctaatctgtaaaatgagggaggggcctaaaggaaatgatctcaaaggtcctttctaattctaagagcctgtgactctgtatatgacagtctgtactccactgaatatcttaatcattgtttaatgctcagttgtcttatggggtcatattaaagttatatggctccaaagtgccccggtgaagagtcgattctctttattatgtcataaagatgggagaggctgtaagtttcctgtgcctttctccccatctgctcctgtgtggcatgttgggtcagccacgtgttggccctgcttacaatgaagcttcgacactagcttgtgtgtgtttacttaaaacacctggtttgcaaaagaattttgataactaggttatttcagctgcataatggataggttatagttattttaaaaagctttagacaagtaaagaaataagatragcttcttgcgaatcatttatcatagaggtttttgttttattgttattgcattatggcctggctttgggcttctagtgatgttagtgatgtgttaaatataaaaattataaataaavcatatgaagaccttaattgctttatacttagccttcggattggcttttcaaagtactcawcccttaaatggaaatgttatagtctccacaggtaaaattaccatttgttgaagttttacaaccttgggaaatttatgtataatgcaaaacatatatgttctcaatttagatttcatagggtgagatcatataatgtcataaaactaggagaaggtatgggtttgcactgtctcaaacaatttatttttaaagggaggccataaatatttggttaacaacctgaactactctgcattttcttagaaaatctttcaatcccaggaagagtttctcctaggaatgcaatttcyatatagtgctgataggtcatckttcataaccattgtcccattagtaagtaaattttccatcaccagaaccacaggctttaaacattttgcagtagattcaagttcaagaggcatttaattatcaactgcctgaaattggagaaaaacacaaaaaacttaggctgatgtatcagttcagcatcagagctgagcccattgggtgtaaatctgtccataagactgagtcaattaaactgcagttgttaagcgtatggtagattttggtgagccctaattttcccagccttaaatctgttttagatgtttggaattgtatctttataatttccttaaagtggagcatgcctgcatttttggctgaaggccagatgaaaatgtgggtatatactttcccccttaatatttgctttcaggttcaataatgtctgcattattggcacttaacacgtgcatagccccatgctatgttcaatagagacatcaagggatttaaagactggccttgtaatttaacattacagaaaagaacatgacaatatatgaccaggcagccatatggtacgtagctgatagaggccattggatctacaagaagagagagatgtgaattgttcagtgaagatgctatggttattgtacccattttacagaagaggaaattggaaattagaatacttaatctgcttgctcagtgacacagctagtaagtggcaatgtgaggactcttcaccaccaacctggatcactggcttgctgtttaaatgttggtaatctcagggtctctgactgtcctctctttcttttcactctctgtctgyctaatgtcttccatccacacagcttctggaaccatctctacctggtaacttccagtttttgtatttttaacccctcacgtctttttaaaattccataagcatagagtgaacccccaccggaaacgccatagccatggtgactctgcatatccaaatcctggtgtgttcatgtggctttaagcttgttcctcagtctgtattccctttctctggaatctaccaaaattataattaaacaatagtcacctggagtcagtcttgattccttttctctcttgcttcaccccttgcctccagtggcttctgaaggtcatctttcagtctcttttgaatccatgcatttttctcgctttctccctttttctgctttggttcaggcctcaaaattccctacctgggctagtgcaagaatttctgcctcagggtttctccaatatcagttcatcctctactgtggaatcaggtaatctttataaataaagatccagttaatatttactttcttgcgtccaaccccacattggtgtcttactgaaaacacagagtcccagctccttagcatgtggctgatagcccatcacagcctgatatggtttggytgtgtccccacccaaatctcaacttgaattgtatctctcagaattcccatgtgttgtgggaaggaccccgggggaggtaattgagtcatgggggccgatctttcctctgctattctcgtgatagtgaataagtctcacgagatctgatgggattatcagcggtttccacttttgcttctctctcgtttttctcttgctgccaccatgtaagaagtgtcttttgcctccccccatgattctgaggcctccccagctacgtggaactctaagtccaattaaacctcttttcgttcccacttttgagtgtttttatcagcagcgtgaaaacgaactaatacacagcctgacctttctggttgaatttctatctctttttcccaaatgaatgataatctgtagacacagcaaacttcatccaatcaggccaagctcttatgcctctgcctttctgcatgctgttccctgcatctggaatctccttttctgttctttcaaaaggtctctccaatgtcaaaagtctctatgaagccccatttccgtgaagcccacaacacatctgtgggcacagagtgcatctgtggtagctgctgtctcaggaccatgaaattatttatttagacatctgactctcccttaaagctcagtagctgaaggtcccagagcctggcataagttgggcatttattcaatgacagaacgaccaagattttgcatttggaagttgtgttactcttccgttgtccttgtaatgaactcccacagatgtagaggcttaaataatgcaaatttattatctgacaattttggaggtcagaaacctraaatgagtcttcccgggtgttagggtttgaattgtgtctcctctttcttctcctgagtctctgttgcctcatctgtgaggtgaggatagtactactcacccatctcctgtcgggtgtgtgtgtctggggtatatatcaaatatgaaaaacatgtatattgcatttaccagctgtcctatagctagaatcagtttatttttttccctgctgagatgtcttctttccaattcacagtgcagtggatttcgaaaggtaggatttatcagcaccttctgcagctaagctggccagtttggtagccactagccactcacaatgtggctaatccagttcagatgtgctgtatgcattcaatatagactggattttgaaggccttctacacattatctcattaatagtgtttttattgaccacatgccgaaatgacaatatttttgctatactgggctaaataaaatatattaataaaattaattttacctatttctttttaccttttaaaaatctggctactaaataattcaaactgacatatatggatcccattgtatttctgttgagcagtgtggctctgctggagagacacagattcccgctagtttcagttaagtgcttcatcataaaccatcccaaaacttggttgcccaaaacaacaaccaatttttatttctcacagttggcagaggtggctggatgtcagccggaaagtttcttgactgcttttgcatgagtatctcctatgtttgcagtcagatggccaccggggctgtggctcgggctggatgtcagccaccagggtgcttctcgtggcttcactccacgtggcatctcagtccccagggccactctggtggcctctctccattgaggaaccctggactccttgaaccctggacttcaaagggggtagagattgctgcagccccgcattataaacacttgggtttagaagccacagaataccatttcctccatattctattggtcaaagcaggtggagaaccagctctgaccaagagggtaggggatcaaaccttcacctcttgatgggagaggcatcaggcactgacaaggaagggcagaattatttggggccatcttagggaggcactcatctcgctggcagagatagccgttcagcttgtctaaggtgagacttctggtcttcatatttcacaagcatccccagtggctacacctggaaggatacttccttagggggttttcataagatcttggagagtaagacattttttcgtgagtcttgcctctagcagttaatactggaagaagcttacgatgacagaaagggatggtggtaaatccattgttacctccatgatcatgtataattaaagaacggttataaaatcaccattgcttttgttaagctcagcaaccattacatgaagctggaaacctggttccagagtgttaaggagcaagctgtgtgtatcgcaggttctgcagcatcctgaaacctcaggagagagtgaggggagaagggtgtgtgtgtgtgtgtgtgtgtgtgtgtgtgtgtgtgtgtgtgtgtggcctggtactcagaaaacaggtgctggagccagcctgtgtggttttaatcccacttctgtagtcatgtgacctaagggaactgtcttaacctctttttgccctcatttcctcacatacaaaatggggcacagcaaatttatatggttcttatgaagattaagtcaagacctataaagcattaaaacaatgtctataaggccgtgcagacattcagcatggctatttttatttctacagaaccatctgtggcttagtttttatacctcagtaatcctctctctctctctctctctctctstctctctctatctctgtctcagagaagtgaaaaagagaactgacaaggatgacagcagatccattaccaatctaaccgggaccaattccaaaaagtcaccacagatgaagaattgttgcaatggctaaatcccaaacatccttggcctgtgaagtcttcatttccagaatactgaatttgtgtgacttatttggctcttaacagagtggcayatcctactgacactgtcctatggagagttacagtgcaggaaacctgaacccagctctcaggtccctctggaactttggctcttctttgttttgtctcagtgagtgatttgggccctctggctaaatagactagtcatgtccttacaggtcttaaaagataacatgtaaatgtttttaaaatggtaaaaaaaaagaaatcacatgctcagatcaaagctgtagaggaaactgacataattagattcatgtggtggctgaattaggttacccacaaagtcagcatttaaatatttgatactaaagttctagtaagaagggattctcatcctagctttgctgttaactggccttgtgaccttggacatatcacaagcccatgtcggatctgtttcttcatctgtaaaatgtgcagcttgccctcaaaggccttgcagcccttggcacctcagattctgtgggaagcagtaggacagagagtgtggtggcccacagttaataatagaactatggttattcctgctttttaatattggagtattgatttttctcacttctgaaataaggacagaatttgattaaaaaatggaaacagaaatatctattttttatgtataaagaaacatgtttgagacaaaaatagttgtatataaaaggatatttcataatctcagaatagttacaaagctcactgcttgaatttggtgttaaaaattctaatggaaacatgtaaagccacatactactgaaagcacaatgcccaggaaagttgtcactcttcacttaagggagtggttgccaggggctgagaaagggaggatggggagtgactgctaataggtatgtggtttctttgggcgatgatgagaatgttctggaattggaatagtggtgatagttgtataactgtttgaatgtactaggaaccactgaattgtatactttgaaagggtgaattttatggttgtgaattatctcactaaaaaaaatgctagtacttagagtgatgtaacattttgcaaaattttcattttcgtatccctgctgatttcaaaccttcccatggtttagaagcataacctgtaatgtaatgcaagtcccctaactccctggttgctaacattaacttccttaagtaataatcaatgaaagaaattctatgcatggttttgaaataatgtccttgaaagaggaatcaccattaggaaaggtgagtcagggtcctttgtttaatgtgactagtggctcatcatcaccagtgacctggttgggcctactctccttccagaacctgcattgcttcccagacctccccactgagatgcctctaagagccaaaggagtcaacacttgagcctagggtgggctacaacaaaagattctaatttaccttgcttcatctaggtccaggccccaagtagcttgctgaaggaacttaaaaagtagctgttatttattgtattrtataagctaaaaacatttatttttgttgaatcgaaacaattccatgtagcaatcttttttctgttcacggtgtttgtgatagaaccttaaattccgcaagcatcagttttttgaaaaaatgggaattgaccggatagttacaggcaaagattataaatagctacaacatcatttaacttttataaacatgccttctctctattgaagacatctgatatttttgctggaaagttggatctatcctcagtaactctgccatgaattcctgtttcctggttccagaaaaagaaaagattacatttctgatcataaagaatgtcttgcatatgggaaatttttcaaaataaggggggtattatttatgtggcatgggaaaacttttgccatggctgtttgtcttagtggcatcttttgatgacattggatcagatatatgtagatgctgatatatgggacacatgtttaggttttggtgcagttgcacaaaactgtgttagtttatatgttactgtgttgcctttatttattctctccaaagtgtctctttatatttgttttacaatctgtgaaagagtataccataatacagaagtattttcatagtctttacctctggattgtcctgtcagtatagccacgttgatgagattacaccagtgcctttgatggtcaaccaatcatctttaagtatttgagccctgataaatattttggtaacataatccaaattagagacttagagctctggttagcaatcatgtttaaagagaagcttcttaaagctctgtatgctgggagattcatgattattaccaacgttttgatttcatgaaggtgttctcaaatttaaagcacattttcagtaagaacaaaaatatttaatgtttttatcttagacttgatacatttgcatattactatggaagttattcaccttgtccctgtttttctttaagatattttaaaatcatagttatactacagtccttttttaaatgtatcctgatacattgtaaaatattttaatttcattgtggaaaataatgttggataaggagatatttttcactgttaacttttagcccatgcattttcataatttatttttttcacttgctgctttatatgacatatgtgacatttgattatttaacacttgatgtgatctgcataaacccaagttgcacaaccctcctgctgaagataaaattgaggttaaagataaagatttattttcatatttgtacagtgatcggcttcagtgatggtttttgtgggcatttattgtgtgtgtgtaagaaatttcatatgtatatattaagtaggcctctgagtattgaataattgttttatgattttgatttatatggtttacattttcattgtgtgggccatatttcgtttatactgtttatttctcttcaaaccttaataattataccataaagtgtaatttttatagcaatgcaaatgtctaaggaactacaaatattttctacgttgtaaattcaataaagcttgcttcctttggccttttgagtgtttccttcagctttactgcagatatccctgaagtaattttaattctaggatgtgtctgcctgaaaccatacctctaaaacacttgtcttttctggccatggcaagccgagtgttgggagagaagaatgcacgcctggtattcagtgctgtggcacagacaagtcatcctggccaacagggcagcaggtagaccagcttgggacaggacagccaggaatagtgaggcctctgtagaagaatgtcagtgttctggccatccgcacatcctctgaggagttagaccttttctctgattctcacccctttctttctacccccacattcccatgcaccccaataggctgaggctacctgccctcactcctgttgtaccttttaaaatgtgtcaacatccttcttgtccttttacttattacatagacagatgccccatgtccttagccacttttgtctactgccgcctcccttctgttgtatgcagtgcttgatactttaattgtcctaattgttgaatggatggtcaaggaattaactggttaaataaggtaggctttgcaaagagtgtctgccaacacccaccaccaccaacacacacacacagacacacatacatgatgatggtggacaatataagtacgaggcagtataatatcaatgggtatgagctctgaggccagcctgcctggtttgaacctggcctcagatgtagtagggtaactatgaacaagggacttaacctctgtgtatcccagcttctttatttgtaaaataagaatggtaacagtacctttcttgtggagttgttctgagaactaaatgagttaatgtatgtaaaggtcttgaatcatgcctgacactttgattgccctcaattaaaaaaacaaaacatttttgcagcaccattggctgcatcagtcttgttcaaaaccctgggtacggccaccaatgaataacagaactccaaaagtgtgccaggtcacatgggggatagaacattttagaggattctctttgacttaagttcattgactacctttcacgtactttcttggtgtttcaatggacacaaagttggggtatcatataggataggttattgtgtagggtggattaacagaggaggaaacaactgagagagaaataagggtctgaaagttagaatggaaaagtgtgaatggaatcatgattagggtaggatctccatttactaatggctgctaggatcaagtagtggaaggaatgaggaatatattagagtctgactgggattttgaatctaaatgatagcaaaagtggtagtgggataatggaattctctaactaaatggaaaccaaactttataatatgactaatagcttgttgaaaaagaaagattgcccatagatacatccccaaatccacacgatgggaatgaatccccaggaaagcatatcattttgcaagatttaaaataaaaagaacaacttttctttccagagaccagcattaaaatatgtttccatagctgaaaatggagaaaaagataaaaatacttcaacttgatattacagggtaagataaattttcaaatgcaaaattctaggaataaccattttctttatttttctctgcaatttttttttgcatccacatgtaagatttatttgtgagtttatactaattttttgtagaggtgggaatttagttgtaaggccctttaacttgtgatctgtctggctggtagttcatgagccacatttcacagcatttgacttaagatttacagagttcctcattgtccttgggatgttggctttctgaatatctttaagtccaagttttcctgcacgttttcccattgctgggcaatggagtagaacttgagagctggataattaccttttcaaagagagtcttatgagtagttcctgtttgattttaggggtaaaatttatgttatttaatttgccacaaatctcttcttgctcattttagaaatggatgttttaccctttagataaaatctaaaatcttcttaacatgatgtcgaaggctctctgtgatctggttcctgcctgttcactcaccaagtcagtcaatatttactgagccccactgtgtcctgagtactattctagacagtggggatacacagtggataagacagactctcaaagagattacattctgttgggggtcgacatcaaactcgtaaacaaaaggaagttccacattctgcctcctcccacatttctccatcctgaagtctacactggggcacaggaaactgttccttatacactccatgctcgctcacctccagctgtttacttaggctttgctttctgcttggaataccattgtccactcgagtttccctacccaacttctgtacatcctgcacacctcaaatcagagatcacttccagcagctgtgtccaaccccaaagtctgagccagatcctctcctccatgcatatctgccccagtgcccatcacagcactttattagactgggttgtcatgatcacttcccttgtgtgcctggcatgtccagtgattccagcctccttttacactttattgagtggggggtaaactttctcctccatggatgcacacttcagcaggctcatgacttttctgattcctctagatcagggttttaagattactgtgccacggacctctttgaagcccaggaacctctcagaatcatgtttttgaatgaataaaataagtattttaaagaaaaccaatgatattgaaaaactgtttccaaaatactttttgaaatttgtgatactagcaggattactgctgctttaatggcacatgaaactacaagatctggtgataggtcttaaaaccaccatgattttgacttagggatgaaggtaaacagtatttcaagacatctgcaagacttcggtgagctataaatatctgtgatttctcttggtgacactcacaggtgctgataatactaccaaggtttagttgccagcctttcatattaaatgaaatgttaagtttaagttagagtttactgaaaataaacatgtaattttttttgtattattcaagattgaaatagggatttctatctacagacccaatgagctggttcatggtcaggatccttgctctgggttaaaaacatatactatgtttaagttgcaaacatatattcagatgagaattcccatgtagtaatcaaaatgccaagcccaacttggtggtgccaagtcttctccctcctccagctcgggtctgcttcagcctggaagctcgctgtgggaagggaggctgggccctcctgctttgtcttcctcactccaccccatctctgtttactgatacactccccttgaggctccaagcaaggggagtatggtgctaacaccatgggagataaatgtcgcagaagaaaaagaatgcatgtggccaaaactcttgcctgccaggagtattgaaggtcaagtaaaatatggcccttgcaggaatatgtttcagcccacctcctgccttgttattgcctcaaaaccactctcatttaattagcacttttagagccatagacactgaggaagcaagaaaaggtaaaagcaaaactaaaacatacaaatccaacagcaaaacatccacagattagcaaactgtgcataagattgaggttaatttggttaagaatcagaaatattgaatgctttctagggtgacatagcatatcatttctctccttcctaaaatcccattaataatagagtcaaagggacttttaaatctatccacaagaacagaagacaataccatcaaaattgtgaagctggaaagcagatggataatggaatattgatataattgagttccaagttaacacacctaagaaagctgaatcctaggtcagtcctgggggagagttgtgaacaattcagatatacatcctggatttctcagaagactcaggaagtgatacaagttggtacctcaaatggtgctgtgaggcaaagtggtgtgaatgcagtctgagaagcagctctgtcctgctgcttctcccatgctacaccattctcccatgctacaccattattaccctgtgcggagtctggtgatgtgttttcttgagtgagaaaaacagagggcttctagagtgaggaatgccactgggtgcagtcacacgtgttggtgctgttcaaaatttggcggaactgatgacatcatctattctgagtgccgaatgctaaatgctaatactcctcactcagctttcgtaacactgatcctttatcctccagagattgagagacttttctccgaagggctgacctaacaagaggaaagccctaaagatattgacatcaggtatgtttacaacaaatggctcccctgatcaccctacagtaaggttcaaagttgacaagttcttccccacattcagaactttaaatcaggtttttagctcccctgagcaatccaaggatcactgggtatttgtggaaagcctcttaacatggaaaatgcagaccaaaacaaacaaacaaaacagaaaaatatcagcacagggaaacagaacgtatgcagagaggaaaaaaaaatatatcaatgtattcagagagatagatgtaactattgcagccaggaaacaagaacaaggtattatcaataaggacattcatagaacaaaaataagcttttagaaattaaaaacatgagagaagttacaacaacaacaactaaataaactttggaagataaatttggggtgccttgcagaaagaagagcacaaagagaagacaggagaggaaggatgtccaatgtccaaaaacagttgttccagaaggataaaatggagaaaataggatggcataatcataaattattcaagacaaaatatccagaactaaagagtgtgagttgttacattgaaacagcctacctagaacccaggagaatggatggaaatagagtatactgtcagtagagccctacgtctggagaaaaatactctccaagtttccagaaaaaaaagaaaacaaattggaaaacaggaattagaacggttgtatagatctcaacagaaacacagaaagcaagaagacagtgaagcaatgccttccaatttctgaaggaaaattgtttctaacctgtaattctacacccggccaaaatattaataaaatgtgaataataatgacattttcaagatatttaaagtctcaaaaaacctgatctctcctacactgtatgagaggacttcaaaaagtttgtggaggccaggcgcagtggctcacacctgtaatcccagaactttgggagaccaaagtgggcggatcacctgaggtcaggagttcgagaccaacctgaccaatatggtgaaaccgcgtctctactaaaaatacaaacattagccaggcatgatagcgggtgcctgtaaccccagctccttgggaggctgagacaggagaattgcttgaacccgggaggcggaggttgcagtgagctgagatcacgccactgctctccagcctgggcaacaaagagcgaaactccatctcaaaaaaaaaaaagtttgtggaaaaatagaattgaaagataaaaattaaaaatataaactttagttctcaacataagttccatcaagttcaagactttggtaagcagtgataccagccattaggcatccctaaagaaccgagggtcctgggaatttaagtatgccaatgcaatcttttttacatgatgctgcattctggttttatctgtcccaagagaaagtgtttggccatgaagagaaagaaagagaaaagagaattggaagggaaggaaggaagagggaaaggagcaaaggagggaagggagggaggaagaagggaagggaggaggagaagaagggaaagaaaagaaaggaataaaagaatcacaaagtggcaaactctccctgcctatgttgctgctggatgtccagtcctcagctcacactcatcttcccaggttgcccatctctg

SEQ ID NO: 94794 - DNA, 40503 bp, Homo sapiens
tgaccctgggcagtgccttgatttctctcagcctgttttcttatctaagagcattctgttcagtcccttccacacctaaaatgatccaatgacttgtggtaatgctttgattgcaaagtataattgctattactgtattgttgaaattaataaattatttatctaataaattaatttaatcaataaatttagttaattaaattggcctaaagatgcctctgtaggaaactatattctaacttaaaatgtaaacaaactatgacctaactcgagagtgcatttttgtaattgagttttggccaattatagtagctgaactttcagccaatcacaggtgaaaacttctcagacatgtccatataaggcaaatgctgtgctgtgaccaatcaggctctttctgtatataacttcctttttccatctgtaaatactgcctgcccatcttgttgggtgaagcattctggacctttagtggttcaggcagctgcctgattaatacatttttttctttgttaaaataaactctgctaaatttaatttgtctacagcttttctttgagcaattggtgtcagaagttggatttggagtagaccttcagggacccccaggagcactgagtgacaaagtaaaagtactcaccagggctcatcgtgcccattgatctcttgtaacaactggagtcatgggtgaattctgtcctgaatttgagctccatggatttgtgtgataaactctctaactttacttgagcactttttagttgactgggtctaggatcaaattggacttaataattaactagattggatctagttagaggcctcatgtaggtacctttcaaatcaaaaaggagtctgggactctaggagtctgagactccactttctgccacactggctacctttatgtgcacaaattctgggcccagaacctgtatgttctggggaaaatgggttaactttactagtgactacagtggggatgtgttaacctagataaaattgttcacttgcaaagtgcattagaaaacaaatgcaaaaagccaaaaaaaaaaatggaatgcattctgtaagtggtacaaagaggcatctaaaggattaaatgaatcaaagattctctctttaaaaggttctttacagaaggcaaatgaaaagcatcttaaaagtatttttcaaaaatgccagtcaaaatctttagccattgggcaaaaaatcctagttctaatgaacagaaaatatttggattcagatgttctttaaaaaaaattgtgtaatttaaaaaattcatttgtagagatagggtcttgccatgttacccaggctggttttgaatgcctggtctcaagtgatcctcccacctcaacctcctaaagtgctgggattatgtgcatgagccgctgttccaagcctagatccagatattctttaataaattagtgagcttgtattattgcactggcacacggctaaaatattagaatgaaagctgtaagatctgtttctgtctgtatgtttatatatgtctctatatatgatatctatgtgtgatatttttctatctacttatgatattgctaaattaagtgctaaaagaactctaattggctttaagaaaaataagtgtttacataaatgaagtatttgtttagaaaaataagaactaacccaagtagttttcgagttcacatgatttgggtaatctttgataaattaggatactgttggtttaattaaaacaggcatgtcttcagatttttcagtactaaatataatacagatgcatgacttttcctacctagggttaccaataaaataaatttattttatgtctatattacaaaacttgtcagcaagaaaaataagatgatgactagctgcttaatatttaacctttacaagcaatccaagtgaaattgttaaaaaagtgagttaaatggatgtaagataaagttctcatgtaaaaaaattctttctgtaccagaaagttttgacattcttatcaagaaagaaaagttgaggctgagggtaatctgtaataacaacaatttaattctcaggcctagcaaacaaacaaacacacaaacaaacaaaaacaaacccttaggaggacagacatgcaattttgcctcctctacagtttcttattgcagagggactaaggatatttgggaatgttagtaaatatcttctatgccacactgacaaattgtactatgagaaaggatgtgcttctagaaactatgatcatacatttgccaatttacagattgctggtgtgacagacagttcacagctgcttgcttcctaatgttccctggaaattaaagtcactagagattaagaattctaattaatacatgtaagtaaaatcactagaactaataatggaaacaactctgtatgcaagaatacaaggaaagtaagatttacttttgataaggaaaagctataagatatgagaatgttatgttttgttaaggaaaaaagaataatttttggactaaagtagaatgactggtttttccaaaatgaaaagaggtaaagtacaggacaaaaactgaatgatgaaaaagttgtagagagtttgtgaaagataaatctttttttttcttgtatgttctttcaatgtagaagatgaatcgtggaataaatttcatgtgtgaccaggctagctaggattagaaagaactatttacaagtttttctaaaaattcagtattagtatgagaactacactgatacaaaactagaatttggtgtttctgttaaaacaacattttcttggtctacttctaacaggaaattgtgaaaggtttttctttccattttagataattggtgtaggagataaatattctgtattttactaagataatgtccagtgcttcatgctgtctttattaggttttttatttcataagagaactgagtcttctctattaagagagctaaagtttttctacaactatgtagctttctatatttgcctttgaagtgttttaattatcactttggttaaataaattactactattcacagtgacctgtgatcctattaaatattttgctcaagtgtttcaaacctttgatattttggacagacttcccaaatataaaatgtaaaattaaacctttttcttgaccttgaattaactttgagattttccacatgggcccttggaacacatcaaaaggatatccatccttacaaaagatagataataagtatttgggcttatttgatacattaaattatatgaatagtactgtcaaaaataagtaatgcttaactttctttgggttatttttgtgtgtatgtgttattactatatggtttggaaattgtatgaaattcatagacatcaagttgtcctcatataatgctggtattcataattctagttattatcttaaaatgttgtatgaaacagaagtaacttcatttccttatcaattccatcattattgtagtgaattttcattaggtctttttatttttcttttcttgtctgtcttttcttgctttttcttatcttcttttcttttctgttcttttcttttttcagaggcagagtctcactctgtcacacagactggagtgcagtagtatggtcacgtctcactgaagccttgggctcttgggctcaagcaatcctcccacctcagtctcccaagtagctggactactatgcacaacaacacctggctaattattttattcttcgtagagacagggtttcactatgttgctcaggctggtcttgaactcctaggctcaagcaatcatcctgcctcagccttccaaggtgctgggattagagtcatgtaccaccatgcctggtctcatcaggtttttaaccatggcaattttaagtcttgtcattcacagatggttaattgtttactatggtactttcctgggcaactataagcctaaagtgtttcatcttcaagaagactcatgaaaaggacactgacaaatatagttttctgataactttaagatcataccattggactggctaagaattctacaatgaaaaaattgactggttcataaaactgtgaacccaatatatgtcaggacaagaattaattagatatcagtgaaatgatttggcagacttttatgctaagtcagccagtactgaaattgttaagatatgcaatttgaataaactttaaaagtttgatcactgtcaaattacctatgataacctatttaatgagcagtactattcacctgaattggagaaacaaaattggtatttaaaaagacgtaaatgcaatattaagcattaactcatgaagagtctggacagctgcttggtccttcctgagtccttaaagcttccattattaagagctctgaattccatattcatcatgacagagataaaatgattcaaattatgaaaaaatattgatggcatgacttttaaaattgctaaaatttataaccaattttggttataaattgtcaaactcatagttctgataagaaaataaaaacttcaggtgatacacacctgctggatcatttgaacacttaaaaatggagttccttcaagtgacacattaaatgtatgttttctggttgtatagaagctttcccatgcaggaaggctgatgccataataatagctaaagtttattagaaaatgtgtttcccttggctgggcacagtggctcacacctgtaatcccagcactttgggaggccgaggcgggtggatcatgtcaggagatcgagatcatcctggccaacatggtgaaaccccgtctctcctaaaaatacaaaaattagctgggcgtggtggtgcgtgcctgtaatcccagctactgggtgggctgaggcaggagaattgcttgaaccagggagacagaggttgcagtgaaccgagattgcgccattgcactccagcctggtgacagagtgagactccgtctcaaaagaaaaaaataaaaaggaaaaaagaaaatgtgtttcccttatcattcattcctggagaaatcttcagtgatagaagtactcattttgtgtctggaattggttccttccggtgggttcttggtctcactggcttcaagaatgaagccatggacactcgcggtgagtgttacagctcttaaagatggtgtgtccggagttatttgtccctcccagtgggtttgtagtctcgctgacttcaggaatgaagctgcagaccctcccggtgagtgttacagctcataaaggtagtgcggatccaaagagtgagcagcagtaagatttattgtgaagagtgaaagaagaaagcttccacagcgtggaaggggacccaagcgggttgccactgctggtttgggtggcaagcttttattcccttgtttggctccactcacatcctgctgattggtccattttacagagtgctgattagtccttttttacagagtgctgattggtgcgtttacaaaccattagctagacacagagcactgattggtgtgtttacaatcctttagctagacagaaaagttctccaagtccccacccaacccagaagcctagcctgcttcacctttgaatttcactggacaagttgtaaaacagttaaataagatattataaatacaatggcattaggcgaagctaactacattgattggattgccttagtcaaaggcaattatcaactgatggcaatcacactcatcctcactagaaatctaggttgactgcttatgaaattaaatatttgaaattatgaaatagttacttcaaggcttattccgttaataataaaacctatggatcttttgcttttgtaaactctgacatgactcaatagtgccatgctttgacgcattatgccaaagcacattttcactaggtaagaaaagccctttgtgactcacaaattgatgacaagcagacctttcatgatttagagcaatgaggttgggtcttttggaaatgacaccagaggaagactgcccttgatagggactataccaagttcttctttgcagcaaaacctcagggttttgagtctcgtattcacatctttttactaagaagggctcctccagactcctggtgtatatttgttggaggccttaaggtaaagatgaccagrgaagtttttccccagaggcagatggtatcctagacatagacactttcctaagaccatagaataagatttctctgtcatcaygaaagccttatttctcccctttccccctagttttctgctgtctgaatcacttccttttccttaaaggaaaatccacgggascataatctgtgtgtggctttatcaaaagcttatgccctaaaaagaaatgagagcaattgttgggtttgtaggctaatgccaccatatcagaaaacaatttctctcatgccaatgtctgtgttcccattgagagtcatcatgaagccctagaggaagagtggaaagctttccttaaaattctagacattactgctacttacttttctacactcactagaaatagtaccacgaactttccaattaataacctaattgttaccaaatatagaaaacatatctgagtgatgtctgtaaaaggtatatcacatattcaagacctggggactaccaatgcaggtatgagtaattgcttgtatgatgtcactgaattaaatctggaagctccttttccactaaatgtggttatgcacccttacagcataccctttgagtaagtttctcactgtaccttactcaggagctatgtgaacttgtggacaaatttaattgacttctgctcaaacaccactaggtggccatctttcctagcccctgagggcctacattgggactgcagagaatttacttacctcttcctcactggttcagattttgctatatggcctgtctccctcctaccttctgaatagcttttcctgaaagttcccattgtatytttcataaccagaggccaaagcaatcaataaccaaaattagcacaaaccttgaaatagatggagataagttagtttccttggaggaaatgttcctgtggggttattgggggcacactcttggcagtattggggtgctggttgtatagaatttgaagatagtctgtaaattaggaaaaatcttagattttgtagccaatgtgaccgcccaaaagttcagatgcatagaagctgctctttgaaaggtgtatgaaaacattcatgttcaacaaaaatacttaatggagcatcacgcagatcttctctttgcctacattgaggacttgtgtatagtgctaaacgaaactgaatattgtacttacctttctcctgattttactactacaaaaagcttaatttaaaatgtggctgatactgatgtttctctagacactgccaccaaatacatcaaggaaatttctcacgggaaaggaacacatgatgtgtttacaggagcagctaatggttgatttgcaggtatccagaatggtggaatggtggatggcagacttggctattggaaggttttttattgtttatttttagcctaatcatttggggctaatattccaaggttttaaaatctttatgtgtcttttagtaggtcttcagactagtatgacttgtgttaccaggctaactacagaatcaggcacctctttaaaggagggcattttactactaactatggcccttaatcaccgtcatgccctgaacaaagactataaccaataggacttgaatactgttgaattgtctttattattgcttgaactttaaattgcttaatttagattattttggtttgtagagactcctgttaagtagtgtactttaattttttaattttttgtatttttcctcctgataaccattataatattcttcctaatgtattgtatcccttaagagtctttctctctcttttcttttcttttcttttcttttgacagggtctggctctatcacctaagctggagtgcagtggtatgagtggtatgatctccattcactgcaacctccacctcctggacccaagctatcctttcacctcagcctccagagtagctgggactataggtgtgcaccaccatgcccagctaatttttgtatatttttgtagagaaggggttttgccatgttacccaggatggtcttgaactcctgggctcaagcaatccacctaccttggccttccaaagtgttggaattacaggcataagcctccatgcctggtcccttaagagtctcaaatgctcatatggagccatccgttgtacatcaactaatctcattatagttagaaaaacaaaaatatcaggaaaacataaagaataatccaacaaattcgacattgtgaattgtgaattttatactgagaccaaacaagtccattatgatggtgaaaaaaattggacctaggttatggtcaatttctcaaaattcaaaggctgataaaagaggggaattgttaaattaaactttggcctaatgctgtctctaaatgaagcaaactataacctaatatatataaataaagcataatatatgttatatgtatgttttatatatatacattatatatgtatataaacmtatatatatatatatatatatatatatatatatatatatatatataaacctaccttgagactacattcttgtaacaagcaactgagtctcagttaactgtagcagctgagcttttggccaatcacaggctgcaaactgctcagacatgtccaaataaagcaagtgctaaactgtaacaaatcaggctattttgttatgtcacttcctttttctatctataaatatggactgcccacattgccaggtagagtcttctgaacctttactggttcagggtaatgcccaattcatgaatcatttgtttgctcaaataaattatgttaaacttaacttgtctaaagtttttattttaatagcaccatgctctttgaaatgcctgttccttggtgctgtaaagaaatagcacttgaacataaattcaatttcctcagcaaggccatttctatactttctgcagaaagggtacactcaccagcagttttgccatgagagtacacagaacaaaggagacagggtcatttataacttgatgcgtccaccttaccaccttactgctgtgtccggtttccattggctagaacaggacctcacattctgtatttgtcccgattggctagcaacttagaacactttaaaagaggcaaaagcagaggagaacaaaggaaggaggaagtaacttgtagaatgctgagaaaagtaaaaacaccttcaaataaggaagagaaacaggctatgacctaatgcttgcttggactagtatgagcacgccaaggcaaatatttaggctaaattgtaagagctaagaacataaagtacattgatttctttattatggctagcagatagttaagaatgttactataggtctttcaataaattttgcttttaagggaagttactatttattcctaattaaatggggagacaagtctttccagaggaacttctactttactttttacaattcctcctcttatttcataattcttcttcaaacttgtttaatatgttttgacttaattgctttgtttgtccttttaagagaagtaatttttctgaataaggtggaggagagttaggagttaactctgtaagcatggcagagacaggtttttgtgtaaaacttcgacggtagggaataatataacagcctacaagaataagtacaccaataacaacagcaaatgaggtgagaattgaagttaaaatttctttttatctactgaacaaatgttttattactttagaaaaagggttatttattttattatttttggcaagtttattggatagggtttttaattcttgtagcacttttgttataattctgtcaggggcagtatttttaggaacaaaggtataacattaaattttaagtatgacacaaacatcttctttttctgctaatattatatttaaagttattttatttttctaggccatctggctgataggtcctaattgcttaggtatctctttgatggtgtcctcagtgtaatttatgaakcgttgctgattgtaatagatatagtttatttagcctacttttttttatagttacttactagaacaatgtggatttaaattctgcagctaattgattttgtgctttaaacttatttggcacttctcacaggactttaatggcatttatgtaaacctgaggattaaaggactcataaggagtttcctttggcctgaggtgttttgtttttacctttttagattgatgaattgctasggtgaaagggatagcgaattggattagagcacaagtactgttctaattatttggcagagtgtctaataaaggtcttctacagtactactatacatttgcttggggatggctaagcatagactgataatcaagctcttggaaagacttgagctccttgcattttttttatgcttccaaggaacaccaaattttcctcttgctatgagaggcatgaagtaaacttggccatctgagatggaagctggattgcccttgggggctgacccgtagggtgttgaatttcaggaaatagcagatagagagctcggcatgatgtattatcctaagccatgggattctgaaagagagccaccatacactccatatctggttgacaaggagaccatccaagtggaaaggggacaatctgggcctctggcctaccatgtgtacaagcataataatcgcttttatttaaagtgcgaacggaatatttaattcattccagccaggcatttgcatcttgatatttttgtcttgatggctaaggtctgtcttagatctcttatttttacaacagacagcttagttttattattagatgtaggagcaactggtgtgggatctagaactgaggctactgaagaargggaagatgggagaatcatgcatactttaaaaatacttaggggtcttttccatttatgtcaatcttcataccatagaagcaactaagggctggcctagagttagtcaaggtggaggtggtgataaagagaaggacagggttacatagataaggctgccagttagaaggggtagtccttttagtgaaatagatgaggggttttagatctgcacaaaccttttttgtggaagtccaactttgcttctaagtagtttaaaggacatagtcctattttctacaaggttgccaggctgcaggagcagaaaatcagtgtcttggctgcagctgatcacaatgatgagtgctaggggtaactgtgtccagtagagagccrggtcataaatatttgtgtgaaaaggctagctgtcattgatcttttacatctccacaaggtatgacagagcaagcattaaaggtaatggtctgaggtgagtcagacttagttacattaataacaaagaagctagtaacagaataaggaaaggaaaggaagcaatatagaaggtatatgaaaattaagctttctttaactttaacttagtagggcttgatcttagtacagtaacatgattctgaagaggaagatgttttcttgactcgagtatggtgggtccattctttctcagctgtgtggacggcagtctcagtggttaacagcataaaataggatccttcccaggctggcttgagtttttttctatcttttgatgagaatgtggttttcaggctggtgctggtgtactggaaattctaggaatggtacttgtgctaaaatactttcagttctgagggaagggaaagtggaagataaattaagtgtgtaatttctgctgcatatcctggggcttgaggcctcatggtgacacctcctgctccatctctgctcagcactgcccaggggatgctgtggccttgccctctcttaaggtcttggccttcttgtggccttcaccgcccctgtgcactgtggccttggggatgaggagccttgtgacttacccagccacttttgggccttaagaaagctaaacaccgttttatatttgacagtgtttttgtatgattttataccagataagttaaattttttatattaatgtgctattaatgttaagcttaattttaataaaatcttgtagatatttaatctatttttgatgtctgactataaggtaagacttttatagactctttttaactgtttataatttttgctaaagagcaggttagtgctttaagaaaaatctattgtgcttttattttaatgtccagttcacagaaaaactggwtgatacctctttaactttagccattatgtttacacacagaatttcctttacaattaacattttaaaacttgcttaaacttttaaaacaaaatatatatttttaactttttaatgtatgtaaaaacctatatttttatgcctccttataatcctgttattaaaaatatattttatttttcttacataccttgtaaataaactgtttttcaartaattttacattcaggaggcctacttactttttaaattatacaatatttctggcataaattccttttcataacttttcttacaactttcacaatcttcaacatgccttaactttctgccttccttttacactctttgttttcgtagtttcaccttctgtgtctttctttgatttctgtctcttccagtttctctcttacttactctttccatctatttatctctctctcatttgcactctgtttctctctctctctctgtcatcccgtttccttttcccctcctgagttctctcgctcccaccamcggcagggtcaggccacggcacgggccccacccctgcgcatacattgccatctgtttctcctgtttttgtttgtttgtttgttttccgatttccctttttacttttttttcccctttcttcctacacttagtttcttgggctgggtgggatttgcacagctgcagtcctggccccaggcagtcccccacactctccttctggcatcagtccctgccctctttttcacatagagcctggctggggagaggggcttaactcttggtgtgcctggctgtctggtgtcgcacttgctgtttttgctgtctttctcctttcccttcccctaggggagcaaccggcgggagtggagcttagccttttctttcccggagaagagggaaaaggagaattttgaatatatacgtatatataattttttttactaccagaggtttttgtgaagttcaatcccctcaccaatggcgatttctcacttctttttgagattcaacttcttatctatggggatttcttacttttttttgaggttcaacctcctctcagtgggaatttcttacttctttttgaggttcaaccccccatggggatttttcacttctttctgaggttcaacttctttcttaatggagatttcttacttctttttaacttctaagacatcttgactaaggaatacttcaccaccaccccctccccacccccgaggctttctttccttagtcctgactaaggaatgctttaccccccattgtggtttctcttttttcggaatgtcttaattaaggaatgctttactgccttgtggctttttctttggttttgactactaaggaaatactttactggtttttctgtttttttttttttttttcttgtctgtgtacagagtttcttggttcatgtgatatgtgaggatgctttactccaggttgccagccagtttttattgttgttgttgtctttctttttttcttttctttgtgtgtgtgtgtgtgtgtgtgtgttactgagagtctgggtttattcatcacactgggtgggtctcgagtccttatccttgaggctactgcagagaggcagaggaccatgcttcttcatgagacaggactggagactgcctccatatgagaatgtatccccgtacaggccaccaaattatttgaaatgtttgttccttggtgctgtaaagaaatagcacttgaacataaatttaatttcctcagcaaggccatttttatgccttctgcagaaagggtacacttgccagcagttttgccatgacagtacaccaaacaaaggaggcagggtcatttataacttgatgtgtccaccttactgctgtgttcagtttccattggctggaatgggacctcacattctgtatttgtcccaattggctagcaacttacaactttttaaaagaggcaaaggcagaggagaacaaaggaagggggaaataacttgtggaatgttgagaaaagtaaaaacaccttcaaataaggaagagaaacaggctatgacctaatgcttgcttggaatagtgtaagcatgccaaggcaaatatttaggctaaattgtaagagctaagaacatagagtacattgatttctttattatggctagcagatatttaagaatgttagtataggtctttgaataaattttgcttttaagggaagttactatttattcctaattagataaggaggaaagtctttgaagaggaacctctactttactttttacaatgctgaagagtggcaatgtgactattaggtacaaaattgtcatcttgccattagtgtcagttaccatgataaaatgacattcaatttaaccatcataaaagcattgacagtggatgaattaggattatagatattggatttgatagactttagtcattatctgccctctattatatgctgagatgagaaaactcagtcccagaaaggtgaggtaacttttctagagactacaaaagtaacctaatagtagaaggcaagagggtaaacattattgcagagttaaaacaaaatggtttggtaatgcggaagcagaggagactatttttggctggagggactcaggaaagcctgagggagaacaacatttgacctagacattgtaggaaggatggaattttaactattagaggctggggaggcaatagtggagtagcattgagacagccagctgggaggaggtccccagaaaaaactccaaccagcatgcacacagggatggagcctcaaatatttgcaccatttgcagtggggaggagcctggcccctcctcttcctgtgtggaacctggaattcgaatgaccaggtgggaagcactctagcaggggactctggccttgtagagagtccctgtttcctttttttctttcttttcacccaataaaaccctgtcttactcaccattcaaattgtttgagagcctgaacttttgtggctgtgggacaaagaaccccatctttagctgaactaaggaagagtcctacaacatttttggcacccaacgtggggcttgagaagtggcaagtgaactggggactcaaaacctctcaacgttcattctaagccttttcatcctcaaatttctgagggtaggggaaaccattccccaatcatctattgctcccaggccttttccttccttttttgggactgaccagcaagcagcacctccccgctgctctcccctcccttctggggctggaacgcacggtccaagtgtcctgtacagccagctggctgttgttttccaccatgcaccaccaaagccttcaccttcccctgctaaggggctttactccattggacagtaattaagcttttctcctggtggaggaaccagttgtataagaataagagggtctttcccaggcattttaaaactttttttctttctctgccccactccatcagcagttaacctttaattttttttttcttttagaagacgttttttactaggtcaggccccacacctatcaccgtttatgttttctgcaaagcttttattgtgaaatcaagcctccattttgttttacatcctgagggcatggctggtaaccaccgcttggcaaggctttgcttagcaatcctgccttaggggatgagccctctctggtttgatgtctgcatgttttcctagccttgtctcttaaaggtacccacccagtgactgggttttcttgtgcttgtctgcttgtgtactgtgtgtgatgtctgtaaaaacggctctaatgaatctggtccaaagaaggacaaacacttgaatctaatattttttaaaggaaagataaaatttctggtacctttcagttcatttgactttaatctttaagaaataaaaacagccgtaaagactacggtaaaatgcaggtcagatgcaaggtttgctaagttttttgaggttacaaactgttttttgggttttgagacctgtctgtcttgcctgcttcacaattggtagggcctgggaatatatggaactaaacacaccctagattaagaaggcaaacctttgcagcacttaccacacaattaaagcaatttagcaggttttacattaaagttaaaaattgccaggagttaccattatatcacgtaatctaaaaatagatttacacgcaagatgcctaagaacggtaaaatgtgttttttagtaaaaggttataagaaggcatggaaatgtaaacttttgccttggattaaaggattgttttgagttaggtaggaaaagttgaacgttcaaacaagtgatagaagcattgtggaagttaatcttgcagaagaggttgtctatgtgaacatattgactaaattcaaagggttataaaagtttttgcttctttaaaatttctcagtaccattttggcaaaataaataatttatggtaacctggaattctatttcataatatcaagtgctttaaacttatttaataggcttcccaaaatcaaacttcagtttccaaatggtctttcctgacacctaactctttggatagtccagagggcccctagaatgtccagaaaagagaagtaaacaggattatttgacatgtttaggtacatggtattgccaaaatgatgttcagtcttctttaggttatatcttggtaaataatgctaatatatgttccaatattgtatgggatttctaaaattctaatgtctaagtgtatgctatcaatcataataaggttgtgatgttattgtaaaccatggagataaccaaacttctttgtcgattttgtttctaactgtaactaccctggacattttgtaattcacagacaattgttgtcttgttttaatccttttcaaaagattgtttataacaagctatagaactttaacaggtgctctcaaaaacagatttctgataactttagagattgtaacattggaataaaagaaaatgtacaggactcataaagagctgaaatattcacaaatatcaagcaaaacaagagttaactaaatggactgaactgaaaaagctgaagcaacctttttgacttttgcttggaatattgatgacccttgttttgtttttcagtcaaggaaactcattttgagctatttatggcctttaataattaagcaaggtgtactcctattatcaaaatttggagcatgtttgtttctctctctctgcccagttcctccagaatttagaacctatctgtgagtattcttaacttatggcaatatagttgtttgcatccatgcaataagaatccatttttcttttgcaacagaacacaattggagaaagtggttattttaccaaggctttgactggaagggtatgcttcctcttaaggagttaatctcaactgacagagccaataaaagcccagtgaggaaactggcctcatacccttgtctacatagtccctgtacagggttcctgacctgtggtcagtaaagaatatcactttctaacaggtctaggagctccaagtttatcttgggaacttaagaggagaggatcacccaactcacaggtgtttaaggatacaaacccatggatgggctcagttttaaaaggtcttatctgagactccttgtggaacagacttccatcaaagccaatctaaaaggcctatgtaaaaataattattcttgctggactttatgcaaataatcaggccaagtataagactaaagtctatttaaacaactaattcctatgattatttgtttcttaacaaaaatgaggactggagagacagaaattacgttccaaaacttatcatatatttgtcactaaattctaaactcaatagttgtttttgagtttttgcctatattttagactaaccctgcttgctcctgtgaaccaaccagcaatccctggctgcagctcagaaagaacaaaagggatgggtaacatagaaatctggatcaatagtctagttccgagcaattatcctgcaaatcctgccaggtgatgggaataaataggatgccccagacttggaggttttcttttggggacagtgagaccaagggagctaaccaaagctgagcatcatgcaccgaaatcccggcaagcgtaactacagctaccagttatctgggtgtgtcacaagacatcctttcctctcccttgttggaggacttaattccacagcctcactttagcatttggcttatgataaggagtccatgcaaccccccaagatacattcttgtcccagactcagttccaagtgttgggtcaaagccctaggaagaaaactggatctgaggaatccagaggcagatagcaacagaggttaaaaggcacagcacaggtgagtgtggctcattcctgctgattaagccaagcccaagcttcctgtttcatggataaaggctatattaatatccatagcataaatgcgatctagggaactccaagactactgacagcaggggaaacggcatacgtgggtaaaagtggatgactcccctgccgaccccccctgcttcatgggtgcaagccactttaaaacccatggcagcacctgccaaggtcactggaacttggggatgcaaggatggaagatgaaaagaggacactcttccctctttccctcatgtatcccatgtatctgctaggaaaagaagggaaccagagatgtctgctctcctctttctagatgggtagcgattcatcttcagtctgtacctctttcgaatgcatcctgaacccctgggactcctttaaaaaatgccttcttttttcctttttccccctcagttctctcttcacaaataggtagttgcatcttcatactatgagacactcacatcagatgcatcctccaaactggaaagagttaatttcccaaaccttaaactggttggcttaggattgggctcaggggaaggaaacccagaagcccaacattccggcaaaaaggtgaagttttttactttaaacaatttttttttaaccagtcaggcttttggcctccctctccctgtgcaaactggaaaaagaccttagaatttttgagctgtctttgtccctccctttgttttgctttgatatatgttttctaataacccggtttgtttgtccttgccttcaggccatcgaactccaaatggtcatgcaaccagagcctctgacaatggccccttttgccaggaacccttaaataggcctctgaggaagctctgactgccgtttccccaaaacagtgccacctgtcagcaggaagctgttaagatttgtctttgtccttatccttattttaagggcagttagatgtacttctttagaggggggaatgagacagccaagtgggagaaggtccctggaaaaactccaacccacctgcgcactggggtggagcctcaaaaatttgcaccatttgtagtggggaggagcctggcccctcctcttcccgtgtggaaactggagtttgaactccagggcaggaagcactctagcaagggactccggccttgcggagaatccctgtttccttttaattcttcctttttactcaataaagccctgtcttactcaccattcaaattgtctgtgagcctgaactttcatggctgtgggacaaagaaccccgactttagttgaactatggaaaaatcctgcaacagcacaaagcaagaccaagtgccgccatctctgtagaatagtaagtcacatggtttggccggaaagcaagcatggtgggcatagcagtgggaggtaaggctgggaagataggttacaatcaattagagagttttgaatgacaaaggaggtgataaacctgtggcagccatgagaatgtgcctcatggatctctaatatagttagtacaggcagtataattgaccaagctcttcagctgctgtacttgagatacatttcggtgcttgtgctaagtctcgctttcctatgagctgttttcagccagtgggtaagtatgttagagagacttgggacacctttggtggcttgaagacttctcaatggtcctgatgaatcttccttagactgcacagcagtctaagatgtttctacccaacctttctcccctctctttttcactcagtgtcagacttgtgttgcaatctgatgactcttccagcttttcactcctttattttagtcttctttcagttactatagcagaatatataaagcaaaataaatttattttcttttacaaagaaaagaaatgtatttcttatagttctgaaggctgggaagtttaagattaaggaactgtcatttaattggcctctggtgaatgtcttgatctgcactatgacatggcagagaagtgaaagaggaagtgggcatgtggaagaggaaagagatggctgtctgaattccttcgtgatgctggaacctccctgacccaaacacctctcactaggttctacctcccaacactgctgcatggaggaattaagtttccaactcatggacttttgggggacacactcaaaccttagcatactctctccttattttcctttatacgggtattttccttaataaaatccttgcatatttagtctcattttgacatgtgacctggattaagtagaatctagtcttagaagccttgtacttagcttcattaatccatttagtcacagggcataatgggcaagaaagtgagtcctgttaacacattctgcctccttggaaacagccaaagttgcaggtcaggagcagcagcttcccggatgaaagactgatggtacaaaagaggcttcccttttaatcctcattataatgtggatgctggattctttctgggttaagcattttcaatctttattatttgaaattattgtttcaaattttattacataccatggccctagtattttgtttaaaatatctttatttttctgtaaagaacaagtgtgccatatttagcttttgatagaaaaaattaagaaactatcataaagggaatagctaaaagaaaggttagtaaagggagccatcacaaggagagattttggaaaagggtggtgtcttagtccattttgtgtttctgtaacagaatatctgagactgggttatttataataaacagaaatttatttggcttagttgtagaggctaggaaattcaagaccaaggggccagcatctgatgagggccttcttgctgtgtycacccacggcaaaggtgaaggcagaagggaaaaagagtgtgtgaggaaaagagggagccaaacttgcttttataaccaacacactcctgagataatgggattaatcttttcatgagggcagagacttcacctaatcacctcattaggccccatctcccaatactattgcaagtttcaaacacataactttgggggacatattgaaactattgaaggtgataaccattgacattctttacaggagaagaacaaaaattgtaaactgcagttggaggaccaaggctgaacagaaggaatttgtccttgaagaatgggaaatttcatgggctactctctgaaagcaatttttatttttatttttgagagatctcaaactaatggtttctagatttaatgtacacaggaatcatctggggagcttatgaaaactgtggatttcagcagagatttccattcagtaggttgaattattactatgtttatattcaggaatcttcacttctataagctccctgagttattgtgatgtaggtggtctgtggctaatattttgaaacaaactactctagatggttttcctgggatagtttgatgttcaggatatatggaggcagaaggatagactgatgagccttctttaacctttgagtcaacctcagaggtagggttctctataaataaactatttacatttttcaaagataccagaacatttggaaagattttgagagatttctaaaaattttagggatataaatttaataatattttcctagtggagctatatttccgcactgatttagcattaacctgacaaatgcttttcaatctcttccactgtagaagtaagataacaaccatagctactaaatgggtagtgataatgatgaaataaggcaagttatgcaaaatgggacaatgccttacatattataaagcaggaattatcaaactttttctgtaatgggtgagaatgtaaatattttagccttgtgggccacagagattctgttgcgactacccaactctacaattgtagcttgaaagcaaccacagaaaataaatgaatgagtgtggctgtgtactattataaaattttatttacaaaaacagatagtgagctagatttggcccacaggcagtggtaattcactgacccttgctataaaggcttgataaattttattagtattattaatacaatgacttacaaataatctttaatacttaacaaagcaatatattttttaaccaagaactaagtatatacctcatttacaattattttaaaacaaatttgcttatgggagcaatgaaaaaaaaaatcttgcctgtaaattctggtgtaacttaattgaattttaaagaaaaagttttaactacagagactgactgacattccattgttctacgtccctgagggagaagtamcttaattgaattttaaagaaaaagttttaactacagagactgactgacattccattgttctacgtccctgagggagaagtacaggccaaaatgaagagcaatgttcacaaaggcttggtagaaataagaggagaaatttgctggaatcttcaacatctctgacctttgttctctcttggaagggcttggtttggactcaggacagagcttatcttccaaagcacagttcagggaaggagcagctgtaacaaatgttcccttaggagatgtttgtctattatgttgcttaatgtctattgacattgaattgcttttgtttgtttcagacttcaattctaaaaaaagtttgtctctgctaacagaccagtatacttccttttaccaaatgttagaggttacatattgtttatttagctttttgccttagttatctgtaagactggagttagatacaagtgtcartcattataatgctttgcatctacttgaaagatacactttttttcctcaattcttatttttccaaaatgtcaaagattatcctaaatgttattgcataggtatctttcattgtaaattccttcagatgctttttagatctagctgaaatataaatcaaaaattataaataaaagtaatttggtcatatttrgcaaaaagaatgctgttttctatgtaaagggcctcccaaagtagcagatgtatgggtataaataagataaactgttagtaaattctttataaataatgaagtgttttgtaaataaatatattacaagacaacattatgatctttagttctagagttcaacaaatctgagttccaattccagctgcctcacaagatcagctgctctgaatcttagtttcatcatctgtgaaatgactataatagctgtaaccatttcacagaattgttgtgagaattaaatgaaataatacatatgatatgcacatagcacaatgtctggcctatgataaacattaaacatatatatttgttaggtagctattatggcattttaattttaatttttccagcagtatctctgtcaaaatataggaaatgtggccatttgcttagctcttaatatgaggtcctaaaagtttatctgagcatcactgatgttttctaaatctatcctctcacttttttgtctagtagttttgagtgatccccgactgagcaaatgaaacatgacctaacatctgagaactttgttaccaagtagggtggatagaagaccatcagaaacattgttcaggagttttaaatatttacccacaatttaaattgtccaataatttaaaccatgggctgcttttcatgctgtgtaattctactatttttccatacaactcccctatatcagggttggcagcactacttacctgagccagtcttattttattttacattttggtaactttggtgaactgagggaagcgtggaaaggcaaaatttcatgacaaaattttggttttgtacatatgcctaattctgctaattctttacaatttcccccttacctgtactacctaactctaaaatctataattagaacatgaatgtaatgttttttcttctagcctttttttttttctttaggaggtagtgactgacaagataataaagcccaaagcattatgctgactaggaccattgaagttggcaaaaaaaggccacaacaacagcaagaaggcccaggattttcaacagaaaagaaactgagaaattagatgaatccttcagggcccgagtcttgagtggcttcagtattctttgyttctgggtgaagatggcatttctggctccttcccattgcccaggcccaaccaggcgatactrataggagttgcagggtccgaaatagagtctcacagccagtttaggatctttgaacaagagagagcagaaatctggcttcgcacctatctctaaggcgagctcgtccaagtagtcaacataaktggtctgcaacgtctggctctggctttctccaaaccttagtgaagaaagtaaaaagggaatgttcacagaatgttctaagttttctagaatattaggcattcaaaactgctaaaggaatgaaggaatgagtgaatatgtgaatgagttttcaatgaatctctggtggaaagtttgagtttatcataccaggaggctcatatctcagattgagaatacgccctcaaataaagagccatgaattcatggatgctctagaaatgtgayaagattggtaaccattgtttggcattttttaagcggtggcaaatctccaggcaagtacatgctagccagggcggctgcaggaattcatgagataatgcatatgaaagcatagcttggtgtcttgctcaaaggagatgcttaatatttgcttgttaaattactaaagtacctggcagtmtggatggcgtatagtagatactcaatcaatcttaggtaaatttraatttgaacatgagaaaactctttacacctgatgtaagccccaaatcaactttccaagggtactcgatcactgttgaacctcattttacctcatcacaaagtacaaatccttgaaccttcacaccaaccccttcctaatttattctgatggggattctctaacttttcacagctattcaagctactatcaccaccactgtctcatccyattccctctctaaccacagagtgtaggtggcttgagaagttatggaatctgacataggcatcatatamaactgaaatgaaattaagccaaggagaagtgctctgatttggtacaattcttatctttaagtatttggttcttaacctagtatgtrtaagaatcgcttaggaagaagataaaaatgcaactttttagcctcacacacggagtttctgattcaatcatctgggctatagcccagaaatttgcattttatcaggcagctaggtggttcttgtaagtagttagatcactgtactttgagaaacactgcttcatgtaaagaattaaaaaaaattcttacaggtcaattcttttttcmttccttttgataatgtccatcatcatagttctctctgagggcaggctacacaagcctaaggaataaaaggttggtttgaatagtaagtttgagtcaatatcattactttgtctagttgttgattcttaaaattaaactctggacattgaaccatgtcataccagtcagggcttccgtgctgttgaacttcagggggtgccacccccatagcactctatgtgacactgtccagggtgcacagtctacggcatggactacaagtggagagggccaagagaagaggctggaaaagggaagtgtgtctgggagcctggcagccatgactagtggtttgggctctatcctgaaggtgacaggaggccccaaatcaaatcagtggaagagtattctgaatgaagtgagaagatcagatttattttttggaaagatctgtctggctgctgaatttaggaaaatggactccagggaggcaagcccaaagctggggagaccagtaaagaggctgttgaaataaacctggtgagagatgagagtagggcagtagagatagggaaagattgatgcagaagttattactgtgtgctcatgactccatcgcctgcccacaagtgtcccctgagctttggatgtgttgaaatatggtcaagtccccttgcctagagtcatcagacatctcatgttcaagtagtccagacctgagctcctcactgaagccctcctgtccagacttgcatcattttctgcacaccccctctgtattcacagcactactgtccacctggtttccaatgccagagatctgtaagtcctcctagattcctctctatttctctgactttcccacattgaaccaatyataatgtcatgctgatttttcccttaatgatttctcacatttatggcttcctttccactttgtatctctgccctggcccaggatgcatcatattttagcataggctatttcagtagctttctctttcatccctgaggctgtagtctttccccactttcaaatctatattccacactactgctgaaacaatctatctgaagtgtaaatctgctaatgcctgttccttgcttataacccttcattggtgccccgggctgaagagctttctaaaatgcagattccaggtcccttggccagtcttacttaatcagggtccctaaggatccatcagatgattttcatatgtagccatatttgggaagaactgatctataatttataatctaagctccatagcatgtcttamaaaattcctgtgtcctgtctccttcttctccaagagtaatggctcatctctctctgcctcataygtcatgctctagcaatgtcaaatagcatgtgcccttccatatgcatcattgactctatgcttttgttcaggcaatccccttttctgcccctgagaaatgcagttatccaggacgttttcctttatcatgtgcccttcccttattctaccatgataagtgccctttctctccttccctgaacactccatatattattcaatcaaagcatttgtcatgttatgttgaaatgatctgtttaaatttctctctgtcccaccagttcccagcacagggcaaggtattcagtaagcttttgctgaacagaattgaaccctggaggcagggaggtaacaccgttctgaggagtatgaagtgctacacagacacccagaaagaaaccttttaataattttataacttgtagggatttgtgaggttgagctgctcaagtattaagagttaaattgatttgcagatatgctgaggaatttttaaacaacacagaggtaaaaccaggagacagatctttttcttaaacttatctctcacgattcaaagaaaagttaacatgcacttagctttatgccagttgaaattctcttgactgtctaatattttaaaaggatgattgcaggtatttattattactaaattcctgtatttgttattctttgaattctccagtaactttttagaatgttagtcttgtgagagcagccaaggttgtcaaactttttcttggcaacctttttatctcaggcaaccttcttatcattattgataaayttcaccagatctgaaacgcttagccactcacctgcctacacacttacctttgaaaactsttgtcacccaacgagcttgaagttcagcagttgggaaaatggaacctaggggctggatgagaccaatgcaygcgagggttgacttgtccaggtgagcggggaatatgtatttatacagtgagaccatattattctctactttaacgagtgaatcttcaaggaagggaaaagagaaactatatcctgttgcaaaaatgatgacatcaatgttctcctccactgttccatccycaaagatggcagaagtttctgtgagctctttcactgtagatttcaccttgatggctccacagagtagacgacttgggacatcatcatttagtacaggttccttcataatgtatctgagacatacagaagaaaaacattctgaaggatcatttgctgaggaatcttgaaccctcttgatatttttggggtacggctctgaaaataaaagggcttttcaawtatctgtaaaactctaacttaactggttgtctgtgcaaatccttattttctgacttaattctcatgtcacaaatatctcttgtcaataaataagggaaaacatgtaggcaacgtgagtgaaagagattttaaggaaggaagcatccccaagggcttagacaaaatgcctgtgcctatggtcaatccccaagtattatggtggttattataccatttctgtttttaacctttttcatgctatctagcttttattattttgctgttttatttaacccctatttgatcataagaaaaaatttgctaaatttccactagttttgaaatctatgaagggatcaatgtgaaaattaatgtataaaattaggtttggtgatatttgttaatcccaaatatccatggagtctctgttagtaatagcatggatgttgatgcaaagtccgcttattttttttgtagatttgagaacattttctttttctttttttaatagacgatacgtggcacttatgtcagatcttagaatatggtagttgcacggcaggcatttgttaaaagattctaaagctcttctgtttttttaagggaagaagcctgtaacaactaaagcaaaagaaccattcataacatttgcttgtgcttaaatcactgacatataactttgacgtcaacagagatttgtcttttagcaaagaaaaaggaatgtgttttcaaaggtttcccatgggaagaaccttcatgctatagggttagcaaagcataaattattagatggagaattacatgtttcccaccacacccctctgaaaggcaggtcgtaatctcttgaaacagttttctccaatgttagataactctgggtattagaaagttctcccctagttttgctttctggagcagcttrtaacacttctgcttcatcttcttaagtattttttaaaggcatacagaacaaatttagaagctaaactccaggacctataagatactcatattgttagattgtagttttaactaccgtgttagcaatttgaatctttgttaagggagacaccttcagacaactttgctcaccaacgagtataccattaaaaaagcaaaataactctacttgttttgaggctcaaggccataattttcatggttgaaccaccgattcatctgttgttctatcatccattttacagctgttcrtggcagtacattgcggagcatagaacgaaaccgggtgtggaacactgagtcccaaggatagccatcttcagagatacggctcatgacccaggtgccatgcctggtgctgataaaaacctggcaagcaaaaagaaatgcagtttaaattagggcattgtcccgtttaggaggaatctactatgaaggtcatgtatcacatgtgtagccccagaatttacagaggttctgttttaaagatgattgacctcaatgtaaagtacctcctaaataggggtacccagtggcatttacactgatgcaggaagactgcaacaaaatcttgagaacttcatggagacacgagaaagtctttgggctaactctgatgataaaatccacaagtctttcccatgtttacagttgtggtttgctgctccttaagagaaagttcctccctccctcctctcatgttttccactcacctaagtttcttctatagtgcaggtagaatgattataatccttggaaatgtgcgattatagcctagtgactacacaagtataagtgtatatgcatctgaatatccctggatggagaataacaggggaaataatcttccttccatacttaaaagactttattttgtgtgtgtgtgtgtgtgtgtgtgtgtgtgtgtgtgagacagggtcttgctctgtcactcaggctggactgcagttgtgcagtcatagctcattgcagtctcgacctcccaggctcaagtgatcctcccacctcagtatcagacatgtaccaccacatccagctaattcaaacaatttttttgtagagacggtctcattatgttgcccaggtcggtctcaaatttctgggcttaagcaatcctcctgccgcagcctcccaaagtgctgggattacaggcatgagacacagtgcttgtaatgtattttaaaagttaaaaactctgaacttatactgtgattctctttctcttcaagtgcacatctgaatcctctttcaggtgtattctttaccttgtttattaagatttcccttgtttccaaaatgtacatttaatctcttttcaaatgtatattttgctgtgtttgctgttactcccccattggccaaatgcatacttgaactgcttcttaaatttttacataccatgcaataagtttttgtttaaggctatacttgataaacacataagattcacttgcaaggtaaccaatttacttgagaggtttggatacagactgcttgggtttgaatcccaatcacactactgtgggtgaactatttcaatctgtgttgccatggttgaattatttcaatctctctgtgcctcagtttctctctctgtaaaatgggggtattaacagtacctacctcatggcattcttgtgtagattaaatgaggtggtatatataaagtacttgaaatattgcctggcaagtgataagtactgctagctgttaagttataaagttaggctggaagagaggagtttcatacagtgccttatgtctggagtaaaccagaatttggagacaaattttgtggggatgggccttacattcctagcttgtgaagtagcacctataccaagcattcctatattgctggtctgtgtgtggtatatacctatgttctgaatttctcctgccgttgcccttataggctgacttggcaatactttgattagatattagatacaaaaatattttcattagtgtctctttccattacttactgtcccctcttctttctcaggagcaaaccatgtttcaaatggtatgctctgcccgtttgattcactctttttctgttgtgaccctccctacagcagggtggtctaacctgccttaatgacactagctgcaacagtgagagaaacatgaggatttaggctcaggctgctttctctgagacgcatgttttaggtcaaaggccagagatttggtttttggtcagaagtatgtaaatgactaatatggtttggctgtgtgtccctacccacatctcaccttaaattataataatccccacgtgtcaagggcaggaccaggtggagataattcartcatgggggaggtttctgccatgctgttctcctaatagggagtaagttctcacgagatctgatggttttataaggggttccccagtcgctctcattctttctcctgcagcctcgtaaagaggtgcattccgtcatgattgttagtttcctgaggcttccccagccatgccaaactgtaagtcaattaaacctcttttctttatraattacccagtctcgggtatgtctacatagcagcgttgagaatggactaatacaatgatgcagcaccatcccatatgatcttgagtggtgcttttggattgtggtagagggtgctgtawccttatgaaggtgaatttcttttaacagagcagtgcacactcagaattttggtgagttcaggttgtaatttcaagttttgcagatgcgcctagttccgttcctagcatgtatagctcctgtaaagtctctggttagtcttttcacagaaggcttgagastatattactctgtgtaagaggttttatcatagttatagatttatgttgttactctaataaatattgaagagattagtgcagatgaatgagtataatcctggaaatgtatgattataacattatatttaggaggaatctattatgtaggtgatgtatcacatgcatagccccagaatttactgaggctctgttttaaagatgattgacctcaaagtgaagtacctcctaaaaagggggcatctagtggcatttacactgatagagggagatggaaacaaagtcttttgcactctgtgcaaaagattgtttaagaagctgtaaggcatgcawatagagccaaggtagtttcttaatattgaatctcacaccataagtcttcctgtagggcaagacccatacaaggaactggttcttgccatctaagatttgatatctttggaatgaagagatctaaatccaaatcactggtctgacaacgtgaagtagtctaggatggatcttcacttggctgactgctatattagctcctcacatactgccccattacacactgttcctaaggctttgcgggtattcstagcatgaaagagcctagagctggtactctcattttccagctctgctcttctccaggctgtcacagttcctgcctcctcacttgttcttcacactgaggtgataagtgacaagaggtttattttcacaaagtgaagacttattgggtctagtaagtctctttccggtgttagtgacctgctctgttcccgggctggcactaactaactgactgatagatgactctgacaggtcccagtataaccccttcattaacctgctgggcgggtgtcatgtttgcttgtaacttttgccactgggtatctagagtcctgaaagtgtaagacttaggatggaaatgatttgttggttgtgcacagggccatggtaagccctgggtggccagagacatcaggctgaaagagctagggtaagagtgattgggcatctggttcaggccttcttgagagggaatactttgggaaaggatgtttagtgattttcccttctttgcctrggtctgtccttgcagaaggagtttagtttttgctattcctgaccaccactrtcagcagcatcatcrtgtaatgaatgtttgactctttggcagctcagctggtgtcattcctgagcaggtgcaaagaagacagtggttagaaggcctcaggaagcacctaaatatctatgattttagttgagagacctactatctatttaatctttcttttcataatatttgggtaactgaaggttatctatatttcaaatataattcaaatacacactaaatttctaaaagccaccctccagaatatgaacagattaacctctcattaaacatccaggtagaaacaaggcctcttggctgggtgtggttgtgcatgcctgtaatcccagcactttgggaggctgaggcgggcagattgcttgagttcaggagtttkagactaccctgggcaacatggcaagaccctcatctctacaaatatatgaaaattagctgagtgtggtgtggcatgtgcctgtagtcccagctactcaggaggctgagatgacaggaagattggagcccaggaggtcaaggctgcagtgagccatgttgatgaaaggcctcttatatggaaaatcatctggtcaaaagttcccattttaaaaatgagggagccatctcccagagaagtgaaatgaatcactctaggattcatggctggttaktgacagagctaggaggtaaagtggtttcttgacttccagattttctatgatgccacaatgcgctaccaaccaactagttaatgaggattggagccgcgattatatggctgrggttctccagtatggcatccccacttcctcccctccaggtacatggtaagcagagagcatcacacctgagcagcattcttactcagctcaacagcaatatctgagccyragtttcccattccaatcaccaggatgcgttttccctcaratccatctggatgcttgtattggcggctatggaaatattggcctttgaacctctccataccttcagggggaagaagagagaagtctgtgagctccagagcaactatgtcaagctaatttcaataaaactgcattgccagcttttcctttctggagttaataatttgttttgcctcttctctataggagtaaagcacataagaaagtttaggtaccagaccaggtggggcctgtaatcccagccctttgggaggcctaggcaggttgattgagcccaggagtttgagaccagcctgagcagcatagtgaaaccctgtatctacaaaaaatacaaaaattagctgggcatggttgtgcatgcctgtggtcccagctactcgggtgactgaggtgggaagattgcttgagcttgggaagtaaagaatgcagtgacccctgattgagtcactgcactccagtctgggtgacagagtgagactgtcacaacaccaaaacaaaacaaaaaacaaacaaaaaaacaggaccaaaggggttgattttttatttcagaggctgcagcttacggctgcagtttgtctctatcagagacaaataaatggtgatgaacacagcaggaccagatactgtcttctgcctgcctattatatactattttggactatataatgacatttgaccctttaatatcacatattaggcaaggtgtggtggctcacacctgtaatcccagcactttgggaggccaaggcgggcggatcaactgaggtcaggaatttgaaaccagcctggccaacatgatgaagctctctctactaaaaatacaaaaattagccaggggtggtcgtgcacttgtaatcccagctacttgggaggctgaggcaggagaattgcttgaacctggaagatggaggttgtggaggttgcagtgagctgagatcgtgccactgcactccagtctgggtgacagtgagactccatctcaaaaaaaaaaaaaaatcacttatcagatactcttaaatatttcttaagcacattatgaagtgctattattataattgtgtaatagttagaatacaatttagcaatcttattttcaaaaagtaaacaaaaactaaaactaaaaaccaggcacataggagttggtttccatattgtgtaaatcagtgacttgctggtggttaatcacagacaagcttcttctgtgtcctttcctagttactacttttacacttcacggaaacacatgactttataaagtatttgccattgacggtggggttgcttgaaagaatctttagattattggttctcaaagtgtggtcacatggccagcaatatcagcattgcctggtgttagaaatgcaaattctcagcctcatgccagagctgctgtcttaatttgtcttctattgtttttaacaaaatatctgaaaccgaatattttataggggaaggaagttatttcttctggcacacaattgtggaggctgagaagtcaaggttgaagggctgcgtctgctgaaagccttcttgctggtttggactctgaagagtcccaaggcagcatagggcattgtatggtgagggagccaagcatgctaacatgctagctcaggtctctcttcctcttcttataaagccaccagttccactcctgtgtaacccaataatccattaacctatttatccacaaatggcttaatccattcttgagggcagagctcttactactcaatcacctcttaaaggccccacctcttcatactgccccattggggattaatctcaatatgagttttggacaggacattcaagccatagcacctattgaatcagaaatatggagggtggggcctagcaatttgtgctttcaaaagccctccaggtgactctatttgagaacaattgctttagatgagcaggccttaatcctgactgtatattaaaatcacctgagcaaactttcattgctctaaccctactccatagtgtttgaatctttgggggtaggtctccaggccatcagggctttagaagctccccaggtgattctaatatgaggcctggactatgaaccactatattacatattttcctaagggccttgggaaagaagtgtgttctctgaggaaagacttgggtggaccagaacagctggatgcagggttctattcctgcacttctctccccatcactaacttgcaaagcatttctttctaggagctctccccttgtgtgtgagtatggccctgtgaaaaaggctcggtgtttggcagggtagaaaaaggccaacgcaggcacatggctaaaagggcctctccaacagagaaccagtttgatgtgaattctctaaaattatgccaaggacttagtgacttccaaggaagttggctctgagatctatgtgtgatgaagactcagaggccaatagaaacaaagatgatgtttggtgtctttcatctttctagctctgtctcaatcttattgagccaagttctgcccagttgcagcaatgaatcctgcttgtcaatccaaactacatataaagtacctggaaacctactccaaaaagctgggaatcccagcgggtctcacctggaaatgacttcagtgggatatgaggtagaatgtggtggccactgcaaaccataactgcgtcaaagacagcactctgctccttgccgttgctctgagtgacaaccttccattggccagaggatgagaaatctggacattttctcacactaaggacagttgtcttgaagaaacacagagaaggcatcattgagaattactccaggataacattggccaagtgtgtctttctcattgctgcttcatgcaagaggcctgactcagcagtgggactaatctgttaagggtgctgaatactgaataaggacttgagagagaaaagaaaagcaagttctcatgaaaactgtcagaatctagatggagtcactaatgttaagaaacccgacaaatagaattgggaaaggccagaaagagcgggttctcatgatgtgtgcctgataacaaaaactacaaaaaccaccaccttacacaaagaccatcataatcttacacaaaaatgacttctacaagaacatctgctcagtaactgtccaatctcagactggcatcacccttgttattgctctttatataattatttcaaaacaattatgtaattgtattttttccccatttaaaaacctttgtcttcctttaactccctgaatacacaaatagtttaccatggcatgtacattctcattacaatgctctatcaccaaatatatatcttttcttttaaagaacttctctctgtttgttatttgataatctgaacaaggaaacaaaccaataattcaagtgatcatgcaattggcatatgtcaggaacgttttatgtagccgcctctttgtggactttgtattagagaagatatttcacgcaaaacactttgcagagtgcctgacacatggtcagcattccactgaatgatagtttttaacatttgctatttttaaaacagagtacatcatgtgagcaagacagttcatgatcttatttgaataaaatgatttattggttcattgatttttttaaatgtagctcactggaggtctgttaatttttaaaattgtacataaatgtttcatatctgctggattaagaaacgatgtcaagtggaagcaaagtttataatgctagaggaatggcatgcttctcatttgcaagtattttagtcttttatatatctcaaattttcagatatttttccaactgctgggttggtaatttttaagctgtctcaatttaaaaatgtatatggaatattagtagaaatcttgtaaaagggctttaaatatctgggcagttttcagatgaaagaaaagatttcagatggtagttcaaagtagtatattaactaagtgctgtagatccttgctattcaaaatgtgatttgaggatcaggatcttcagtatcacttggaagcttgtcagaaatgcagaatttcagaacttaccccatacctattaaattagaacctacatttttaacaagatatccaggtgattcatgtccacattaaagtttgagaagcactgatgtagattacattgacaatcataagcaacagggcttgttacagtttgcctgcttctcgagttgagctctaacacctatgacttacaccaactcagagaccaataaacagaaacctttcttcccaacccctcttcactctccaagaaacaaaagtagcagtaacacaataaccaagagaaatgacttccttgcgactctaacatgatctttaaaagaatggaatagaagttatatatcataaaaaggcaatatatttgttaagtagattgatagttaagtgcacaaagttacaaaaccttctggtatacataatctgttattcacaagttagatctaccaggaattggtgaaaaactacattaggtagaactggacattttaatggaatttataaatacaaattttcaccaaaatttactattgtaagttgatattatataagcctagtattagaattactaagaaaatgacatgtattaaaaataagcctcactaacagttatttatccagaaatgttagttatttactttgagacagggtctcacactgttgcccaggctggagtgcagtggcacaatcaccacttattgcagctttgacctcccaggctcaagcaatcctcccttctcagtctagaatagctgggaccacaggtgggtatcaacatgcctggataatcttttaaaaattttttgtagagacagattttcactgtattgcccaggttggtctcagactcttgggttcaagtgatcttcctgcctcagcctcccaaagtgctgggattacaaacatgaatcaccatacctggccaagaaatgtgatttatattttattttctaagcatagtagctatttctcaaagtatagaccattgataaaaattcagcatgcttaattaaaatattgctttttgttgattttgaggaagcacaggaaaaggtaattccaagtgtttttcaaaatgatctggccatctttaggttgtaagagattgcattcagaaaaaaatgataagcaaatacttcccacagccttctagtatgaacagagaccaatgaatttatttaatacacatctaagaaatcccatttctatgaagaagctaagaaaacaaaacagcaatttaattttggtatacgccctttcaaggcaaatgaagctaggtgtattcaatgataacagatattagtttaaatgaatttttgaggctgggtgtggtggttcacacctgtaatcccagcactttggggggccgaggcgggtggatcacttgaggtcaggagttcgagaccagcctggcccaaatggtgaaacctcgtccctaccaaaaatacaaaaatgaaccaggcatggtgatgtgtgcctgtaatcccagctactctggaggccgaggcaggagaatcacttgagcctggaaggcagaggttgcagtgagctgagatcatgccactgcactccagcctgagcaacagagtgagactctgtctcagggagaaaaaaaaaaaaaaagttttgacatcaatatattattattcaaacctttaattttaacagatgattttcctcttcaattaatgtatataatctataataccaagggtaatgacactactttttgggttttatatgaggctgttatatttcaacaaatacttagaatgggatacttcattcataattgctttcattatcagagtaacttttctatctaaatatgagctgaactaatgcagagaaacccatttccccaaaaatacaatacctggaactgaatatattttagcagatcaaattttttagcaaaaatcctgaaatattccagaagtttagaattatgcaggaagtttggaaaatcttcaggcattggaaagtcactgaaacaggacatttctttgctggtgttggtaacgacagattgatagatacttgctcggccatcttccacattctcctgaaggatcaaataaaataattagtgataattacgcattcaaaaattttttgttttttactcttcctacatctaacccctgggtaatgcgattgtctttggttgctgcagtgtgacgacaatgtttaggtaatgaatgcagtctatgtgttccatcaatcat

SEQ ID NO: 94795 - DNA, 2475 bp, Homo sapiens
agaatgctggggtgggatgctgggccccctgtctaattgggacgggtgtccctcagggcttgcctaaaccctggaagccttagctgtgtggggtccagagccctcagcgggattctttgtccctgaaccctgggatgtgggactgagtggtcagattctagatccacctgtctcagggatcttgccactggctccgtgggagggtccccgggaaggagggctgggctctggggaggtttgttttcacttcttcttccccaccacagctcctgattatgacagaagccagtggctgaatgaaaaattcaagctgggcctggactttcccaatgtaggtgcaggggaaggggcggttttgggggaaagtgcaacgtgtctctgactgcatctcctctccccagcttagaggtgttaagatcaggagtcttctgcccaattcctctcactcctggctgtctaaacagtccttccatgatgttctgtgtccacctgcattcgttcatgtgacagtattcttatttcagtcctgccatgagcaggcacagtgagtgcccggtctcctcyctgctcttgcttatgggaaggggatgctggggagcctggtggcccaactgagcttcgccggtttcccatccatccagctgccctacttgattgatggggctcacaagatcacccagagcaacgccatcttgtgctacattgcccgcaagcacaacctgtgtgagtgtgggtggctgcaatgtgtggggggaaggtggcctcctccttggctgggctgtgatgctgagattgagtctgtgttttgtgggtggcaggtggggagacagaagaggagaagattcgtgtggacattttggagaaccagaccatggacaaccatatgcagctgggcatgatctgctacaatccagaatttgtgagtgtccccagtgagctgcatctgacagagtttggatttggggccaggactcttgcattcctgcacacactggtcttaagtccctggtaccattcatcctccaagtgctttcccatactatcagcagttattctcacgactccaatgtcatgtcaacaaaagcagaggcaattcccaccaaccttaggacacgatccaggcatcccagggtagaaattcagttcctgtatggtaaagtttgtgttcagaatctccttcatcagctctggcctctgacttctgtcctgggtcatttctgtcagccagttcacatcacctgcctgctcctagaatatgcagactcaagtagaagactcaggaatgtaatggcaccctcgaattgcatcttctcctcaacagttttctgagtgctgtcattgacatgcacagggatctgcgcattttcataacagacagctcagaggcagtcagagggcctttattcctctccctccttcctttcaacttgaacttctcatctccctggaaactagtcaatgttcattgttttcttctgccaccccattagaaggaactttctactttccctgagctcccttagttctttgcatccttgattctgctggtctggatccagaggctgccaggtgcttgggcgctcctggggctgacccagaggctattgggaggtcagtgaggacagattcagggacagcatctcattcctctctgccttctgatcagtttagatagggtctggcactcagtcagagtctaataaatgctgatgtatccaattgaagcctgggcactgccccagttccagcttggggaagatggctgcttgcccrtggccagcctgggccgtccacagccccggggaggccacgtctgtgcagggagcttttgtccgagggtggtgacagctgttttctgcctcaggagaaactgaagccaaagtacttggaggaactccctgaaaagctaaagctctactcagagtttctggggaagcggccatggtttgcaggaaacaaggtaaaggaggagtgatatggggaatgagatctgttttgcttcacgtgttatggaggttccagcccacatattcttggccttctgcagatcacytttgtagattttctcgtctatgatgtccttgacctccaccgtatatttgagcccaagtgcttggaygccttcccaaatctgaaggacttcatctcccgctttgaggtgatgcccccatcctcctttctctttgatgccccttgttccgttacctcctttcagatgttttcccagtcctggagctacacacagaataactcgcatgtattgagtactggtttcatgccacgaaccgtgcccagcacattatacctattgtgtgaaatttgaattttataacattccagtaaggtaacagaattatctcgcccattttagagataaggaaactaagaatgagagggtcagtcctttgctcagggtcccagagctagtggaggctgtgctgggctccctgtgagcctctggatctatgggtggca

SEQ ID NO: 94796 - DNA, 31595 bp, Homo sapiens
tcaagttgggggtgccacaaccctctctttgggttttattaatttgctagagtggctcacggaactcagggaaacgtgttttcttgttttgttttgttttttgtttttgtttttgttttgagacagtcttgctccattgcccgggctggagtacagtggcatgatctcagctcactgcaacctccgcctcccgggttcaagcatttctcctgcttcagcctcctgagtagctgggatcacaggcgcccgccaccatgcccagctagcttttgtatttttagtagagacgaggttttgccatgttggccaggctggtcttgaacgcctgacctgaggtgatctgcctgccttggcctcccaaagttctgggattacaggcttgagccaccgtgcccagccaatttttttttaacttgaaacacaaatgctttatttaaagacacatctcaattcctgcgtggcaggccaagaataaaataaaggagaacgcagcacaccattcccactggtcaagtggtcgaacccaacatccaagacccagccagcagccaagctcagcgcaacctcccgacctctggctctgactgcaacagggtgagcacatcgccctcgcacacggggccttttacattgtggatgatggagcggctcgcatcctccataaattccatgcacacctgcgaccactgtcctttagagcccattctgcccagaagcttggtgaccctgaccagcttgataggctgcatgtggctggtgtccatgatggcagtgcggcggcagttgggtgaagataatacttatgtttgctggtttattaagaagggtatttttaaggatacaaatcaacagccagatgaagagacgcatagggcgaagtctggaagggtcctaagcgcaggagcttctgtcctcatggagttggggtgcaacaccctcccagcctgtggatgagttcttcttcacctttctctcagcctccacatgttcagctctctggatgccccccaaatcctgtcctgtgggccttctatactttattggttgtccatgatagaagcatggacaactgtgtcaaacacgattggataaaaataaagtctgatctaaacctagcaggacctgtccacgtccttcctccagagtatggcgaaggaccctttctggaatgagggtcttttgatccacaatcagattagagtcctgccttgggcaagtgaaagagaaggtcagaaatattctgtctcctgagacccaaagcacccaacatgctttgtaacaatggttctgggaactatgagctaggaactgtggacaacatctctatatcaggacaccacagatggaaaagactctgacaagtacagatttctgatcattttaagatcataccactgggctgggtaagaatttctagaactctaagggaaaagctagactcaccaaattgctaacccaacatcaagcaggacaaaaattaatcacacaagactaaatggactgatgaattatgggtttctatgtctttttagaattcaaaaatattgctggttctttcgtttttcagatttagggaaaccttttcttttaggctatctatagcttaaggcaatttggtaacatacctttgtgaacaaaaatggagacattgcttttttctccctacctgatccttccagaatttagaaactactcatgaggattcttatttttatgacaaaataattatttgtatatgctcaatagaatctgctcttggctgggcatctcagcctcccaaaagtgagggattaatcccagcactttgggaggctgagatggagggaagatcacttgaggctagaaggttgaggctgtagggagctattattgcaccactgtgctccagcctgggcaacagagtgaggccctgacagaagaagaggaagaaagaagaggaagaaggaggaggagaatctgccctctttataacaggacacaattggaaatattggttatattatgactgggatatcgaaattgagactgtagatacagactttgcctgcagtacttacagacgcattctatctacactggcttcctagcatcgaaagatttttaaaagttcattttgagattcctgatctaaagttccacccaagcaaacttaaaagagcctatgtggttgatgctattctcactgaacttacctaaataagcagggcaagtttgatgaggctaaacattttgcaaacaaattagtcttactctgattatctctggtagaaatgaggggcaactgtaaagagaaaatgtatgtttcagaagaaagaacattatagtacacttgttcttagattgtagccttgtttgttgttctagagtttttattatctacctgcagaatggactggaccctgaattcttcttgtttcctccaacatatgttgacaactctccaccttaagaacaaagctactaagctggacaacttgatgtaagcatcaagggacaagtctcatgccaacgtgtggaccatacagagttcaccaaaccatctgttgtcataatcagagacagtcatattacaaatcaggaccagaagttgaccattttacattgtgaagcttttccccagatatccaaagaagactagcctcttgcccctctcaatttttccttgctcatgcctatctctttcacttggcaggctaatgctgtagttagaatttcacaccagtagcttctgtgggttacctgataaatatatcgggtctgtcaggccagactctcatctttatgacccaacagatcctttagtttacttagtgggtaagtttggcaacatccctgatgcaactgtttggcatcaaagcaaaccagacccacttcttctcactccctgccttaattttacatagattacctactagctgaacaggaaggggtctgtgtggtttctgacacatcttgttgcacatgggtaaatacatcaggtattgtagactcagctgcaaaaaattaacaaacaggctacttggttaaaatgggtagactccccatctggcttattgtttgatctattcagttttcgttggttgggttcacagggactctggctaaggaacatactccaaacccttggtattatcctcctgacagtcacaatagtagtctccctggtgtgttgtatcctttcaaatgttttaaatgtttgcatgtgaccatccattgaacatcaaatggtccctcttcagctggaatgacacaaactcaaagaaatgcatgatcatggccaggcatggtggctcacgcctgcaatcccagcactttgggaggccaaggcgggcggatcatgtggtcagaagtttgagaccagcctggccaatatggtgaaactccatctctactaaaaatacaaaaattagctgggcatggtggtgggcacctgtaatcccagctactcaggaggctgaggcaggagaattgtttgaacccaggaggtggaggtcgcagtgagctgagattgtgctattgcactgggcgacagggcgagactccgtctcaaaaaaaaaaagaaagaaagaaaagaaaagcatgatcatgaagacactgtaacctatcaatgacatgttgagaccagaaacccaaactgatagtaactgagagaggcacttttaagttttggtcaagctaggtgagagcctgatcaaaatgggtaaaaattgtttttaaaaaatcatgggaggccattgttttggactgagctcttgcactaggtcccaatagaccaggccaaaccaaaattaaatcacttatgttaaatactacataagaaactaaatcccaaaacagattagtttttcctcagttggcataataaggaagtcccttcttctctctaacccttacaaaagagtaacctgaagtaagctaaggttatcaatctgttatttttctatcttgtttcctcgttctcctcaccttacaaaacccatggttctgctatcgcccaggcaggggctttttttttttttttttttttttttgagatggtcgcgctctgtcgcccaagctggagtgcagtggcgcatctcagctcactgcaagctccacctcccgggtccacgccattctcctgcctcagcctcctgcgtagctgggactacaggtgcccgccaccacacctggctaattcaggcaggggcttttattctattttgtagaatgaaggctgcctcaattcatgaatcacgaataaaagccagcgagacctatgaatacatatgacataattttgcctctgacagtgaacttcccctttttttgcctaaaaagcttctccttgcccacctcccccaatgcagcacctatggtatgacatagcacatgtattccaggttacaatcccttgtccaacaaactgttttattattagtatttaaaaaaaatagagacaaggctttgccatgttgcccaggctggtctccaactccggggcaagtgatccatccgccttggcctccaaaagtgctgggactgcaggcatgagccatggtgcccagccccaacacatttttctgaagttgtattttttaaagttttactttttttcttgctctcctgcagttcacattcaatactttttttttttttttttgagacggagtctcattctgtcgtctaggctggagtgccgtggcttgatctcggctcactgcaacctccacctcccaggttcaagtgatcctcctgcctcagccaccccagtagctggaattacaggggcccacgaccacacccagctgattttgtatttttagtagagacagagtttcaccattttggccaggctagtcccaaactcctggcctcaggtgatctgcctgcctcggactcccaaagtgctggcattacaggtgtgagccactgcacccagccttcaataaatcttttttaaaaatttaaaataatttttagaaatagagtcccgtggccaggtgcagtggctcacgcctgtaatcccagcactttgggaggccaaggttggtggattacctgaggttaggagttcaagaccagcctggccaacatggtgaaaccctgtctctactaaaaatacaaaaattagctgggcgtggtggcgggcgcctgtaatcccagctactcgggaggctgaggcaggagaatcgcttgaacctaggaggcccaggttgcagtgagcagagatggcgtcactgaactccagcctgggtgacaagagcgaaactccgtctcaaaaaataaaaaaagaaagaaatagggtctcgctctgtcacacagactggagtgcagtgacacgaacaccgctcactgcagcctcgactgcccaggctcaagcgaccgtcccacgtcagcctcccgagtagcaaggactacaggcacaaaaaagtttttaaattttttggtacagaaggggtttccctatgatccccaggctggtctccaattcctggcctcaagcggtcctcccggctcggactcccaaagagctgggatcacagacgtgaaccacgcgcccggccacattccccaattaatggtttttggagagtggccggtttggaacgggctagcggagtcgttcgttagttaggtccctgcagtgtagatggaggacggaaacggcgctgtgacataagcgggaggaggcgggctgaggcagcgctgtgacgtagcagatgaaagccgggcccgcgctgcactgaggtacttctctgagtgacaagcgggacaagtacgccgtgggcggggccggcgggtcgtgatgttagttcgcgctgtgtggaggcgggccggcgtggcgctgtgacgcagcgggagaagacgggctgggagggcgctgtgctgaacgcccctgcggtcgcgacaggccagcgcaggtggaggcggggctagcgaggcactgaggtaagtacttccctaaggggcggggaagaacgagtgagacatgggcggggcagtcgcctcatgacgtcagtctcgcgcgcgggcggaggtgggccggtgcggcgctgtcacgtaggttcagtgggcggaagaggtggcyccggatgctgcggcgcccgctggccgggctggctgcggccgccctgggccgggccccaccggamggtgagtacgacaagcgcgatcgcgagggtgactcgggtcgaggcggcagcggtccctgcgctttgcggtcgcccagtccacgccgcctccggatctcctcctagccgagacgccctgtgccgcattcaactgtgggccctgagaacgggggagctctggagggcggacgggctggcaacgcagcggagcccgggtcccggagggcggggcgctcctcaggagctgggcaggccggcagttatcgcagtgtcgagctgctccccgggcgtataggagcgctcggtgtcttcccgacacctgggcgcgccgccaaagagagcagctgggagtccctaccgctggcccggcgcggtgtgcgctccggttcccacctcaccctgcaagccttggggtcctgggcggatggagccggctattcyggggctcccaggattctgcctactccgcggcacggcgcagagacggggacttggggaaacagcaggccttcccgacgcatgggtgtggcatttggggttcggattctccaaagccagagtccgggttggggttcttgaagctgccctgctgccattcttgagcgtcgccttagaagtatgccccagtaaggactggtgtgggaagcaggtgcctcaaagttgattttgaccctgcgtgtggtgggcctcggtttcgtctytgcatgaaagaggtcggtcctgaggccccgggctgggtcctgctctgctgtctttgggctcatggccccttcctgtctcaggcttgctctgctctttacctggggttgctgtcgaggaccctgtgcaagactcggccggtttttctttytccctgatggacagacccaaacatagccgcgcagcatcgtgaagggctggggccttcactcctctgtggctctggaagagcccgatttcctcaggaggtaaaggaatgttcctgtcccccccggggaaagaaagtgaaaatgaaagcgccctggctgctcctggtgtggtcccatttaaaacgaggttgctgaaggccaggatgcgtgctacccggatgtgtgcccagaaaccctgcagccaagagcagccgcctggaccaccagcctccccttcatccacctggcccagcccagagcccaggcccacgtctggtggtttgtgtcttacgagaggccaggcgggggctgaattctctcggttctcagaaggtcaagccctctgttagcatctcctcgaacagtgggccgggggcaaggtggtgactctgttcagtccttaggatggctggaagccagaaggaggagattatgccgccacagcagggagtgcctttccaggaaagcggctgctggggcagcatgggagcccagtccagggagcgttctggcagagaccattccggaacatggatctgcgccggcggctcccaggagaccttccatctcggagctcctgtggagaccacgtgcctggcaggtccttacagttgtgggttgtgtggcttcttgccaggcagctgattggagtttgcgactgtgggttggtgagagtggagagcacagaatgtttgctggaatgcttccctctgcccacaggaagacacctttggcgcatgtgttctggtcagggcaaaggctccgtggtttccaccgcaagattgcaggagccttgaggcctgggccacagttttctcccttgggtgtgctccatggaaggtggctttggtgaccgccctgccactggtctctccccaggcaggcaggcagcctgtgcctccgccctgtctccagcggtggtgtggctgtgcttctgcaaggcccgcatccactcactgtctgccctctgcactctctggctggccagggcccccagtagtctgctcattgtgccctcacgcttgggcagagccgaactcaggggacccaggaagagcggagtgttggcccgtccagagttcttggcaattggtgtgtcatgtgtgcctcgtgccctgtgctgggcgagagtgggcacagctgcgcagacaacgcccttggcgaggctggagcctggacccctgcctggcagcagctgggtgaactggtgtcttctgcctgcgggcccagcctcacctcaatagcttactgctccctcaggagggaggaggggaggcctgggagcctgggcttggcggggtaagggtggtgcaggggcaacacctgtggaggaaacaggcggggttggggcccaccagcgtctgctgtctgctctgtgctgggttgcatctgttggtgtctgatcgttgtcagggccctgtggtgaagagacacacctgccacttgctgcttgcgaggaaagggggagatccccaacccaggagccagaggtgggactccagcaccccccattcctgggagttggaagtgaggcacgagctccccaattcctgggcatcggggatggggtttggggccgaggaggggatggagaccagggtcttgtggtagtttggtgggatcctcagaaggtgtggctctcccccttctgaggacgcaaaaactcccagagtttttggcgattgatgtgccacgtgtgccttgtgccctgtgctgggcgagtgtaggcacagctgtgcagacgacgcccttggcaaggctggagcctggacccctgcctggcagcagctgggcgaactggtgtcttctgcctgtgggcccagcttcacttcactagcttagcgctccctcaggagggaggaggggaggcctggtcagtggaggtcaccactgtgtttccttctgtgtgggtttatagtcacgtagcatctaggttcagacccgaagagcttggagccaggggctggggggaacagggcaggaccggccttggggcagccctgtcaggcccaccagtgccatgctggttgtgggttggcagggcagagtgaccttaagaagggccagctcagtggagcaacaggacagaagctcacatggggtccagmccacaggaccatttgagtagctctcccatatcgggtccttcgaagcacatgatttagctttactttttctccttcgtattagaaaagtcaccataataccatcaagtcataatttctgtgatctcagtgcttcaagtaggtgtgtagcaattgctggatgtgtcctgagaactgtaccccttccaccctggcgagaagcaggggccagaaattcacacaagtggcatggctcattgattgtgggagactctggggggctcctagctagtgcattatgggaaccaggctgtggaggttgcagggctcgctggctgggagaagctgaatggataaagaaccctggccactgcagtgcgtgctgatggttggctggcacgtagaggaggtggcagggctgggtgagcagcaggagccaggttagtggggaggcccgagctaagcgcaggggcaaattctgcgggtrggagagccaggagggcatggggtgcatggtgagatgaaaacgatgtgtgcttgtgacaaaaagcccagaagaggcagtaaggagggaggagtctatcccttatggagagcacatggacttctgggtgggtgtcctgcagttcccttcctcttgagtctttttaactgggggtccggtgtgtttgtgatcaatgacatgtatgcgtgtgcatgtgtacctttgcaggtacacatgtgtggtgtgtgtgcatttgcttggtgtgcgtgcatttgtgtgtgtgtttgtgtgtgcatgcatgtgtgtgtgtttgtggtaggtttgtgcacacatcctgcatacctttgtgcctgggagtggcatgtgtgtggtgggtgtcgctgtgcatgatggagttgcagccgtggtgcatttgtgagattacctcggtggcctaaattggggattaggagggcatcctcaggtccttcccactgtctgctcgtctgcccacaggcggctgtgccctaaacaggaggaggccattcacgcctcgcctgagttgtgtccaaggtgtgcgtgtggccaggggtccatccgcttccctctagcccagcccctgaacacagctgcagtgcacggccccactcctcagctctgctccccatcccaactcgaagacgctgccctggccctgtgtgtgcagctcatgtggactgggagggcagggcaggtgcaggtcttggggcaagagctggagctgtcttttccttcctgcacagccgcagagcaggtggatggggctgcttccctgcaagggcccagggccaggccccctggggatttattcgtggcttagaagggtggggccagaagcaggcgtagtggggattagggactcagcacccccagctctcagtccagcagacagacccaccccaggctgactacagaggctgcacctcagcaaacaggtaggccctgttcttggggaggattcccaccaggcaaaggccagctcccgggccctcacctgccacgtgtccaagctaggatcctgtttgcctttcccttgggggctgggagggaggcctccaaccccctctggcattaccagcatcacagataggagtcccaagtcctatgagaagttcctggaataggtgtagattcagtagatctttacaagaccatatctgcagggcaaggtaccagaggacagaggcggggacagggacacttccattccagacctagcagcccagcactcagcaccatgcatgggagcaaatggctggactcctgggtggggtgggggtctcagagcaggctcccagagggcttggaggtgactccaccaggtggggacggcagctcccaggtagggtgtcatcagagtagacagcattgcttgctagggacccctggggaggctgacagggtcagtgggtttcagttggggggctcccctgctgagaacccagtaaagccggccttccattcgtctcccgtgtgcccagagcctggtctgagggccgccctgtgcatgccggcccttccaacgtggcagagctcagggggaagaacacccaggctctcaggagactctcaggccaatgtctccatccctgggtcagccctttcctgccatgaattcaggaaggcagaggcagctcagcagatggggactagaggccgcactgctatccacagcctctcttctcacccccaggcatgtcgggccccaggcctgtggtgctgagcgggccttcgggagctgggaagagcaccctgctgaagaggctgctccaggagcamagcggcatctttggcttcagcgtgtcccgtgagtccagggctctcgtggaggggtgcgtagacctcaaggctgctgagtagtcctagcaccgtgagcaggccaggagcccaaacccaacaggcacacccaccctgcagactgtccgaactcttgcacactcccccccacacagaacctgaggttatcacactcctgctgtcctgcgtgcctgtgtctcccttccctgggtctgttgagtactgataactgggccacagtgtttctttctgggagaaccctcgccttgtaggctcctgcgccttcccagtggtgtgcttcactggctgcctgcatcctggggctcaagtgctgtcgggactgcaagggaaacgctgggtggggcattgggctccgagcagcccccgatgggtgacaggtctctctgctagataccacgaggaacccgaggcccggcgaggagaacggcaaaggtgagtggggtggggccctatggctggagcacccccagtgtgggcagggctgctgggccctgcagctgtgttggctgtgctgccygtctcctgcccccatcaatccctaatctgtgagatgggtccttgcctccaagggccggtgaactcaatcagggtgtcagcgccacagcgtggtgtcgccttccttgggtacagtgtgagaggccggccaaggcctggggctgtcttcctcccaccttggaggcggccacagtgctgctgtccccagccctgtcctggactcggcacttatcagcacttttgagctgtcttctggrgtcctggtaaaaagggctactctgcctgcctgattcaagacaagggacccccttcccaacagcacccccgccccttgccgtgcaacccagtggtctccagtcaccccaccacatcgtcccctctgtaacctgacggtctccagttcccccaccaccttcccccagaacctgttggtctccagtccccatcccatcaccaccaactcccaactccccactggaacccagcagtctcgtatctccatcagtgaggacagtgtgagaaatggtgtctggctcaggcacttggcagcacttgaggggtcctcagatgtctcctgcccagcaaggatctgactaaagcagtcgtgggtgtgggaggggcctgcaggcatgcctgggttgggggcagctggccctgggcaccctggtgcaggtccagtctgccctctggatggcccctcctcttccccagattactactttgtaaccagggaggtgatgcagcgtgacatagcagccggcgacttcatcgagcatgccgagttctcggggaacctgtatggcacgaggtgggccatgcgtgggtgtgggtgggctcccagggttgctgttggcaacagggatccaggtagtgcctgctgcctgcccgccatccacaccacccaccccatggttatgaatgtggccaggttgtggcccagggccaggctcccacgtctgtggcccacagtggctcttttcatgaggctgctgggcccggtcctgccaccgtgcattgtcctggcagggtgaagggtgcacaggacacctcatgctcactacaggcaccttggggagtgggtggcctctgttccctgtaggcggggcagggcgtgggggtagcaggtttgagatgctgtcgggtgctgggtccaggccaggcctaggctcagctgtgggaggagaacgctgggcccgggagggcctgggtgtccctgaagctcctgtaggcctcagagagccctggcacccctgctgacctggcacctctccccagcaaggtggcrgtgcaggcygtgcaggccatgaaccgcatctgtgtgctggacgtggacctgcagggtgtgcggaacatcaaggccaccgatctgcggcccatctacatctctgtgcagccgccttcactgcacgtgctggtgtgtgctgggcagggttgggggctgggggccagggcatgccaggctctgattgccaccccctttttaggagcagcggctgcggcagcgcaacactgaaaccgaggagagcctggtgaagcggctggctgctgcccaggccgacatggagagcagtgagtgtgccgtgggatcaccagggaatgccaggaggggagtcagggttctgaggtctgtggcaccaggkaccctgtgggtccccagacctcctgacacctggagtccctgtgagggtcctcagacctctcaactacctcccaacacctagagtccccgtgagggtccccagaacccacccccagtcaccaagggtctcattgagggtcctcagatttccctctgttacccagagtctccgtgagggcccccagaccccccatcgcccagggtcccatgagatgtccccaaccttctagccccgggggtgtcatgtgcatcctcttacagctgttgcctcttctctgggtctgactgcagcccacaagaagagggcatttaatgttctgctgtgtgtgtagaggatagtgtagcccctaaccagagtcctgatgggtgctggtgtccagacccaagttctggggctccagagagagcaggagtggtgcctgaggactgaggcccagggggcggcccttccctaccctgcacaggcccggctgggctggaaagctgtcycacagccgcagtgaggacagccgcaggccagtgggctgctctgggggtcgtgtgggacctggggtggggctgcatgggctcactgtgccctgaccccaggccccacccacaggcaaggagcccggcctgtttgatgtggtcatcattaacgacagcctggaccaggcctacgcagagctgaaggaggcgctctctgaggtgggcccatccttgtgcctacctgggcaaggcccaaggggaggcctgggggccaggcctttgttgtccatgaggccactgaggttagatgggacagtcctacccaagcactggcatgagacaccgaggtccacggtggagggagagcaggaagcccagcccttcctggataccagccctcccaactccctttcttcctcactggcaggaaatcaagaaagctcaaaggaccggcgcctgaggcttgctgtctgttctcggcaccccgggcccatacaggaccagggcagcagcattgagccacccccttggcaggcratacggcagctctgtgcccttggccagcaygtggagtggaggrgatgctgcccctgtggttggaacatcctggggtgacccccgacccagcctcgctgggctgtcccctgtccctatctctcactctggacccagggctgacatcctaataaaataactgttggattagaaactccataaatgagtggaatgtggccccaaggttggtggggccccatcatcccgatcgggccctgagctccggcagcccaccctaaccaccagccccaaggagggccacaagatggcctctgcctaggcatctgctgcctgccggctcgtggctgctgccccagggcagcatgatgcttgactggcaggcagggaaggtggcagggctggtcccaacccacctggcaggctggcaagtggggagcaggaagcggctgcatggggcagsctgaggctgcaggggtgggccctgagggctgcctcttggtgcccgaccctgtgggtctggcatgggccagaggttccaggagaggcccctgagctctggcagctggaggttctagatctcgaggtctaaggggttccctgagggagatgcccctcccctagctgccccaggggctgtgtgtggtgtgtgaggagcctcctctgctcaggctgcctccctccttccccagtgctcccccagcttgcctgtctaaggcagcacagggccgtgctgccagccacccctagggtcagccccagccctgttctgagcctaggtgaggtgcctctggggtggggtgtagacagatgggtgggagagaaggaggcaggcagggtgcccggccggaaatgggggcggggagaagagtccccgcccagagcccagactgccggaggatacaggccagagccgcctggactgggcggctgggcaggggaggggaggggagggcccaggcagcccccggtcgcttgctccagggcaggtggactgagcttcggaggctggggctggcctctgacctgcttgggcttggagagccctgcccgctgccctgccccccaggacaatcagggattcagaccctgaggccgaggggggaacaatggggcccttgagggcccctcctccagcccccattgtgcttggtggtgagaggtggccctggctcggccacacaccctcggggaggaccagcatccaagcaggtggaagggctctgagggagactggaattttctggcctggagaaggtagggtgctggggtccatgtatgtacctcatggggctgggggctgttgccccaggagacagcctcacgctgtgccccttggccttgaggccccgaaggagggagggcttcctagggcccagccataggagggtgcactccttgcgcctgccaccccctcctgggctccgctgctccacgcagatggtggggtggcccccccactccatgtctgtgtccttcaggcccagctgccttcaccgcagggtgggcaccaaccggtggggtctgctctgggacagctggcaagcgggaggggggtgccttcagtacctcccccagcagctggggcccctcaggtagtgatagggctggcctctgaaacaccagccagctgcattgtgtccaggcccagtcccccaccctcagcggccacctggaggtgagggggccagcctgcccctggtatagacagacctggggccctgctcagtcccctccatagaaggccacaagccactaagtttgcactggggcccagcctaggtctgaagcccagcagaccctgtggtcaaggatccaaccccagtgcctgtcagtgctgtgattaactgggtggaggccccccgggggtgctggggcaggccctcagtgcaaggaaggggcggcgtggctgaggagggggaggcccacacccctctgggagggcggagcaccccagggctgctgcgcagggaggccacagcccaggcgcgggggcccccatcccagagctggatggcagtgagcccaggattcctggctgctgggcgttcaggagggaagagacgggttcgtggatcctgcgggtggagggcagggacagccttaggaggctggggtaatcatcaccccctcactcccagtatggatacccgccagggctcggtttctggagggtgtgtggctcagctccaggcctgcaacagccctggaggctggcctggggagctgcccaggcttcagcgatgacacactcccagcctgacccaggcctaactcgcccccttggtccacctccagaggaggaacagcccctcacttctgggcctgacagctctgttcctgcttgggaccctgagggagggaactcaagaacaggctgcaggaggggcccacgcattcacagcgccaacaaccccagggaggagagggctccacgggggaggaggcaccagcctggatgctgccttgccacctgcacgtgtgcacggccctggcaaggcctggggatcccacagactcatacctccacaccacgctcctcagtgtcccctcactcccctgacattcctgagcgccacacccatgctcttgggctcctgggggtctggtcagttcaggagctgtggcaggccatgtaaggggagccaccatgtgggcaggcacttggggtcttggtgggggcaccttgctttcctgggcctggtggggactcctgagggaggcacgtggtgaggttgagtctgaatagggagggttcatggctatgtgtgagagtgagtgtgtgagcccagctccatgttgagctcgagcagcagtgtgcatgtggcagtgtgcactgcttgtgtgtgggggggtggagggaggagcgtgccctgtgtgtacatgtgaaggatgcatgaggatggctggtgcccacacccagtggggcctactgctgcacaggcaggacagtgaggccggccacagagctgctggggcagagtgggcatggagggagggttccaggcctcgggcttgggtcctaggtggctgagctctgcacctccctctggaccagggcatccagaggagcatggctgagggtgcactcggggctgaccgtcccagggcctgggctgtccaggacaggcagctgggggctcaggcagggacatggaggacaggtagtggagctgccaccacagagctgagctctgggcatcagggtagggggctacggcctgtcagcgggtgaggagaaattgaggcctgaggatgggtgagtgctgtagccccctctgagtgaggactgtccccacacagggccctgcagtggagtgcaggggaaggaggggactgtgcctgcaggagctccagggaagtgggactgggaatctgctttggactgtgagtggacaagcgacagcacagtgcctgccatgcgctggggtaccatcattttcggggaagggaggagcctgccccagggtcccgcctggtgaactgtgtgcgtgggtgcctgtctggtggctgccctaaactgcagaaaacacccacccttcgcggcctgccctgggagggcctggagatggaaggaaatacctgggcccctgaccctgtgctacacccagcagggcggggctcgttctgcagtgcctcaggacccttgttcagacccaggatgagcaggagcttgatgggggagggggcccggctctgaccggtgtcctgagataccaggacaccaggacactggtcagagctggcccagccaggtttgcagacaggcagcctcagcttgggcctgcttgccctgaaacccttcccagaggtggcccccactgtgagcccccatggtgagtccctttgctcttgctgcgcacccctttgaagcccttcctgtgagcccccgatgccaccagggcgagaccgcccccactgtgaagccccctttcacaccctggcctagtagcgagcccccatgagaccctggtccccagtatgagaaccctgtgagtccccggccctccaccaatgcccacatcctcctctacttcccacagccttccctgaggctgaccctgcctcaccactcccagacctgggccaggcagcgtcctggctggtggcctcctgtggtcacccccctacctcgccctgacaccttactaaccccagcagctgcctcctcccagactctgaagcccaagggtgcctccagctctttggccaagctgaagcctctccccaccaatcctcattttgggcaccctggaggtgtagctttggggtgagatctcttggacttgtgtgcacatagtctgcaaatcccgggcctggctccctgggggccagcacccctcccctctcctcccgtgggcctccaccaagcccctgctgacagcctcatcctgcagcactagacagtgcccacctcagcttgtcccgcctctctatcatggtcctttctttaagtaggggtttattttacagcactttcacagaaaagggccaaggtgtggatggctcatgcctgtaatcccagctctttgggaggctgaggcaggattgcttgaggccaggagatcaaggagacgatggtgagttatgattgtgcggctgcactccagcctgggcgacagagcgagaccccatcaaaaaaaaaaaaaaaagtaaatagggtctggctctgtcacccaggattgagtgcagtggtgtgatctcggctcactgcaatctttccctctggggttcaagcgattctcccacctcagcttcccgagtagctagaagtacaagcgcaccaccatgcctggcaaatttttgtattaagaccccatttctcttttcttttttttttttttttttttgagacagcgtctcactctgttgccccagctaagtacagtggtgcaatctcggctcactgcaacctccgcctcccaggttcaagcgattctcctgcctcagcctcctgagtagctgggactacaggcacgcgccaccacgcccggctaatttttgtatttatagtagagatggggtttcaccatattggccaggctggtcttgaactcctgacctcatgacccacccacctcagcctcacaaagtgctgggattacaggcatgagccaccgtgcccggcttaagaccccatttcttaaaaaataaaaataaaaattgccagcatggtggcatgtgcctgtagtcccagctactcaggaggccaaggtgggagaattgcttgagctcagtaagatttacagaaatgctgtgaggatagtgcagagttcttatagacctcacacccagtttccccgttgctgacgtcttgcattagcgtgacatgctcctcataatgaatggaccaatatggatgagctgggattaactgaggtccttgctgtatgcagatgtctttgcctctcccctacagctccttttctgccccgccatggatcccacatggtgtcagtcaccgtgtctccctggactcctcttggtttcggcagcctcctgggtctccttgtatggggtgtcctcactgtctggatgaacactggccggatgttctgtagsatgccccttgggtgggatccctttcaccctcatgtttccttatgagtcttcagggggatgggttttgggaggaataccatggagttgacgtgaccttcccatgagatgctgtgaagcatccacaccattcacgatgcttgtgatgacaccttggccgcctggccagggttggtgtaggaggcatgctgcagaggcgctctccccctctccctcccacaccctctgaagccaggttaccaggtgcagcccacaggtagggatgggggtcatgctcccctccagtacagagtgtccacatggctgctttggattgactctgcacagaggagctgtctcctgtcccccatttggttatacattcagtcacgtactttggcttctaatctatgtcagtctgtaatctgtaacacaagactacttgatttctttcactgctcagagggatccagtctcaggcactgggtgctctacgtgcaggtgctgcttgcacagacttcctctctgacactacagtttgcgccaggctcttctgtacattcccagccccagccctcgggtctgccagttccccaccaggggttcctgattcctgtgattgggagtggaggtaggaaccaaggcctgggccccaggtagattcttgctcctagggtgtttttgcattgaggcctttgcaggcgccagagcaaaggtgtgtgtctgaacccaggtgcatccacatagctgtattttctatgaaaccgcccacgtctctgtgagacaccctgtggtctccagctgtgatcgtcatcacatggaatagtcactagcagcatggaaggcggtgacacagcgacagcctcagggaagggctgaacctgtgtgtgtgcgcctgtgcatgtgtgtgtggcgaggccaggtagcaaaggctcctggtgggagtgggctccagccagtgtgggagccgtgggcagagcacacgaggggatatctggagccaggcgtrgaatgggggcaggggacctggcactaaggcaggtgaggccgcggcattcgctctggttaggagtcacaggcagggcaggagtcctgctgggtgggcgtcctaatgctccccaggcttgcaggcaaggagtgaagtgcttgaggccctgcaggcggggccaggctcaggattggctgggatagggaagctgctctgcagagcagagtggcatttgggtgtggccctctggcagtggctgtgcttgctgggcatctgagtgcccatgttgggggtggcagcaggcccaagagagaattacaggctggaggtgtggatctgggagtccccataggcgtggccctgagaccaggacccaggttcttccagaccattcccaggaccactatgtgggtgcaagtgacacaggcccccagagctaagtgccagccctcagacgccagggcacatcagcccagggccgagccacagtggtctccagagctgagccaatggcgccgtttcctcagctgaatcaaggaagccactccgcagtcagccacaacgggaatgctcacaccatgggcactggcaggcgccattactgcaggctgcccccagagagccatttgttcaatattgcccccacacagctgggcaggctggccctggcactgaaggcctcctgccccatctctcccttgagcctgctctgtctcaggttcctgtcgggctggaatcagtgggccttagcctgctgtgatgggtcaggtggggagggaggtgggccctgcctactggagccagggagataggggaggtggcctcagggctggagtgtgcccgcctgtgcctgtgtgtgcctgatcacacgtgtgtgtgtgtgcacgggtctgtgtgcatgtgtgtgcatatatgtgtatgtggttgtgcatacgtatgtgcatgtgtgtgcatatgcacaagtgtgtatgtgccactgttttcatgcatgtgcatctgcatgtgagtgcaaagaagcatgcctgtggatgtacacatacatctgtttgcattaaccctgtttgcatgtgtgtctgagcatgcacgtgtacatgtgtatgcatgtgtgtgcatgggtatctgcatatgcatgtgcrtgttcatgcatgtgcacgtgtgtgcatgtgtacacatgtgaatctgtgggtatgtatctgagtgtgtgtgcacatgtgaatgtgtgtggctctgaggggtactgcacagatgtgaggaagcagggccacttccccaggaaccctgactgccccctcttcctgccccgggtggggaggcctcagctgcataaagaggccgggagcctcaccagcgactgctgctggtcccacacctgccgctgctgcctcccaggccaggtaccgggagggggccagaggcggagggagctaaggggtctcctgcctcagcgacccaggagcaggtactggccctggggcaaccgccagcagagggtgggcaggggagctgcaggagctctccttctttggagcacaggccctgctgcacagccctttcctgggcacttgcccaccttgggcttggctggtctgcggcatagctgtctctgagggtcgcaggtgctgagtgtggcctcacatcactgggtctataacctcgctggacaccgtccctcctggacggacgactggcttcatcctgaccccagctagagatggtctgggttgagaccatggaggaccaggaacctagactgggcgggcggagccctgggaccctgggcacctgagaagggcagcgggaccagccgggggctggagggaggatggaggattttgtggaggtggagggaccccgacgcccctgtccagggtgtggagggaccccgacgcccctgtccagggtgtggagggaggcagagcagggcctctgggggccgaggggctatggggattgtggactggtggcactttggggtctgggagctgatggtggtgcaggcacggggggctgtgaaggactgagggctgatggggctgcaggggcttgggggctagggagctggaggggccaggagggattgagtggctaggcaggctggggagaccctttggatgctgaaactctgtgggaccctccccaacaacctggatgcggctggggctgggttggtggccatgggtgcagtggacactgagaccaccagtccccacacacttgagtggtgcttgcctcagtgtccccatctgcctcatgaaggcaactcacccagctggggccctgcatctgcacgagcaggggccggatcaggtgggggcttccacttccgtttaaggcggtaagctccacgtcattgactgtgtaagcagagaggggccagctgcgaggcaagcctggagccccggctctgagcgccgcgggctcctaagtgcaggcccctggctgacccctaccccgccccacaggacccgcccgcccgcccctatgaccaacatgagctggagcttcctgacgcggctgctggaggagatccacaaccactccaccttcgtgggcaaggtgtggctcacggtgctggtggtcttccgcatcgtgctgacggctgtgggcggcgaggccatctactcggacgagcaggccaagttcacttgcaacacgcggcagccaggctgcgacaacgtctgctatgacgccttcgcgcccctgtcgcacgtgcgcttctgggtcttccagattgtggtcatctccacgccctcggtcatgtacctgggctacgccgtgcaccgcctggcccgtgcgtctgagcaggagcggcgccgcgccctccgccgccgcccggggccacgccgcgcgccccgagcgcacctgccgcccccgcacgccggctggcctgagcccgccgacctgggcgaggaggagcccatgctgggcctgggcgaggaggaggaggaggaggagacgggggcagccgagggcgccggcgaggaagcggaggaggcaggcgcggaggaggcgtgcactaaggcggtcggcgctgacggcaaggcggcagggaccccgggcccgaccgggcaacacgatgggcggaggcgcatccagcgggagggcctgatgcgcgtgtacgtggcccagctggtggccagggcagctttcgaggtggccttcctggtgggccagtacctgctgtacggcttcgaggtgcgaccgttctttccctgcagccgccagccctgcccgcacgtggtggactgcttcgtgtcgcgccctactgaaaagacggtcttcctgctggttatgtacgtggtcagctgcctgtgcctgctgctcaacctctgtgagatggcccacctgggcttgggcagcgcgcaggacgcggtgcgcggccgccgcggccccccggcctccgcccccgcccccgcgccgcggcccccgccctgcgccttccctgcggcggccgctggcttggcctgcccgcccgactacagcctggtggtgcgggcggccgagcgcgctcgggcgcatgaccagaacctggcaaacctggccctgcaggcgctgcgcgacggggcagcggctggggaccgcgaccgggacagttcgccgtgcgtcggcctccctgcggcctcccgggggccccccagagcaggcgcccccgcgtcccggacgggcagtgctacctctgcgggcactgtcggggagcagggccggcccggcacccacgagcggccaggagccaagcccagggctggctccgagaagggcagtgccagcagcagggacgggaagaccaccgtgtggatctgagggcgctggcttgcgagctgggccagggaggaggagggttggggggctccggtggaaacctgcgaccccttctcctcagccttctccttagccgrtggcctcaggcagactctgcccagaggggcagccaggctgctcagggaaggggctgaaagcggcagaggagtgccctggcttggtcaccactggggccaaggtggggtggagagaggcctaggagccagaaagggccctctgctgtggtctgaaccccagggggagtggggcattgactccacccctgtcctgagctggaataggtcctctgggatgccagctctcccctttgtgcttccctgcagcaacccatggagggcccagggtgcctggtatgggcatcagttggtgggggtgcgggggtgcgtgtccccattccctgcaacagcaaatggggctccttcttcagccctccccttcccagccccaaactgagacagactgggagctgggagcctggggtggacaggaccataccctctttgagcttctgcgatgccggccttccgttcctctgggaggcttgaagttctgcagagatgttgatatgccttgcagcttggacccaatgggtggtggtcagggcctgggggcttggccatgctgggggaatggggctctgggttcctgcctgtggcctgtctgtcctcctccctaattcagacccagcctcaagaggaaagggagtaaaataaaactaacttgtttataaccttgtgtgtgcatgtgtatgcatgtgcacgtgtggctatgtgtgtgactgcatgcacatgtatgtgcattgtgtgcatgtctgggtgtatgcttatatgtgtatgcatgggtgtgtgtgcatggctaccacatggggagacatggcttagctccaggctggctgggagaggagacccctccccagggactggcaggggagtatggtcacaggcgagcccctgtagcttgtcagacaacactcggggcctgctcggtgccaggcagcgtgccgggggcaggggtgggtggggcagggtggagtgcactgatggtgagaaagaaagaaaacactcagagcctcaggttgggccgcagctcagtggatggagggcggctgtctcaggccccgtcatgaccaggacgtcggccagagcctgcaggggtggctttggcgaggggcaggggggctcattagcccctggagcacactccgggtgactggctaccccccagcctcccttaggcctggtgcagcctggccggctgcccctcctgggctgcacacccctctctctgtggtgtccctcagccaagactcaagcccaggctgagccctgagtctcaccgaagcccagctccgggcagatgccaactgcaagctgagtccctctcctttctggggcttgcctggctgacctctggccccatgtgagccctgactcagggagccacggacagaaatgccgaaagtgcagcctcagggaagaaaagcaaacaccaaccccaacaggtgtccactccagtggggacacaccaggagcctctccaagacaggaagggtttggggctgtgctgctggcggtgccgtcacgggggaggccaggtccctgtggtgggggccgcggtgtccagccatgctgggcaactgtgcatggctcacccttcctccacctttggttctgttcaggccttcacctgatcagacgaggccagccacattgcagaggccaatctgctttcctcagtccatctattcaagtcttagtgtcatctggaaatgcactcacagacacgcctagaataatgtgtgaccccatatctgggcaccctgtggcccagtcaaatggacacataaaatgaaccatcacaggccaagcactgtctcacgtctgtcatcccagcactttgggaggctgagatgggagcatcacttgagcccaggagttcaagatgagcctgagcaacacagaccccatgtctacaaaaaatttaaaaagtagctgggcatggtggcatgcacctgtggtcccagtactcaggaggctggggtgggaggatcacttgagctagggaagtcgaggttgcagtgagctgtgatggcaccactgcactccagcctgggaaacagagcaacaccctgtctcaaaataaataaaattagccatcacaggcagactggaggcagaactgctgcttctttgggaaactttagtctttggctatatatctagatatagatataaaaatagtatatagtatctgtgtctatatttcctatggttttgtttctctggagaaccctggctagtacacatcccccagccagagctgttcaaagggcaccccagcttcgagggaagctggaaatgatctcaaacttggagggtgtgcccgttgggactgccatagcaccgcatcatccactgggtgccttaaacaacagacactgattatctcacagtcctagaagggaaggccaagattaaggtgtgggcgaggctggttcctcctgcagcctccctccttggcccgtggatgccatctcccccctgtgtcctcacacagctgtccctctgtgtgcatctgtgtcctaatctcctcttcttttaaggacaccagccaccgtggattaggacccaccccaatgaactcattttaacttaatcacctctttaaaggctttgtctccaattatagccacattctgaagttcctggaggttagggcttcagcacaggagtttcgaggggacaattctgctggtattagagggtatatgcccagtgggaagctggattgccacaagagaaggggagacgggaccctgggacagacctcccttcttgaacatttgggggtgggtgggccacatcaggtttgtgagcatctgctggtgggcttaggctctgttaccacaccctcccagcgggatggccctagccaggagaggctgtgcaagcccaagcctccacgccatctgctagtcctccctctaagaccaagtcctggataatctggacgttcccacaatgtcatgcctgagccccacaccaccacgcaggcctggcatctcccactacagtgggacgtggtatcttagttgctccagtctgcggacccccagaagctaaacccatctcgcactcctggcgcttgatcagtcacttttagaaaacccctgccttggtttccccagccacctggggaggccacgacggtgatgagctgagcctggcactgctgacaccacagcccccctccctcctctgtcctgcatcttccgagctctgaggcaggttggcaggggggccagtcgctggtgggcccagccctgtacacagcaggacacacccagagcaggcggtgctggagcaggctggcgggatgggactccatgtctcacctccatccgtttccacaacctcagccaaaactctcggctgctcatgggagtgcatagtggggtgaggggccagctgctcagagactccctcagaatagggcagtggcactctccttcctctaggaagggaggaagccctgaggcgagaataacaggaaaccaccttcccccaacccccccacagtacctgggaagcaggggctgcgacccctacgcccaggcattttccagttctcactcccctggcccctgcttcagcctggtccctgaagccaggacaggggcggggtttcctcccccaggtgccaggccccagtcccctgcctgctgataaggagaacagcagccagggtggctggtgtagagtccaggaaggcttcttggaggtggcctggagttacggcctcacatggctcaggcactggaatgtggcccccaggactctggagctgaaagctctgtttcctttgagtccattcgaactgaagtggcccctggtgttggtggtggcttctttggggtgggggggcctaggcaggacagattcggagccagtgggcccggcccggggcaccaggttgccgcacgcctttcctgctgcctgtgcaggggtggaagcaaattcctcctctggctgaggaccaggctgacgtgagcccagaggaactcgacccccgcccgtgggtgttgtctgcgccactccctgccccgggtttcatcctgcctgccttccgctctgtccgcatgggactgcccggggggtaccgggtcaccctcaggaacgccaggctctggcagaggaaggggtggcggctgcagccagtggctagggagcgcattctaggcctggcctatctcagtcaggaagctggcgtctggcgggggactgaggcccagggaccttgggggacccagctgatttgctccaggctcctcaccatgcccggagcctcgcctggttgggtaggcagggtccggggcctcacagggcttggggcaggtggggatgctgtgaggagggtccagaagggcaagcgggagctccagggatgaggaagctgcagtgaagagagtgggctaacggcagggcctccatggccacatccagggcctgcgggaattcgctgactgcccaatgtcacctgagcccctaaggcatgccggctgctggcccaggccctcaggacacggcagggagctatggcagagactttctgcttggccaaactccggctgggatctggaactttctcctaggcccatctgtgcacttgcttggaaaatccagttttagtaagagccctactgagtcagtttagccagaaccccacaccctggatatctcaccctcgatgacatccaaccaggtccctcatcctccaccatcacctggtgacgtctgatcaccctgcctgcctagagcaaggaccctgtgaggtgggtttagccagacccctcagccctgatgtctccttagtcattcccacccacagaccccacgctgctcctcggcttctccaccctctgccctgctgtgttggggttgagctccatctcccccaaggccgccaggcagggccccacaccacatgatgcgccttggtgcagtcttcctcactgatgttactacgcatcatgaggaatttttttattcaacagatacaaagacctctgcttgctgggactctgcaccataaggacacattgagtaagtcttctttggtgctttgagtggagggcagtggagaggggaatgtcaacagggtgcatgggccccaggaggccagcaaggcagggatggcttggaccagggcagtcagactctagggctgaaggctgctggggccaccttgtagatgtgtcacctactaccagggaaagtggccactgtacagggctgctcagcagggggtatgggacatcactcctcgagaaagcacggtggggtggatatgtcatagcagtgtgcggttcctgcctaaattgtcctctgtgagttcagctgtgaagagaggacgagagttattggaaggacgtcctgtggtctggaaggacgtcctgtgggaggacaggctgggctccaggggagcttggaatcctgcactgaagaggactatagacacatgatgggggtgaccctggcctgaaaaaagcagaagttaccaaggatgtgatttgaagctgtgattgtgtctcatcatgtcacactgattaggggtgcggaggggttgtgggctggatggtgcctgtccttatccgtggagacacttggggatggagcctcctgccacctgcagctgaagtcccaatggtccagcaaatgaaaaaaatgacacaacagccacacgtggacgctggcgaactggtaggaaagaggaagcggccgggtgcggtagctcacgcctgtaatcccagcactttgggaggccaaagccggtgaatcgcttgagcctaggagtttgagaccagcctggacaacatggggagaccatttctacaaaaaaaatacaaaaattagctggtgtggtggctagcgcctgtagttccagctactcaagaggctgaggagggaggactgcctgagctctggagcttgaggccagcctgggcaacataaccaagaccctgtctttacaaaaaataaaaataaaaataaaaataaaaataaaatgctgatacatgctagaccgtggatggactttgagaatactatgctgagtgaaataagccgtcgcaaacgacaaatcccgtaggattctgctcctgtgaggtccctagaggaggcacgctcatggagccagaaggtacaatgggagctccagggcctcgggagtgggtgtttaacagggagtttcaggttgggaggatgaagaggttctcgagatgagtgacggtgcccgacatgggtgggtgaaaacgaggaaggccaccgaatgggacatgggatggcgcttaagaggccggcagaaacctcgttacctaccgagggtggagcctgcgtgctgacggataggccgagtccccgccccgaaacacaccccgcgcacgatgctccgccccacacgcatgccccacccacccagcaggcacgctcgccccgcccgccccttccagctcgggaggccctgctcctcacgcacgcactctcagtcggcctcaaccggcgctgctccgcccctcaggcacgcacgttccgttcacccctcacgcacgcactctgcgcccgccccttcccgcctccctccggcggccaccgccaggggccgctgtggcacccgcccctcccgcttccttgggcccttcccgctgccccactcttgtccaagatggcgaccgc

SEQ ID NO: 94797 - DNA, 104507 bp, Homo sapiens
tttagcagagatggggtttcaccatattggccaggctggtcttgaactcctgacctcaagtgatctgcccgccttggcatccccaagtgttgggattactggcgtgagccaccacgcctggcggaaaaatgcttttaaaagtcttagtcaacatactattgatgtctacatattttaaaaaattatttgtattacttccatgttggttgtgttggttagaatggatttgattatattgctttcatgtcatttgtgttggtttgtattggatgtttcctttttgtttctttaatgtttaaatggctgtgacaaatgtctttatcttccttttttaaaacacagatcaattctttgggctacattgctagaatgggaattattagatcatgaagtataaatatatttaaggtgcttgttaaatccaccaaatcattttctaggggggaatataccaatttatattttcacatgcagtgtaagagagtgctaattttattgcatcctagctggaacttagtttcataatttttacaaacatgtctgcatccctactaaaaggaattggtgctcctttgagagctgattgattctaggcccggggcagggaaagttcaagatgagcctgctgggtcaaaaagtaaggaagtgctctcaacaaattaggtatagcaagaatatgcctcaacacaataaaggttatatatgacaaaccaacagttaacatcatttcaacagtaaaaaagagcttttcctctaaggtcaggaacacgaccaagacatgcactcttgccacttctatttaacatagtactagaagtcctagtcagggcaattaggcaaaagaatgaaataaaaggcatccaaattgaaaaggaagaaattaaattgtacctgtttgcagatgacatgatttttttgttttttttggagacagagtgttactctgtcacccaggctggagtgcagcagtgagatctcggctcactgcaacctctgcctcctgggttcaagaaattctcctgcctcagcctcctgagtagctgggactacaggcatgcgccaccatgcctggctaatttttctatttttagtagagatggggtttcagcatgttggccaggctggtctcgaactcctgacctcatgatctgcccacctctgcctcccaaagtgctgggattacaggcgtgagccaccacacctggcaggttacatgatcttatacataaaaaaccctaaagactgcaccaaaaaactattagaataaacaaatttagtaatgttgtaggatataaaatcagtatacaaaaatgagtactgtttccaaatattaacagtgaactatctgaaagagaaatcaataaaacaatcctatttgcaatagctacaaaaatatattaaaatacttagaaataaatacgggccaggtgtggtggctcacacctgtaatcccagcactttgggaggccaaggcaggcgaagcacgaggtcaggggtttgagaccagcctggccaacatggtgaaaccccgtctctactaaaaatacaaaaaaattagctgggcgtagtggtgggcacctgtaatcccagctactcaggaggctgaggcaggagaattgcttgaacctgggaggcggaggttgcagtgagccgagatggccccactgcactccagcccgggtgacacagtgagactccatctcaaaaaaaaaaaaaaaaaaagaaagaaatttaacagaagtaaaagacccgcacactgaaacctataaaacattgatgaaagaaactgaagaagacagaaataaataaaaagacatctcatgtttatgggttgaaagaattaatattgttaaaatgtccaaagtgatccacagattcaatgcaatccctataaaaattccaatgactttttcgcacagctagaaaaaaaagtctaaaattcctatggaatgacaaaagaggctgaatagctaaagaattcttgagcaaaaagaacaaagctagaagcatcatactgcttgatctcaaaatacactacaaagctacagtaatcagaacagcatggtactggcagagaaacagacaaaccaactgaacagaataaagagtctatcagttaataggatgctcatttttaaaaaaaaataaaaagtgaaaaaaagaataaagagtccagaagtaaatttacccatttacagtcaattgttcaataaggggacaagaatacactatagggaaaggatattctcttcaataagtagtaatgggtaaatgggatatccatatgcaggagaatgaaattagaggcttatctcataccatatataataatcaactcaaataaattgaagacgttatgtgtaccccctgaaactgtaaaaaacgagagggaaaagctccatgacattggtctgagtagtgattttttagatatgaccccaaaagcacaggctacaaaagccaaatagacaaatgggattacataaaactgagaagtttctacagagcaagggttacaatagacagactgaagagacaacagagaacaggagcaaatatttgccagccatacatctgataaagggataatatccaaaatatataaggaactcaaacaactcaatagtaagaaagcaaataatctgattataaaatgggcaaaggatgtgaatagacatttctcaaaagaggacatacaaatggccaacaggtatatgaaaaaaagttcaacgtaattaatcatcagacaaatgcaaattaaaaccacaatgagagatatcacttcacacctattacaatggctatatcaaaaagacaaaagataacaagattggagagaaaatagagaaaaggaaacccttgcacactgttggtaggaatgcaaattagtacagccattatggaaaacagtatggaagttgccaaaaaatttaaaaataaaactatcatgtgatccagccatcccactacagggtatatatccaaaggaaataaaatcactattttttcttttattgaaattaaaaaaaatctttttatagagatggggtcttgctatgttgaccaggctggtgttgaactcctggcttcaagcaatccttccatcttggcctcccaaagtgctaggattacaggcgcgagccaccgtgtccagccaaaatcactatttttaagaggtatctgcactcccatctttattgcagcattattcacaatagccaagatatgaaatcaacctaagtgtccatcaatgaacaactgaataaagaaaatgtggggctgggcactgtggctcacgccggtaatcccagcactttgggaggctgaggcaggtggatcacgaggtcaggggttcaagaccagcctggccaagacagtgaaaccccgtctctactaaaaatacaaaaattagccaggtgcagtgacaggcgcctgtaatcccagctactcgggaggctgaggcaggagaataggggtggggtggaggtcgggggggttggggcagagggtggagattgcagtaagcccagattgcaccactgtactccagccttggtgacagactccatgtcaaaaaaataaaataaaatgtggtatatatatactgtggaacattattcagccttaaaaaataaggaaattctgtcttttgtgacaacatggatgaacctggggacattatgttaagtgaaataaaccagacacagaaatataccacaagatctcatatatatggaatttaaaaatgttgaactcatagaagtagtgggtagaatggtggttgccaggggtaaggggtggcggagagagaaaaagaacaaaaagtaagatgtgctcaaaaggtaatggaggcatgtcaaatggactcaggagtctgctggaaggggctcacaccagccaaggcggagacacctggagcacagaaatgaatagtggcagtaatgaactataacatgttggaaaaaaatgagtccaaagtcatactaaccaatataaagaaagaaagaaaaagatggaacgctattagttgcagtaaaattcaactaatacatacagaggaatagaagtataatatcatcgaacaataattgattcagcaagaatcctaaatctgtgcttgaatgaaagtttttgaggaggatatatacacagacaaataatctctctacagataaaattcatctggaattaattttggatgtctagtgtgaagtgagaatctaaaatgatttcttttgcaaaaacagtagcccagttttcaatctcttttccacagaaattaaactgtaagctaatatagatattagacggtaagcttcttgaggacatggactgtgtaatgttcacatatatttttattttttaggctagtcaagtgaagcagtgggatacgttcataattctatccttagtgtagtgcttctataactaacacactgcaggttaaattagggactcaaaaatatttgcggagtgcacttttttttttttttttttaaaccatagatggagtttctacatacactgcagtcgtcgtggctgggcaatttattcttttcatatgatctctgtacctatttcatactttattgtaggtttatgaaatattaacatatggtgataattacgagggccttttttgcttatcttaaatttttaaaaaaaatttttttaaaggaaggcagagacttgagcatctttatgggctgaggaggcagagtcattggaaaaggggaggttgcagatacggtgcaagctcccagacaggagagggtgaattgggggccaaaaggattgagctggggaagaagaggccccttcctcagagagatgagggagaaaggcagaccagggcagatgtggatgtaggtaaatgttgtggtgtgtggggaattagcttgttaagggtcacgcccagataccttgggatttttcacgtgggtataaaatatgattctctgatgagaatgatggtcaaggtaatgtgggggtcgtggtggtggtctgacgcagcagtaataaggaatgggagaagctgactacagactcccagaaagattgctgaagggcccagctgaggatggtgactgggatttgcactggactcaacctgcaggtttcgatggtgctttccaactccaggaaaactgggctgggatttgacaaaactcttgaggaaaaggactcacagaatttaaaactgcatttccctttaggtttcgtctgctttccatcctcccctaccaagccccacaactgcggcgagcatgttttctgcagttaactgcactgcgctctcagcaggacagaaatgacgaataactctagccaagctgaacaagatagggcttgggcttggtaactttatttgcatcagcatttgcaacacaacacctaaatgaaaaaattaactataaagccgacatcacttactctgggtcagggaactgtgccattcgctttaagtgcatttacttaatctcaaaaaagtattaagaagtgagtccttttattaatccgactttacacaccagaggtctaaggcctaaataaatgagcaatttgcttaagatcatatggctggttattggtggagtcatgcaagtctggaaacagagtcatcgctaactccggttcagtgctacacgagtgaactgtctacaacaaagcaataacatattatgagtgcccacagtatcgaacacatacggtaaccgcagtccagccagcacccctgcagtgcccagagcaccaagcacccatccgttgaccccgcatgcgtgacgctcacgcgcgcagtccccctggcttcttccaggaaggctgaagcggcctaatctcggccaaaagatcaggacgactcgatctgggctggactccttctgcctgagcatctgatccgagcgtcggccgggctgggaggagccggcccccgggaaagatttcggactgggggacaggaaaacagagggcggagtcttggggggggaagcgagaagccgcrtcaaccatgtaagcagcttcgcttcctgccgcaaccgtccgcggcctgaggagcccaccgccgctctcgggggccgacttccgggggctgagccgttgaagcggaggctggggcggggggcagccggcgcggccggggcaggaggcgcaggtaagggagggggcctggagcttggccggctggggctcagcatgggaaggaggccggtatggggagctccagggccagagctgaggtgaaagtgagaaccagggctccgcagtcgggggctagggcctggctgccggctgagcaaggaagggcagagaatctggctttagaattagcttgtcctccctattccccggctgccttgtctggcgagtggggacggaagccrggtggggcccttgagatttccttggaaacatttgaagttcctttgcctctctctcgacccttacgcctgaacttaattaggaggggaagagtacagttacttttccctctgagtgcatgagttctkagtttgtcagaggcgcatccgtaggctggaaaagaaagttcatgagctgcagaaacgataccaaccgtgggggttcaaatawgtgtttgtctttttaaatgcttgcctctgctatttgagacgattccatttcaacttaggttttggagtytcttgaggaggagcattatttcccaattagtgtttaccctttgcttagaatgttcccaacaaaaggatgagaatggaatgtgttggaaacttttaggacttaggggttttctgcccaatcagaggttattcctaagacagtcaagaaatataagaagtgctagaattctgtataaagcaagttattcgtgtgtatctgatgtgtatacatgattcattatctactattgacgcagtgcatcctgtgttgtaaaatatgtccagtgttgacaatagaggtagtcgcttggtataatgtacttatttctgatttatttgagccccttttttggcactccaaaactcccactctgtcagttttcttacaaaaaatgttctttcttttgtgtttgtgacaaagattgtgtaggttaaatctcttctgtggagcaaggctaatttcctgtgttctccctttttctgctttctggatcctgctctggttttcctttaagcgtgttggtcaaaaattgaacaagaaatctttgttgatagaagctaacatttccaatattcagctttcctaaattattacattgccagttttttttttttttttttttgagagacagagtctcgctctgtcccccaggttggagtgcagtggcgcgatctcctccgactgcaacctccgcctcccagggttcaggcgattctcctgcctcagcctcctgagtagctagattgcaggcgcgcgacaccacactcggctaatttttgtatttttaggggagacggggtttcaccatgttagcgaagctggttttgaattcctgacctcaggcgattcacccgcctcggcctcccaaggtgctgggattacaggcgtgagccaccgggcgggggtctccctccctcgcccaggctggagtgaagtggtgtgatctcggcttactgcagtctccgcctcccaggctcaagggattctcctgcctcggcctcccaaagtgctgggatcacaggtgtgagcagccacgtccggcctttactgactggcttctgatagtttgtagtaggtctgcatatattagtagccttaattagaaatggtgaagtattggtgatatatcagaaggctttgggtaggtaggttaataggactgattaccactcaggaaagagtcctaatttatattttaaagcgttgttaagctgctaaagagtgagagttataagataattttttcagggccctagtgtcattatgtaattattagggttaactatatgattgggtttatatttcagagactacacttgctaagtgttttcatgggaatttttatcttcttatttccaaagccgagtataatttttgtgtagataacctttagaagtaattctaagactctttaggcagaatgycatctctgcctctgacattacttgtgtcaaagtagaatgtaggctgttttccaggggtggttgttacggccatcacattatcgtttctctccagagctcttttttttttttttttttttttccctaaataaaatagagatgaagtctcgctatgttgactaggctggtctggaactcctggcctcaagcgatcctcccgtctcagcctcctaaagtgctgggattacagacatgaggccacagtgcctggcctcttttttttttttaatataaaaaaaacacaaacttttttttgagtgtatacttattcagttatcagcttacttcccaacactttttgctgaattgtcatgacacttcagaaggattgttgatgattattctcagtggaagatattagaaaccttccttccccttcttcttccttttctccttcctctttccttccccttcctcttcctctttttcttccccccccaataaacatgtattgccaaaattctgtttaagtcagtggtttcatttctgccttaatttattaattaaattattgatcagacaaagccttaagtagttagagaacgcggataggctaaaagggaagtgtgaagagctacaaaagtaattttgatttaggtaatacttttggggtgagacttggggtatagtgacagttctactaatgtctgtgtgacccccaagaaagttgttttaggttcagagtaccttggttgcctcaaaggtaaaatgtcataaagccagctgtgtgtgccttccaggattgtaagagtaaaatgagatggtagctatgattttgaatgtgaaaagcattttaccgagactgtaatgtcctctttgtaaagtggagactagattataaactatagtatatatattgttttctccaagggaggaaccttgtctttattttgaaacagtaggtagcctcctggtggctggaacatgcttctgcctgcagggggcccattgtctgggccctagggatctacagagctcagtaggcttaggaagtgtttcaggaaggcctcctagttgatgctgtcctcatgtcctgccagaacagtctccatctcctcctcagccatcttccctcccagggtggtgaggacttgtctgagctctgctcccgtgactttgctgttcccctccttgactaacacatgaagcccctccaggtagtcctcatatgtgccttggttctgcttcttggctgctgcctggagcatgggcaggaaagtcttgaagtccacatgccgggacttcaggtcatcactcttggggttccccaggaccttcatcaccttggcactggtgaggttctggtccagggcccccatcatgtccccaaactggctgtatgggatcttgccatcccccactcagttaaacagcttgaaggccaccttgaactcctccagctgatccttgttaaacttgatcaccactttggagagatcaactgggggctccttggttttctcaggggcctgggggatgggatagctggctcagctttggtcttggctggaggggcccatgctgctgctggcttggcagcacctttggagatggagggccctgctggttcctcccagaatatccttgggaggcatgatgtctggtggccaaaggacagtgtgcggatgggggcacccatctcttgcagggtccgtgtctgggccagactacagtattttttttttttttttttttttgtggatggagttttgctcttattgcccaggctggagtgcagtggcgtgatcggctcgctgtaacctccgcctcctgggttccagcgattctcctgcctcagcctcctgagtagctgggattacaggtacccgccaccatgtccagctaatttttgtatttttggtagagatggggtttcaccatgttggccaggctggtctcgaactcctgacttcaggtgatccgtccacttcggcctcccaaagtgctgggattataggtgtgagccaccgtgcctggaccagtctacattattttaatgattagagttatccatggttcttctctttgaaatataaatcaatatggcagaaaatagtacttttctgtaacttccatctggtgatgtggttagctttattgctttggttgaaatatgattttttggttatttagaaacaaagccctttaagaagatcttcatcttaatgtctatgaattgaggcttaaagggaggaaaaaccaggttcatgtgtttaggagcaaagatagtggggaacaacttgttgatttgagtagttgtcataggtcatgaagtgtagcttgaggtaattgttaaagttttgtagacatgtcattagagaatgactttcatgtcctcgtcttagaaatataatgatttttatattactttttaaaatataaaagttgaggccaggcatggtggctcatgcctgtaatcccagcactttgggaggctgaggcgggtggattacctgaagtcaggagttggagaccagcctggccaacatggtgaaaccccatctctactgaaaatacaaaaaattaactgggcgtggtgactgcgcacctatagtcccagctactcaggaggctgaggcaggaggatcacttgaacctgggaggtggaggttgcagtgagccaggatcacgccactgcactccagtctgggcgacagagcaagactccatctccaaaaaaaaaaaaaaaaagttgaaataaggaaaataagactgaagaatttatgtgtgtgttgtataactagcttccccccataactttaaaaagctgttgtgtatcccttcttccgaaacatcttaaaatgaaagagctagaaatgatgtgaaaatgcttatttttcttctgcctgctcacattaatgctttacctccaaatttttattaatttaaatcttttctataatttgaatagtaatgtttaaaattgagttggctatcagatcatagttgtagatgattggggctcttatgatttagatagcagtgttttcagtcctttggaatatatgaagctagatttatttactgtttgttttcatagtctgacttttcacagaataggattttctggatatttcgatgctgtttggaatcaacttttgagcttcctgaggaattkagatttttgcttgtttcttttgtttttcagactcatgaaatggccacagatgataagacgtccccaacactggactctgctaatgatttgcctcgatctcctactagtccttctcatctcacacactttaaacctttgactcctgatcaagatgagcccccttttaaatcagcttatagttcttttgtaaatctctttcgttttaacaaaggtaagacttattaaagataagrggtttgattcaggtctgattgtttgaaatgctcctttgtctccagtggctcaccatgatcatatagtggttagtactctgttcagctttaatgctgggtctgtaagaaagtgaaatattaacaagcgatagctttaatcgtaggtctccagggtttactgctgaagagaaagctagaattttcactgtaatatcattaattattggtaactaaaggtctggattaaaagctaaatgttaggccaggcgtgatgcctcacacctgtaatcccagcactttgggaggctgaggcgggtggatcacgaggtcaggagatcaagaccatcctggctaacacggtgaaatcccgtctctactaaaaatacaaaaaaattagccgggcatggtggcgggcgcctgtagtcccagctactcaggaggctgaggcaggagaatggcgtgaacccaggaggcggggcttgcagtgagccgagattgcgcgactgtactctagcctgggtgacagagcgtgactccatctcaaaaaaaaaaaataaaataaaaaactaaatgttaaaaggagatttcttttaatagagaaagtagtcgtctttttttgttattctttttttcttaatatgctttaagttagtccatagaatggactttgttcttttgggggttaatagctaaaatatttaaagcaatgaaactgaaaggaacagtacatgggaggaaaggtttatatttttcaaaaattggaagctgtcagtaggcttcttgttgacttaaaactgttagactaaggtgtacatgtaatgacatcaaatggaaagatatttttaaaatgagctctttttaagtaatatgtcttttacttgggacaagaattaaaaaacatggcctatatcttttgtcttttgtttgtctgtattacttgaagtatgttagaaagtaattcttgttgttgtatagaatttggagaggttaatagtgttaattaactcagtagaacctttaataatattaactgaattttatttatgatcatgtttaaagtgctatgaaaaccctttagtacatttttaagacaatgatacttaaaaaaaaaaactattttttagaagagttttagatttacagaaaaattgggaagatagaatttccgtatactcccatacccagttttcctcatgttaacattttacattagtctggtacatttgttacaattaatgaactgttattgatagattattaactaaattacrtattttatttagatttcttgagtttttaccagttgttctttttatattctaggatcccatttgtcataccacattacacttagttgtcataagacaataaaatttctatttagcaaatgtttattgggtacctcctttgtaytgggaactgttttaatagtgtaagggatctgtccagtaaacagacccaaaaaatccctgccttcatatgaagcttgcattttgtttcctttaatatgctcaagaaatttctaatgaaaagtgaaacaaataggagatcatatataccaagggtgtgattattggcctgtaattttgcctccttctttgaattttctttttttaaaatctaggctgggcacagtggcctgtgcctgtaatttcagcactttggaaggctgaggtgggaggattgcttgaggccaggagttcaataccagcctgggcaacatagggagaacctgcttgtatttaaaattaaataaatgaaaaaggaaaaaaaaaatttttagttacgcatataatacatgcatacattgttgcctgaaaattttcatctacttccttctcattgctgaactctcagtctttaaataatgccaagcgttcccttgctacagagagagcagaaggaggccagggagaacagcagcctttgagtggaagttggaccagccctcagctcccttcgaggacacagtctgttaggtcacccacaccttataaraagcagcttaatgaggaactccagcggcgctcttcagcattaggtaaaacagtgttcttatttcattcccttctatatgctagatttttccacagtcattgtgtttcctaggttgtttatagcaggacttaactttcctgctatttggaatagtaagatactatttgaaatagtcaggtactgtttagagtaaataaaactcttacctcggtagtgaaaraatttattgacacctgaaaaaattcttaaacgtctcattaaactttaatttaggcaaggcacagatttcttgactattttttgattaattacttgcttgggtttcagcagacaacagtttgcaacatccccaggagaacacaggttagtttccactttgtgaatgaattctgcatctgttcttggggtgctagtgaaatgtgatatgcatgcctctggctgcagaactctgtcaactccattattgggctgccacttgctcttggccttctgtccttgttggggtgcaaactgtcagtgtggctgaataagttgagctcctctcatctgtctgttttccattctggtctactacacagtcatctccttcattttcatgctcttctgatgagtatgggctggggattggtgtcagaattgagagattagaaaaagagaggtggtttatgttttatttctgtcagatttttcaacttggagtggtttgcctaagtcaaggtgacaaaggaagtgggaggtggcatgatagaggggaagggatgcagcattgggaattagatgccccagaacaccagatctcgtctggtgtggctgatcttcccccagatagtggtggttggcagaaggatattttattgtgagttcagacttggtcagccagaacaaagagaaactgagcaaaagtagagtttctacccgaggactggcacagagctggctgcatcacctgcacaggttttctagggcagtgagcctcagccagggttacatcagccatttggagggaagaatcagaagatggggagtgggagagggagaaagaaaggagctctccttttattccagataatctctattttaacttttaacctcaataaactctccttagctcttgaatctgactcacaacaacactctttttgttgagggagctgttttgactaaatcccatgctgaattgagtgtaggatttttttatttctaaaatcaagttagactaaaatgtaatattttaggagttacaaattggcagcctgccaaaccttgccattggtattatgatcaacttgaactttaatatctccaggtggagcctttactgtctagtttccttactgtccttctcaagtctgcttgattatttgattctatcttgaaggcatttgagcttcagaagcctggtgttatttggccagtcaagttcttttccctattaaaagggctgtaattctataatttactagctttccgaccttaggaaagttatttaattttctaatgttcattttgcaagagaagcagctaaggctatttgcctaagggcatagagctagaccagattttctctctgggtttctttcatcttcagccaacatctgtgattctcttggttccaagaagggtctcactcrtcctttttcagcggatgatgctattactactttcttatattcctaattggctaaatgccagggacttcacaagtttttgcctgctgcacggaagcacagccattatgtttccagtagcttcatctgtcttctttttcaatttgtagatcatggggagttgttttttgttttgagactcaagtttagttattctaatacagtagcaacacatctgaggtatgtgctaaaattaagatataactttatagaaagataaaagttgccaaagttttctaaaataggtacaattttggtagttacttcagtgattacattatcttgggaaattctttgtaaactttagatcccaacctctcatttctttgtaattcttttttttccctcccagccaaaacagcacctatctagcaaatggtgagtttgaggaagattcagagtggggtattttccagtttactttgccataggttatcagtttgatgggtttaagctaataggatgttcatcctttttgtcaaaacgtctttgcttcatgcttaggttttgtaactgccagaaataggcagaaacttcagtggtaattttggtctaaattaaggaaataataagtgacaactttggtgggcataccctattttggccatgaggctggaatttgggcttattagtgatagatttggcttcagtattgctatgtcaggtataaatgatcctttcctatttggagctgtggggttggggaagtgacagggaaggataggattggagttttagcaattttctggcagttttaatttgcttggacataggtcaggttttaccatggcaaaatttgccatcctggatgttgtgaagtctgtcagaatctttgaaggctgggctattaaacttctttctgatcatcttctgtatgagactttggatatatggtctacagatatagacagaactgaactgtttgatcctattgcttacctgtttgactttagagaccaagctaagttaaccctccttgattgctttttcttctgctaaatttctagcaygcatttattataggttggaccaaagggcttaaggagtcattaatgaattttggaccatttaagtgatgttcccattccaggcctgaaaaccatcaatggtctcagacaatgcttgtcttaggcagccttgactcgcttgtaaaacagcattttacatgagaagaaatactttcagtagcctyttacccttataaagacttgttttaactctcaattcatataaccgggtgggagaacataattatatgccaacaataagaggcagtttccatcacatatataccttgttgtatatagatactagggactgttaacaaggttgctttttttttaatccaactcagacacaagaaggaaagcagaacctacctttggaggtcatgaccctcgtacagctgttcagcttcgaagcctcagcacagtattaaaacgcctcaaggaaatcatggaggggaaaagccaggtactgtctagaggctttggaagattacttattaagcgcttatggggatcatgccatacctaatgaaaatggcttaatgccactgaaagaaagcttaattagcgcttcctccagctgtgagcaccctatttttatacataagttcttaattttattgtagtctaatttatcagtttttttcccgttatccttagtgcttttcgcgttctgtttaagaagtgtttatctagttcagggcagtagatattctcctatggtttcttcaagaagctttattatttctgtcaagtataggggtcaggcttccatttttcctcatggatgtccagttggatatagtaccattgtttttgaaaagaccatctttcactgattgcattataaattccaccgtaagtccatatatgtgtgagggtgtgtcagggctctctttttctgttccatacctttatttttttctatccttgtaccagtaccctgtctaaaattattgtagcattaagaataagtcttgatggctggtaatattaagtccttcaatttgttcttcttcaagattgtcttggttattttgacctttcgtattcccatatgaatttttgaattagtttgttttctgcaaaagaaacctttgaggatttcatttgccattgcatattaataatcagtattttcaagaagccttcacacatttttattgttataggatagtgacctgaaacaatactggatgccagatagccaatgtaaagagtgctatgactgtagtgagaaatttacaacctttaggcgcagacaccattgccgactatgtgggcagattttctgcagtcgttgctgtaatcaagaaatccctggaaaatttatgggctatacaggtaaatgcattttattgccagtttacaatttttaaaggtcataactataagacacttataatacaggatagtgttaagccaattttcattttgggttttatgtgtaagacatggggacacaaaggtgagggagacagctttgcttttaagaactttcctattgaataatacagtagatgggacttatcataaataactagagtaaaagtgtatttattgtagatgctagcaaaaaactataggaacattaaaatttattagacaagatcgttagagtagattactaatttaaatcactatgagagttttcattttaaaaggacagatcttccttgacgtaattacatgacactgtgctttggcagtgaattgtgtcttactcagattcytccataaggaacatagtcaaatttcagcagtacagaaaatttaagttatttcttgaaacagaaaaaactgaacaatggtatgttgatttatacagtgatttgggagtagaagatagtcagaaattacctgaaaaacaaaactcctaacatctctctcatgttatttttgttattgtgaagatctttctgtctgctcattttttttccacctaaactactacagagttcagaatcccattatctgtcacccagaaccccattagcttttacaacagcttttttgtttgaaaattacttgtatttctttttttttttggtaataatttcaacttttattttagattcatgtttgttacaggggtatatttagtgatgctgagattttgcatatgactgatcctgtcacccaggtagtgagtatggtatccagtagttagtttttcaaaccttgctcctcttcctccctccctgctctagtagtccccttgtctgttgttgccatctttatgtccttatgtactcagtgtttagctcccacttgtaagtgagagcttgcggcatttggttttctgttctgtgttaatttacttaggataatggcctccagctgcatccatattgctgcaaaggacataattttgttctttttttatggctgcatagtattccatggtgtatatgtaccacattttctttatccatttcaccattggtggcacccaggttgattctgtatttgctattataaaaagtgttacaatgaacatacgagtacatgtgccttttgatagaatgatttattttcctttggatatatacccagtagtgggattcctgartcaaatggtagcagttctgttttaagctctttgagaaatcttcaaaccgtcttccacagtggctgaactaatttacattcccatcagcagtgtataagcattctcttttctctgcagctttaccagcattcgttttttggctttttaataacagccattctgattggtgtgagatggtatcttattgtggttttgatttgcatttcactaatgatcattgatgtggaacattttttcatgtttgttggccacttgtaggtctttttttgagaagtgtctgttcatgtcttttgcccaatttttaatggggtcatttgttttttacttgttgaattacgtttcttatatattgtggatattagatctttgtcagatgcatagtttgcaagtattttctcctattctgtggcttgtttgtttactctgttgatagtatcttttgccatgcagaagcactttagtttaattaggtcccacatgtcaatttttgtttttgttgcagttgcttttgaggacttagtcataaattgtttcccaaggctgatgtccagaatcatgcttcatagrttttcttctaggactttcatagtttgaggtcttatatttaaatctttaatccatcttgaattaattttcgtatatgatgaaacataggggccagttttattcttttgcatatggctagccagctattccagtgccatttattgaatagagagtcctttccctgttgttcatttttgttgactttgttgaagatcaaatgtctgtgtgtgattttatttctggtttctttgttctgttccattggcttatgtgcctgtttttgtaccagtaccactgctgtttttgttactgtagcctattcctatgaaactaccaatgtcgtttttcatagaattagaaaaaactattcaaaaattcatatagaaccaaaaaagagcctgaatagccaaaacaatcctaagcaaaaagaacaaggcaggaggcatcacatttcctgacttcaaattgtaatctaaggctacagtgacaagattacagcttttaaaatacattttttttacctttagtttctccctacctctaattcatatttcatatcctagtcagcattctttgtaaaatgataatttgatcatgtcagggtattttcctgcataatactctttcagagctcccattaccctcaggataaaacctttcttgttaatatggtcggtatgttagcttcctaggtctgccataacacagtaccacaggctgtgtgtcttggaacaacagaaatgtatgtctcatagttctggaggccagaagtaccaaaatacagatcagggaacaaatatagggattctgctggttgtctattctaactgtatgttctagaactggggaaataaccatagagtgagtttggggactcactaaactcacagtgagatggacctgagctaaagcttcactgatcacctgacctctgtaagtccctactctgacaggcagaccagagtgatgttttgggtctcctggaattagtgtcagttgagagtaggtgtctaataacccctgacaaatatgatcatttccttctcctcagtgtccagtcgccttggtaaaagcataggtctctttggggatggctggtagaaagattaacggtgtacatttctggcagtgtagtggggttcttcttcagaatgaccaatcccctcttcattcaaggagttctggatcatctgtaagtggctcaagtctgggaattgagtgaaggatcgtatgactctgttttcatgattcaagttggacttacagctacttgatatggagttgtttcccttatacaaatcaagtaagaattttgttgactgcccatctacttcacttgtggagacattatgatcaactagccaatgccatacatctcttaggctattctgattattgctttgattctgatgtctattatagtaaccatgcccaccttgtctttggcgactaaagtgctgcctattggcccctgccaccctgggatccagtgatccccattgcatttaggtttcctgacccagtagcagtagttcctgctgtaatttctgatctacaaagaagagcaaccacaaagctctttaaggattcggggcctcccctcacaaatttatttctcatagtcgtggttgaaaggttatgtccttcttgggtgagtcagcaagtcttacatggtaaaactacttttaacatttcaatctcccctaacctttggatgccttcttctataatataatagggcatttctgatatttcaaccccatttagtgtaagccaccttttggtctatgtgtcagccagtcatctaaacagactgttggagacccttttaaccccttgagctgcaacaataaatatagaatctgcttagtgggcccatgtcagtaaattcagcttgatccaactttatgttctttccactattatcccataccttcattatccattcccacatgtatttccttggtttttatctgtataaattggaaaaatcatgtagttcttctggagtgtagtgcaccttctcatgggtcacagtttgtatctcacctttcagggcctacctgagcttgagttcctttataggtctggtagcaaagaggagtagtaggagtagatcctgagtaaaattagcagtgtcttgcaaggcagctaactcaggggaggtcattacagcctgtctgatcaaagccaggttaatctcctcaaatgaggtggaaagactgctgctgctggcaaagaagactcagaattttggtgtttaacatccccagctccatcaggatcttcttacatatttccattccttcccaatcaacaccctcactttaatagcagacaaacttcaaggttggtgattcagtttgtgtttcagttcagtcacttgcaggatgagagtgttgttctgatttttaacaatcttagcactgaacctgcaggagataaggatttctttcaaggaagacctagaaactttcagataatttatacagttcttgagctgggaatttgaatccctaaggtwatccatttctttttttacttttgtctaatgcaattaggaggaaccagcccatgtcattatagttgttagcttgacaaaaccattctaagatattaaatacttggtcactcagaactttgccttttataagtattaatatttgattaggagtatctgtaggtgatattttgcatgtctttgttgccacattacacaatggactatcagtgttctctttactactggaaatagagtcattagtgcctttaaatctaatcagcttagakaaccaattccagaaatgtaagaaccaattcagaaaacttacccttargattctgttgctctaaagccattcttggtaccaaaatatgtattaaggttctccagagaaacagaaccagtaggatacacaaacacacatttatatagagagaaatttatgtttaacaattggtcaagttattttgaggactggcaagtctgaaattctcagggcaggccagtaggctggaaactcctacaggatttctgtcttgcagtgttgagacagaatttctttttcttcagaaaactttagtctttgtccttaaggacttcaactgattagatgagacccactcacattctagaggacaatctgctttacttaaagtcagctgattgtaaatattaatcacatccaaaaaaaataaccttcacagcatctcagcttgaccaaataactaatctagccaagttgacacataaggttaatcacaaatgggataatatagtggtctccaacctttttggcaccagggaccggttttgtggcagacagtttttccatggactggtgtgggggacrggggatggttttaggacgaaactattccaccttaggtaatcaggcattagattctcgtaaggaacgtgcaatctagatccctcacatgcgcagttcaccatagggttcacgcttctataagaatctaatgccaccgctgatctgacaggaggtggagctcaggaggtaatgcccgtttgtgtatggcttgtgtgctgcttgctcgccactcacctcctgctgtgcggctcggttcctaacaggctacggacggggagtagtacatgtccctgggattggggacccctggggtaatatatgctaggcacagttatacattgtgaccctgaataaatacaaataactagaaaaatgtctagtacatggaaagggatcaatgaacagtaaactattgttattgatggtaatagcaatagtatctgcatctgtcatgcagctttttggttatatgtgtgttgcctccagtggcctatgagttttttgatggcagggctgtatctcatcaatctttgtattcccatcacaccatataggcatgcgcttaataggctcttgctgatgaactttcttcatgaaatgaaaacttttatgattaggcttggctctgtttattgattttacaattttagttctaatagctgactggttaggcgagatttcctttatagtgtaagaaacaaatgaagtctttgttgtagtaaattgaaagtctttctgcagggagtaatttcacttcttttgtttttttttttggagactgagtcttgctctgtcgcccaggctggagtgcagtggcacgatcacagctcagctcactgcagcctcagcttcctgggctcaagcaatcctcctacctctccgcctcccaagtagcttggactacagggtgcatgccaccatgccctggctagttttgtattttttattgatgtggggtctcaccatgtagcctaggctggtctcaaactcctgtgctcaagcagtccgcctgccttggcctcccaaagtgttgggattacgggtgtgcaccaccatgcctggcctacatgcataatttaataaaactgagtactrygtaatagtagtcttaaaatgaaaaagtaaaaggccattttggtagtgattatggtaaaaacataatacagttaacttttagaagtcttttattttgtatcacttcagttttctaatattagtgggaaaattttaggtrgaattattaaacaacatgttattagtaaggtttaattattttacctccttttttaatacctaaaatgttacagaatcactcaaaacaatgttatagaaaaatagagtagaaatgaaaacttctatttggacaggactgcaccctcaaaaaatacatatttagaaatattaaccttgtttgtcctctcaagaatatttcatttctatccttttttttttttttttcccagacagtttcgcttttattgcccaggctggagtgcagtggcacagtcttggctcactgcaacctctgcctcccaggttcaagcgattctcccaccgcagcctcccgagtagctgggattacaggcacccgccgccatgcctggctaatttttgtatttttagtagagacagggtttcaccatgttggccaggctggtcttggactactgacctcaggtgatttatccgtctcagtctcccaaagtgctgggattacaggcgtgagccaccgtgcccggccttaacttttttttataataattcttttatagtttttactctcatatattatactgcatgtaagcccattttctgttagtttgcttttgaaattctttggagggtactcttcagggcttcacaataaagaccttaataatattttcctccttaattaatttgcctatggaaaatatgttgtttccatttgtgttggtttatttattctattaaaaaatgttattccttgaaactcatgtctctgttagatttcttttttaagattttattttatatatgtttatatttgtatagagacagggtctcggtatgttggccaggttgttcttgagcgcctgccctcaaacagtcctcccgccctcaagcagtccttctgccttggccccccaaagtgctgggattacaggtgtgagccagtgtgcctgtcctagatcccttatttcacttttaaaacctggaaaaaaatactcttttaagcaaaattttctggtatcattgggatatacattttgttttgttttgttttattttatttatttatttattttgagacggagtttcgttcttgttgcccaggctggagtgcaatggcacagtcttggctcactgcaacctccgcctcccgggttcaagcgattctcctgcctcaccctcctgagtagctgggattacaggtatgcgttaccatgcccggctaatttttgtatttttagtagagatggggtttcaccatgttggccaggctagtcttgaactcctgacctcaggtgatctgccgcctcggcctcccaaagtgttgggattataggcgtgagccaccacgtctggcctggtatgttacattttaaactcattataaatgtttatggtagtttggacacctggatgaatttatcataatgatggctctttttttttcttttaacttctaacttttgatttttagtgccagaattcaaaatggcccttaaatatatataatagagctaacaaaattatttcactttttaaaatgtctttttttgagagtctgtacttgaagacatttccgttattagatgaactgttgacccaaggagttaaaaaagttacgttaagcaatatgttactgctatcttttccttcaatttccttgtttttgtttttgtttttttctcctaggagacctccgagcttgcacatattgtagaaaaatagccttaagttatgctcattccacagacagtaattctattggggaagacttgaatgctctttcagattctgcttgctctgtgtctgtgcttgatccaagtgaaccccgaacacctgttgggagtaggaaagccagccgtaacatatttttagaggatgatttggcctggcaaaggtattgtcccttaaatataattttatttagagttgaaaaatatcgatagttgtctgacctttgagtgctttcagttaacacttaccctcttagaattatttcctgtcagttcactgtgttctcctttttctttggcttgcctccagaatgtttgcagatgtttatggatagtgatgatattggctaattagaatgtaagctccatgagaggagactttacatctttcttgtcactgttctaccccaggcaccaagaacagcgcatggcatgtatataatcttgataatatttgttgaacaggcaacaaattgagatttttratttaattaatgaacagaagtcattgagattattaatttctaatgtagccttctgtgagaagaagaatgcctgtacaatatgtattcatatttccamgtgaaattagattttttttccttctgaaggtatatgtcatgtttttctgtaagtatactgcactgctacttcatgtttttttgtaagtatactgcactgcttggtagtagagggtgctaactcttggaagttacctggaattgtttgaattagagtcttagtttcatcagtttctgatttttaaaaattattagttattatttttgagacggccttgctctgtcacccaggctggagtgtagtggcgtgatcatagctcagggcagcctcgaatcccctctgccttagcctcctgagtagctgggacaacaggcgcacaccactgtgcttggctgatttttttttttttttaagagatggggtcttgccatgttgaccaggctgtcttgaactcctggcttcaagcgatcctcccacctcagcttcccaaagtgctgagattacaggcatgagccactcactgcacctggcctctgattattttctttagctgaattattttgttaagcataataccaaatctggccgttacaaagagcctatagttttaagtaacatctctctgataagttaatttctcagttaacccttaaggaattgagaaattagtatgtaatgaatttaaatagaagtaaaaaatgaattaattacmgctacattcaatatgtatgaatctcagggacataaagtggagtagaaaagaaaatcatctaatcatgtcaccaggaaaatttaattaatataaaatttaaaaatacacaaaactactacactgtctagggactgaaatgtggtaacacttaaagacgatagatatgaaagttataacagtggtttcactgagggaagggaagggattaggactgggtaggggaatttcacagtcagtggtagtgtactttttctttttctttttttttttttttgagacagagttttttttgctcttgttgcccaggttggagtgcaatggcacgatctcggctcactgcaaccttcttttcctgggttcaagcgattctcctgcctcaacctcctgagtagctggacttacaggtgcccaccaccatgcctggctaatttttctgtttttagtagggacggggtttcatcatgttggccaggctggtcttgaactcctgacctcaggtgatctacccgcctcggcctcccaaagggctgggattacaggtgtgagccaccgcgcctggccagagtttctttttcttacattagtttttatttatttatttattttgagatggagtctcgctctgtcacccaggctggagtgcagtggcgtgatcttgactcactgcaacctccgcctcccaggttcaagtgattcttgtgtcttagcctcccaattagctgggattacaggtgtgtgccaccatgcccggctaagttttgtattttcagtagagatgggttttgccatgttggccaggctggtctcgaattcctaggctccagtgatttgcccgcctcccaaagtggtggcattataggcatgagccaccatgcccagccttttcttacattgcttcatgaatactttggtgtttatggcattatgattttttataccttacatatattttataaattttaaaaattgattctatgtttaattaaacaatatgaagtatagagtttttttagtttttgcttactttagttagtaatgctttttagttgtgacaggccctgtcgtaatgggcagatgtgatttaacaaaacaaatcaggtaagaaagctccctgagagatgtacaatagatgtcaaaggtagaatgattgttaaattttaggttctgtgctaattgcttaatgttcattctcttttagtcagcatatctctgtggtaggcactattttctccttttgacagatgtggatgctgaggtttagcgagattaagtaatgaacccaaggtcatgtagctagtaagaggtcgagcctgcacttggacctaggtttgtctgactctatggtgctattctagtgggttatggggactgagaataaaatatttgaactcaagatttccctccaaaatcaatttcatcttgtattaataatgttagacgtttcaaaggcacccatccaactaactttatttacattccatatacttaaaaactttttaaaattgtcatttcggcattytatattcttaaaagccatgcactgcaaaaactatcattcataccatttacaccctaattaaaggaagaacaaaaatgacacataatctcattattgcaaggaaaaagattaaatctgcttttaatgttaaagcgcctcattgaaattcccttttactgtcctgaattatttcagtattttcctattttctttatagtttgattcatccagattcctcaaatactcctctttcaacaagacttgtatctgtgcaagaggatgctgggaaatctcctgctcgaaataggtaaactgacaaatgaaaacactgtgctctctgatgtttatttcttttcatgctaataagaagaacaaacggataaaaagggtgggattgattgtcatatacttccgtagctctaaaagctgaattaaactatcattttctttttgctattcagcccttgtttccattctctcagtgactttccagtattctccagtggcttccgggtttggaacctacaccatcctttctcttctggttaaataagacgtgaaggatgtgagggaaggagccatgtggacattttgtggaggagtgtcccaagaaaacaggaataacaaattcctgagaggaaatacacttggcaaggaataacaaggaatcctatgataatggagtagagcagtcttagagttaattataaggactctgtcatttactctgagtgagatgggaagctgttgragagttttacattttttgtcgttaatttttaattgctttgaaaaaatgtcaaacatgcagaaaagttgcgagaatagaaaaatatatcttcatgtatttttcattaagatttactaatttatattttgtccctttgccttctcattttttctttttttaatttttatttatcttattattatttttgagacggagtctcactctctcgccaggctggagtgcggtggtgtgatctcagctcactgcaagctctgcctcctgggttcatgccattctcctgcctcagcttcctgagtagctgggactacaggcgcccatcaccatgcccagctaatttttttgtatttttagtagagacggggtttcaccgtgttagccaggatggtcttgatctcctgacctcatgatccacccaccttggcctcccaaagtgttgggattacaggcatgagccaccgagcccagcctgttattttttagtaaaatacagagatggggtttcactttgttgttcaggatggtcttgaacttctgacctcaagcgatcttcccacctcggactcctaaagtgctgagattacaggtgtgagccactgcacctggccatcgttttttatattgtatatacatgtatgcatattttctgaaccatctgagagtaagttgcagacatcattatcctttatatatttttattaagtttattttttatagcagttttaaggttcatacaaaaaatgagcagaaagtacagagagttcccctatagcccctgtccccacacatgcacaatcttcatgactatcggtgtcctgcactagagtggcatattgtattcagtggacctactttgacacatgatcatcgtctaaaagttaatagttaacattagaattcactcttggtgttgaatattctatggatttggacaaatgtataatgacgtgcgtctgtcattgttgtatcctacggaatagttcctctgcccaaaaagtctactgggcttctcctatttatcccttcctctccccaacccatgacaatcattaatcttttttactgtctccatagttttacttttcccagaatgccatatagttggaattatacagtgtgtagacttttcggataggcttctttcacctactaatatgcatttaagttttctctatgtctttccatagcttgatagctcatttctaagtgatgaataatatcccaytggctggatacactatagtttatctactcacctactgaaggacatcttgattgcttctaagttttatcagttacgagcaaggctgttataacatctgagtataggtttttttgtgggtgtaattttcaattcatatggataaataccaaggagcatgattgctgagtcctatggtaagattatgtttaattttgtgaggcactgctagacttttttccaaagtggttttaccattttgcattcctaccagcaatgaatgagagttcctgttgtttcacatcctcatcacatttggtgttgtcagttttggattttggcagttttaatgggtgtgtagtattatctcatgtgattgacttttgtatattaatcttgtatcctgccaccttgctataatcacttactaatttcaggagttcgttagttcttttggattttctatataaacagtcttgtcatygaacaaagttttgtttcttccttcccaatcagtgtactttttatttccttttcctgtcttatttcattagctaaaacttctagtccaatgttgaaaaggagtagtgagaggggacatcctttccttgttcctgatcttagtgggaaagctttgagtttctcaccattaagtatgatgttagctgtatgttgtttttcgtagatactctttatcatgttggggaagtttcctctattcctagtttactgagagtttttataatgaaggagtgttggattttgtcaaatgctttttctrtatcaatgacatgattacataattattcttctgtaacttgatgtgatgggttatattaattgatttttgaatgttgaaccagccttgcatgcctgggataaattctatttggtcgtggtttatatagttttttatacattgttggattggatttgttactgttttgttgaggataatagtgtatggtttccttttcttgtcatgtctttgtctggttttggtattagggaaatcctggcctcacagactgagttagaaagtatttcctctgattctatcttcaggaaaattttgtggagaattgacataatttatttcttaaatgtttggtagaattcaycagtgaatgcatctgggcctggtgctttctgttttggaaagttaccagttattgattcaatttctttaagagaaataggtctgtttcgattttcatttctgatattagtactttgtgttttctcccttttttttcttagcctggctggatacttactgattttattgatcttttcaaagaaccagctttggctttgttgattttctctattgacttcttctctaatctttattattatttttcctgtgctcactttggatttaatatgctttttgacaaacactttgttccctaaggtggaagcttagatgattgattttagatcttctttttaaatgtatgcgcttcgtgctatgaatttcctgctaagcactgctttctgttgcattccacgaatttagttaggttgtgttttcattttcatttagttacaaatatttaaaaatgtttctttatattcttctttgactcatgtatttttttttacaagtgtgttgtttcatctccaaggattttgggattttgtagctgtctttctgttaatgatttctagtttgattccatgttggttgttgaaggcagacattgtatgatttctactcttaaattttttatggtgtgttttatggcccagaatgtggtgtgttttggtgaatgttccatgttacttgagaggaatgtgcattctgttgttgaattaaacagtctataagatattcattatatccacctgattaatggtgttgttgagttcagctatgttgttattgattttctctctgctggatgtatccacctctgatagaggggttaaagtctccagctataataatgaattcgtccatttctcctgtagttctatcagtttttgcctcatatattttggtactctgttgttaggagcgagcatacatattaaggattgttctgtcttttggaatattgatttctttatcattatgtaatttccctttttatctttgattgctctgaagtctgttctgcctgaaaattaatatagttactcctgctcttttttttattagcgttaacatggtttatctttctccatctatttccttttgttcatgtatcctgttttgatttcatttaaaaatttaaaaattaatttttaaaattgacacataataattgtgcatatttatggggtaaatagtgacattttgacccttcacttattttttaatctgtatgtgtctttgtatttaaattaggtttcttgtagacaatgtatttttgggtcttggttttgatccattctaaccatctctgtcttttagttggtgtatttagactattgacatttaaggtgattactgatgtagttagagtaatccctgccgtatttgttactgttttctacttgttgcccttgttcttcctgtttttgtcttctgtaccttttccacctttatgtatttaattgagcattttatgttattccattttctctcctttttaaaggatacgagttacattcttttttttttttttaatgattgccctagagtttgcaatgtaacttacaactaatccacatttactttcaaataatactatactacttcacaggtaatgcaaataccttataacaaaatactcccaatttttccctcccatctgttgtattactggcattcatttcacttacatataagcatgcgtacatacataattgaatatattgttgctattattttgaagaaatagttatctgttacatcaactaagagtaagaaaaagaaaagtttttactttaacttattccttctttgatgcttttctttgtgtattaatagatataagtttctgacctatatcatattccttctctctgccttttcagcattttttgcaaggcaggtctactggcaaaaaattccctcagttttcatttgtctaagaaaggctttacttctccttcacttttgaagggtatcatcagggtacagaattgtaggttgatggcttttttctctcaacatcttaaatatttcrtttcattctttttgcttgygtggcttctgaggagaagtcagatgtatttattatctttgatactctacaggtaaggtttttttttttttttctttaaatagagatggggtcttgctgtgttgcccaggctggtctcaaactcctggcctcaagcgatcctcttgctttggcttcccaaagtgcagggattacaggtgtgagccaccatgcttggtctttaaggtggtctttttcaagatctttttctttatttttgactttctgccatttgaatacacttagttttgcctatgtgtagtttttttgacatttatccacgcttgtgttctctgagcttcctggacctgtggcttggcatctgacattaatttgtgggaaattctcagtgattatggcttcaaatattgcttgtgttcctttctctctttcttcttttttcggtattcccattacatttatattataccttttgtagttgtcccacatttcttggatattgtttgttcagtcttttttctatttgcttttcagttttggcagtttccgttgagatagcctcaagttcaaagattctttccttacctctgtctagtctactaagagtccatcaaaggcactcttctttaatgttatggtgtttttgatctcttgcatttcctttttgcttctttcttagaatatccatctctctgcttatattatctgttcttgcctgttgtttacttttcgcattaacacccttagcatattaattatagtttaaaaacaattcctagactgataattcccacattcatgttgagcctgtttcggatgcttgttcagtgtctttgaactgtgttttttggctttcattatgccttgtgattttttgttgaaaggtggacatgctgtactgggtaaaaggaactatggtaaataggcctttagtgatgtagtgataggatgtagggggaggttaagtggtctctagtcctgtgagtcactgtcacaggtgagcctgtgcccctgaactgtaaactttatcagggcttttcgtttttttccccttaggtgagacagaatggctggagggggctggagttggggatttttcttcccccatgtggaaggctagaaggggctgtggttggggatttccttctccctgggtaggttaagctctgatataactccagcaggttaggctctggtaaaatagtttctcctcagggcaggacttgttatgaagaacagaatgctctgacgtatttttaagttctttattctctccctctgctggaagccagaagccggagggaatttttctgacattcactgtgaggacgtggtagatctggaagtgaaactcccaaaagcatccccactacccccatgactgggttcacctagaatttgtatctctggtttgtctacactgagcttcaaggaatttgtcaatttgatttcaggttttcctaccctattactggttcccatggaggtttctgctccagtgagttgtgatcctctgtatctgcttgtctgtctgcagtatttggagcaggatttggcttgtgacctgacttctctgatggacctaagaacagttgatgatttttctctttgttcaggttttagttgttgagatggagtgaagatgctcacgtgctagaccagaagtagaaagttctattttttacttttgaatacttaagtgtttttcctcagaacaatcatgttctcttacataacaaatttaggaaattgtaacagtggtacatttctattatgtaatatactgtaggtattctgattttgccaattgtcctaataatgtttttttgtactgattttccccccaatctgtgatgcagttcagaatcatattgaacttatttgtcatatgtcttggttttctttactctgtaacagtatcttagtctttctttgtgaagaggatagaccagttgtttagtaaaatgcccttcaatttaagtttatcaaaagcttcctatgattagatttgggctgtggagttttggggcagtaatactccatgagtgctacatccttctcaatctgttatgttataaaggacacaatacaagtttatcccattggtgttgttgagttgatctctcacatgttaggtttctccactgtaaagttactattttatcctttgtaattggtaagtaatatgtgggggagatactttgaaactgcatgaataccctatatcttactaatctttcagtcaatagtttcagcattcatttatgatacttgttgaaatgcaatgttattatgtttgcaaaatggtgatttttctaagtctatcattgcttttacatttattagttgacattctactctgaaaagctttccgttgttggagagttttgggtggagtgtggaaggatgacatgacattttttttttttagacagtctcgctttgttgcccaggctggagtgcagtggcgcaatttcacctcattgcaacctctgcctcctaggttcaagcaattcttgtgcctcagtctcccgctagcctgggattacaggcacctgctagcatgcctggctaatttttgtatttttaatagagacagagtctcaccatgttggccaggctggtctcaaactcctgacctcaggtgatccacctgcctcggcctcccaaagtgctgggattataggtgtgagccaccacgcctggacgaaacagacaaattctaaatatattttgattgtagagctaataggatttgctaatcaactggatgtaggcttcaacagaaagacatcaaaggtgactcaggtctttgacctgagcagttggaggggtggaattaccaactgggaggaacagtttggttttagatgtgttgaatttgagatatcttctagacatccaagtgagatgtcaaatagttggatatatgagtccagaatttaggggagggctacaggctagagatgtaaacttggatgttgtcatcatgtgtatggtatttatgaacttggatggagatcatcaagagaatgagtgtgaaaagggaggaaataaggactaaggactgagattggagaaatcaagagaaaccagaaaaggagacggggagaggccagtgaggggacagggaaaccaggagggtatttatcttattagtcaagtggagaaagtttttcaaggaaagggagttatgctgctgatatgttaagtaagatgaggagtgaaaactgactattggatttaacaacaacattggtaatcttgataggcagtctcagtgggttgtttggggtttaagagataatggaagaattactggagatgagagttttgctgtaaagtagagggaaatgcagccgagggatgtggagtcaggagatggctttttaaaaagatggggaaaattacagtattcctgttggcatgtgtagaagtgtagggatacctgtgctaatttacagtctatctccatgtgttttgaattaatgctaagactgatgtaagtctttaggaaagacgtaatttagtcaatgaatgctgtctctaaatataattttaatcagtattcttgctactaggctatttattacagcttttgacattaaaattgactaattttcttttattcttgttgccactatattagaatatgtgcaaggatggttaaaatgatagagaagtagaatgtatggataatgcacccattggaaaagagattaaattaagaaataatagcaagctttcactgaaagactatgccaagaaataamtaaccaattatttttaaaaattgcttatcggctatttgatatcagtgatttcctgttaactgacactttgctaaacctgtgaatactttcttaaattatttaaaaaatatttttatctttatactggggaaatattggtttttcaattgacacctaattctaggtggcagccctgatacataytagkcgagctactttaggcagattacttaatcccttattcttgatttctttatctgtaaaatagagctagtaatacatattccataggatgctgtgaagattaaatgtgggaagatacagatactgccctaatgaatgagttacatttatgtagtctaacatatcataggtgcttttgccttttatcctttatgtggaggctaaaattgggtttaatttttttctagatagaagccaactaaatttctagttaccctttcttttaaataaattaaagtttccttgatgctattggtattccacttctaagtcatttgtttggtaactttaccaagagtcaaaattaaggatatgtatgaatactgatattatgagaagaaacaaatttcttgtaatttttctactgacaaaatagcataatgtaataatatttgaggacaatattttaaatataggtctactagtgagaagaaaggaattctttttttggtcataacaytttgcttatttgggcgtcaaaattggtgttcccttcatcagattgattgcattgcagatatttaactataaaaccttcttagttcatgggctatacagaaagaggaagaaggctagatttggcctgtgggccatagtttcctgactctgatctgcaagattatttctgcatttaatttcattctttatatttgttattaaaaaaaaaatccactaacttacagcattttaacaagaagactttgtatctattccctttgaaatattactgatatatgaactatgtaattgttttcctgtaatctttccataactactttcttttaaacttatttccaagtaattttagacacacatagaattgcaaaatatagacttacatagggttgcaaatatcgtacagagagtttctgggtatcctttaccaaatttctcccaatgataatatcatgcataaccatcataagtacttttaaaagtacccttaacattggtaaataagcatttatttaaaaatgaattttctctgtaattctgtttattgaagaagaatttacacctgtgatttcacttcttgtttttatttccagatcagccagcattactaacctgtcactggatagatctggttctcctatggtaccttcatatgagacatctgtcagtccccaggctaaccgaacatatgttaggacagagaccactgaggatgaacgcaaaattcttctggtactggtccagtatctttgacccattgctagttttgagcatagagaatgtttatgtgactgagtctttttttttctttttgagacacggtcttggtgtgctgcccaggctggggtgcagtggtgtgatcttggctccctgcaacctctgcctctcagattcaagcgattctggtgccttagtctcctgagtagctgggattacaggcgcatgccactacacctaattttttgtatttttagtagagacatggtttcgccctgttggctaggctggtctcaaactcctgacctcaagtgatctgcccgccttggctcccagagtgctgggattacaggtgtgagccactgcacccagcctgtcactgagtctttttaataagaaatatataagtgaaatagcatatcagttaaacagaagtgcttagcttcagttttactaggatcacctgagagatgggtcaagtattctatactcattgcattaatattttcttttctttctttctttattattattattttttttggagatggagtctcgctctgtcaccaggctggagtgcagtggcgcaatctcggctcactgcaacctccgcctcccaggttccagcgattctcctgcctcagcctcctgagtagctgggactacaggcatgtgccaccacactgagctaatttttgtatttttagtagagacggggtttcacagtgttggtcaggatggtctcaatctcctgacctcgtgatctccctgccttggcctcacaaagtgctgggattacaggcgtgagccaccgcgcctggccagtattttctttacccttttatctggtaaaatcagaattcagttacctatgtaataagagagcttaactcttagatcccatattgctatttaagctttgaagcatgtttgttatacacatgtaacacttttcagacatttaatactmtatgtttatatgaaataatcagttgcttattgaatttatctgtgcataaaatactgtgttcaattctaagagtgactcagagaaatggaaggtatggctgtgtcctcaagcttataattcaaaagtagaaataagagccaggtgtggtggcatgcacgtgtagtcccagctacttgggaggctagggtgagaggactcttgaggccaggggtttgaggctgtagggtgctgtgatcatggctgtgaatagccactgcactccagcctgggcaacatagcaagaccttgtctctaagacaacaaacaaaccagcaaacccacaaaaggtagaaataagatcagtgggaagatccttaatagtggaagtagtaatactttaataataaaaaagtgtcaaataaataaatgactatatgtcatgtaagaattcaaaaaaacagaaagctcattactaatgagggaatcagaaaaaggcttaaactgaaggacttgaactggaccttgagagatggaatcattttggatagrcagtgaggaaggtgaatcttatttaaaggtrtgaagaaagatacagaggtaagaataagcatgacattttccatggccagaagtaggattttttaaytgggagagagtttaagtaggagtctgggggcaatgagaaaggaaagttatttgggactacctggtggaaggcaatgaattctgtacttacaggtgtagatttgaaactttagttgctgaggaacattcagaatttttttgagcagggagtaatttactgaagctcttctttttaaaaaactcatctgtcagttgggtacacagtgagaatctggtggagtgaaagcctctaggaacagttaccttaggttagtgtgattaactgttgtctccctctgccttgccccatctccaaagaagaatacataaataggagattgataatatgtgccattgactgaaaaaagaagtatttggaatagttggttttcaagagaaaaagttatgtttggaattagatgagctgagttcaagctgttcccacgtatatgacatttgtattaaattgwgtgagttagctaccataaagaaatccaagttaggtttccttttatgagtctaaaaatcacaggaaaacatctgaaaaggtatatagcrtttttctcaagggtaactacttgctgttaatgtgattgcaggacagtgtgcagttaaaagacctgtggaaaaaaatctgccatcacagcagtggaatggagtttcaggatcaccgctactggttgagaacgcatcccaactgcattgtaggaaaggaattagtcaactggctaatccgaaatgggcatattgccacaaggtattctgatcttagaaggtttcaatattatttgtttattttgaatgagaaaacatatttgaagatagtaagagttacagatttctttgtagagttagggtgctctttgttttatgtaattgatggtttagggtgctaattacttaaccctcctccaatctgagttttaaccagcagagaacagatgcaaggagtacaaggagccaaataggatcttaatttaccttattaaaagcagaagaactctctagcaaaggaggattagagaaggtagctggaacctaaggccaaagaattccccagctactgttcactaatctagacaggttgtaacctgtgttgagtatttgatccataagctatgcctgtcgggtcctagcttgcctcacaaatcatttataaaaaagagtaacagacaggtcctgcttttcaaatacatgtatcccctagcttttactattttctcagattagctactcctcctctcatgggaagaaaaaggtacgtaatgaagtaaagagagaaatagctttaagcagtaaagccctggttgcaattttggctgtatatattttttagctttgtgcttttagtcacattattcaatctctgagacttcttcaccatgaggaaaattatgtggtcctgtgaataaactgtgggggatgaaataatagtggctgaagtgctttataaattgtgaaatgccatataatgtatggtgtcattaagtgtctatttcatatatatatatacacacacacacattttatggctgtatctgtaatatttggtattgtcttattaaaactaagctccttgaaggtaggagcttttctcaacattttaaaatctgttaagtatagggttgtgcgtgcattgaatgctcagtcaatgcttgctgttattaaaattaggttttgttgggactgccttaccagtagtttcttctcctttactatagtacctggaagaatcttttagtttgctttaactctctcgtttcgtcctgtacttatccaagggccatttgaaattctaactctgattagaactgaaaaaaaatattttaaggttgtgtcttatctggtacttaactattctgactgacttttaaaacttttcatttttgtgggtcttgattcagggcacaagctatagcaattggacaagcaatggttgatggacgttggctggattgtgttagtcatcacgaccagcttttcagagatgagtatgcgctgtatagaccactgcaggtacttttcagtgtttactgccaattagaatgtagcaagcttattttatagtctttcttcatcagtgggaataaaaagtagtttattagaagatgatttttctaacattttttcctgctgtttgaggaaagttaaaactttttttacttggtaggcagcagtgatgaaaaagctgccattagaatcaaacattttattgtttactttaaatttgatcagacaataaaaaaggaaaaagataatcaaacacttttttcagttggtgtggtagttcttaaatttgggtttatggtctttatagttgcttatcatttaactttaatggtttttggttttattaggcctatgcttttagaactgagagtataaataataaaatgaaaaattttatggcatctattgaaatcattttgactctagaactattgtataactagtgatgatggctgggtacggtggctcacgcttgtaatcccagcactttgggaggctgaggtgggtgcatcacctgaggtcaggagatcgagaccatcctggctaacatggtgaaatcccgtctctactaaaaatacaaaaaaattagccaggcatggtggtggacacctgtggttccagctacttgggaggctgagacaggagaatgacgtgaacctgggaggtggagcttgcagtgagccgagattgcgccactgcactccagcctgggcgacaaagcaaggctccgtctcaaaacaaacacaaacaaacaaaaaacaatggtatactgatgaatatatgtttttttactttagggaagtggaaattatttgaagatttaacttcaaaaaaagatatactttyactcttggtttatgtaatttgatacaatatataggttatatatatacacacacacacatatataaacatatatatacatatacacacacaggcacacacacacacacacatatatatatagctgaccgttaagaattagggatactgaccccctgtatagttgaaaattcacggatgtttgacttccccaaaacttaactactaatagcttagtgttgactggaatctttattgataacagacaattaatacatattttgtatgttgtgtgtattatataccatattcttacaataaagctagagaaacatgaagaaaatcataaggaagagaaactatacttactattcattaagtggaaatggatcatcacaaacgtcttcatcctcgtttcgtgttgagtgggctgaggaagagtgaggaaaagaagagattgcttttgctgtctcaggggtagcagaggcagaagaaaatccacatataagtagaccaatgcagtttaaacccttgttcaaaggtcagctgtgtaatgtttagtaacacctttgtgaactaaaattcgaaagtcaatggttagaagagacaaatgactccaaatattggtgtggcatgattgattaaaagttattttgcaagatgtgttctggagagaattgccccagagctaaaataaattctaagctatcttcactctcaggactaaggcatgaaatgaaacactataaaatctgtatcaaaaaaatgttttgttcttaatatactacttaagtcttctagttaacgaaaatcacaattttaaagagtggaattgtcagtatgattctggtttataacttggtttttgttaatttgtttatttttataaaattcaattgttaggttcatagaaatattggactacaatttatttatagtgtgacagcctcaacattgttgcyattgaaggccaattgcttggatcctgtcttcatcctttcagagtacagaattttctgagacgccttctcccgacagtgactcagtgaactccgtggaaggacactctgagccatcctggtttaaagacataaagtttgatgacagtgacacagaacagatagctgaagaaggtgacgataatttggctagtgagtttaactttctaacattttagttttgatgggtcattgctgtgtatgtatgataaaatgattatcttgtttgttgaaataattcagctttataatttatggctccaactaaatggaaacatctgatagcagtctttgtcttagatacagtattttcttaaaccaacttgttaggttgacatttctagattttaccatagtctatagtttgtagcagcttaaaaataactgaactaataatatggcagcagacaactttctcatctcttcactataatatcagactttctctctgcagaacctccaatatatttcttcattttaaaaattgattttatatttaacttgttcaaattttattaagtctacacagaagtacatgaaaatactgtatccattttggtattgcacattgggcttgtatattaaaaaaacatttttctcctttcctccaataccctgataaaacccatttttactcccctcctctccctatatttctttccccttcccaacactaaaagattctgccagtcctagcaagcgcacatcagtcagcagtttccagtccacagtggacagtgactcagccgcttctatcagcctgaacgtggagctggacaacgtgaacttccatatcaagaagccctccaagtacccacatgtgccccctcaccctgctgaccaaaaaggtaggaggtagtcaccatctggaatccaaacacaggctggacagctgggccataggatctcatgccagcctgtccttctggcttcctctgtcccacgtggctgagggtatttggtgtgggttttgttctaccctttctyatttctcccacacctcctccccataccttttttggttgattccttttatttcttgttttctccctcagcaccaccatgcccagtgtaaagcttgtagtctttaaaaggaactacatctgactgctcttcccataatgtgcaacttccaaggtggcatttctttgcatttataacatggatgttctgctctattcttttctctttcttcatttaacattttaaagcctatttgcctttgccgttacccagtaacataatatttcactaaacccattaagatgcttgaactagattgggggaaaatcattcacacattccaaaatatctccataataattcataatgcttattatgtatattctatatttattaaaacaatttcttctctaatgtaaaatgaattcattatttttagctatcttatttgatgctttagtctactggctgaaaaataatagtgaccatattcaaaagatatttggtgtaaaaggagaaagaggtaaacattactaaaatctaacatagcagcacataagaaatgcctgtttttaaaatggatgatgaggtttactttattgggtataattaaaagccaatttaaattatagtcctatcatgggattgtgtaaaagtgaataaataaaaaatacatgagtaaataaataaatgtgggattttgttatgttgtaataactgaaaaatcattattataaagatgaagcactttattccatgattttacctggagtttgtattttaaacatataactgtctaaagtggaattgtctccttacttagatctgaaatgcttgcctaagttttgcgcactctatttcgagcctaagaatatgatcagaaaacagaagcttttgaaccaaacatttatactaaaatgatttgatacaagtttatatttctccaacaaatttctcatagttgtcagtattagctattatcaagatgtggtaaaatggtacttaagagttatagtaataaaaaggaatatgttatttaaaaataagtagagaaggtgtgttaatgagacttgactagcattgaacatgagtaagatagacatctttatggaaatcctcaaaacagaaattggaaaaatgatggagaatatttgggtgagtatgaaaggagggaaaagcagatatgacacttgtgtgagaattaactatagatggtggtcacttggaggatattatgaaggttttgaatataaacttacagatgtgggtcaggggcacacagatgatgaacatctgttctctggacacatctgttggcaatcacattttgctgtaagcagaatgtgaagtatacttttgacttggtgatgatttcatctcttggaatgttaaagaagttttgaaaatcttgaagaaagtgacctgtcatcatagaatttgtaatagggaaggatagactgctgagcacagtcagatacttacttttgaaaacctaacttgagaacattcggagtggaatggaacaggaggctccaaaaatgacattgttatggtgcaaccccagattgtatctccaaggaaattgacaggagaagcacctgcagttgacaaaaatatgaccccttttgaacctccctgatttcaatactttttttttttttttcttctaagagacagggtctgactctgttgcccaggctggagtgcagtggcgcgatcttggctcactgcaacctccgcctcctgggttcaagtgattctcccacctcagcctcctgagtagctgggattaccagtgcgcaccaccatgcctggctaattttttgtatttttagtaaaggtggggttttgccatgttggccaggctggtcttgaactcctggccccaagtgattcacctgccttagctttcctaagtgctgggattacaggcatargccactgtgcctggccctcaatcctttaaaaagattatctatcaaagttgtaagtggcaactttcgtaggagaatgaatctgaaagagggggcagcacttttaagaaaaatgacagtctaatggaagtccagcttgccctgaaggttggagaaaatgccaaggatatctgagaaagatttaaagtttggtagaaagaaaaactaggccagttatttgggaaagtttatataatattgattgatgactaaaagaaggcttctttttcctccccgctctttagactaactttatcaggaaagaatacacatggttaagaggaaagtgaagttcaggatattgaagagatagagaattaatggttttttaaataagtctgttgccaggtttaggcaaactgtatgccaggttgttgaaagactttggatctgggatcatggagccagagtttgttatctttgaagagtttcgaagagtaggagagagtctagatgactatagtgatagatacatttttttttttttttaaagatgggttcttgatttgactttggaagctggcaaaatgtagagaagtgtagtaagcagaatgtattgtggtatttagaaaagggattggtggtgactgggccaccagcattggttaagcaaactaagtcgttccaaaacaaccccatttccattttttatggtgatacaagattgataaatcagaagactataatagatactatctttgttgatgttaataagacatttaatgatctctcaataattttgtagacaaagaggacaatttcgtacttgaaatatgttaaaagaggcaaaggcaatggtcatacttgtttaaagcacaggctttggagtctgtatgagctttatttttaaaattgtaaattgacaaattataattgtatgtatttatgggatataaaaagatgttacaaagtatgtataaaatatggaatgattaaggaataaggatttgaaatgatagatatgtttattaaaccaaactaatgaacatattcatcatttcaaatcctttttgttggggcagggtgcagtggctcatgcctgtaatcccagcaagttgggtggctgaggcaggcggattgcttgagtctaggagttcaagaccagtttaggcaatgtggcaaaaccccgtctctacaaaaaatacaaaaaaattagccgggtgtggtggtgtgcgcctgtggtcccagctatttgggaggctgaggtgggaggattgcttgagcttggcaggttgaggctgcagtgagcgatgattttgccactgcagtccagcctcggtgacagagtgagactttatctaaaaaaaaaaaagaaaaaaaattccatattattcttagtggtgagaacctttgaaatttactcttagcaattttgaaatatacaatacactattattaactgtagtcatcatgctgtacagtatatctcaaaaacttattcctcctgtctgaatgaaactttttaccctttgactagcatctccccattcccttcactccctcaacctctggtaaccaccattctacttagtatgagcttttaatatgaaaaacacaaagagtgtagtgtatctggtgaatgtaagagcttatgataacactagtagttggtttttttttttttttgagacgaaattttgctcttattgtccaggctggagtgcaatggcctggtcttggctcactgcaacctccgccttccgggttaaagtgattctcctgtcttagcctcccaagtagctgggattacaggctcctgccaccatgccyggctaatttttgtatttttagtagagacagggtttcaccctgttggtcaggctggtctctaactcctgatctcaggcagtccgccaacctaggcctcccaaagtgctgggattacaggcgtgagccaccgcacccggcccactactagtattaacacgtggatttgtagcttgttgtacaaaatattgaaaggataattaataatttgatgtcaacaggaagtggatgctcctaggttatgttatagggacttgactctatatttagagttgttcacttttttttttggtcagcacttttaatgtttttttaggtccacaaataattaaaatctggaaagaatggctagcgtgttggatagcagaattgacatttaaagatctttattttctcaagcaatagattgagactaacaagatgaaagttaacacagttaaacataaaagaataaggcttaacatgttttactattagtactttggagaaagtcactcttaataatttgtgtgataaagatctaagttttagttatttgcaaacttaatagtgtgatgtgccaaccccgcactccctggcactccctagggcaataatagatttcattagtggccatataatgtctagaatgaggatccaatttactgttttgtgttcagttctcatttatgaatagaacgaggttgccaggatcctaagacatctgaaaaccatgctaaggaaagctggactatttaaaatggaaaaaagacgtggtgtttcctttaggtatctgaagagtacctgaaagaaattatatttattttgcatatggctgaaggaagaactagattcagtagttgggagtagtgaacttttgccactgtgcatggtaagtgtccaggttgtgtctgaatgtccacctgtcatggttattgaggacagatgcctgcattgggtgatgcgttatatagacttggggacttctaagttttcttttaattctaaatctgtgaactgaaaaatctagatctagaattaaaaagaaattataatcctttagcctactcagtgagaatattacagaggaggttccagcattaggaagaagataattattaaattgacctcttaggtcatttgcagtcttataatttgaagactttaaaagtctcttaataaatattactggctttcacagttctctcttagtttttaacatactaacgagttattctttttacattttttcttgtgaagttgaagcgtaatagtttgctgagtgttatagtcaagatgaacactgattatcagaaaataaagatttccagggagactggtagttacgtgaaaaaataatagaattcttttgcctctgkttttcattccctttgtataaatacaaatgggaatggtttttatctttacattgaaattaaaggtagtacttattaaatattttcttatggattgtcctatattgtttcaggctgaggaaaattggatttataaaattggttgaaatatctgtactttaaaaaatactacttatgctttctgtctgaagtgagaaaaccctattttcagaagctcgtaaaactggcttaatttttcattattggtcttggagaattgtacagttaaaatatattttattatgtattacaagcaggattctgaactattcttggaaagttagcaagtaaaacctagagaagaaggtgaaaatcacggcttccgtaaatctctagatgtagttttccgtgtataggaaaacatgggatagaggagcaagttaaacacaccatgagaaaacaatggattgtactccgaatgtgggacattgcacagaacatttgacctgggttcttttaaattcatgttatgaaaagaaaaaaagacaggagatctgttctagattaaaagagaatgaagagatacaggaaccaaatgccatgtgtgaacttgattgcatcgaggcttaagaagaaaaactgtggattaaaaacattttggagacagttggataaacttgagtatgggctaattctgtgctattaagacattgttaattttctcaaatatgtaaataattttgtggctatagagaagaatacctttatttttatgagagttgtgctgatgtcctagtggtaaagtgtcatgatgtgtgtaactttgaatgatcggggggaagaaacatacacatatatggcaaatccttaacaattgttgaactcaggtggatggtatacagcattttctgtaggtttgaatttttttcataactaaatggggaaaatccaccatttctggagtctcatatagatacaattaagctttagtgtgagaaggctggtaaagaacaatacattaattgaactaataggatttggtgttactcattcctgtgagggaagagtagaaataaagtgtaacatctatcttgcccacatactcgattttattgtatttggcatagtgcacttgaactttctaaataaaatattttctttgtttcctggttggaaggatgagcatattggcttataaacatagtaacttttaaagcccagttgtttataaatgtacttggagaaaattttgtggagatcctttaccgtaaaggagtttacatgcatcatgttttaatttgcatagtggaaagaacctcatttgagctatgcttggtcacagacctagagaaagttcacggggaagtaaagagtaagtttcacttgtaagaaaagtatttaatatattaaaagcattcagagtgtgttcagttaatgtctagcaaaaatttggcagtgtttgatataatttttgaaaaacaaaaacacttatttggaactaatacaaatactgatgagttttatctttattcctgccaatgtcacttctgtattaatttgttttatagcttatattctgaaatttgaaaaaagtttatattgttttatcaggtgggttctgtatgaactgctttgtgcataggcaaagtgattatttgttaaatcatcaagttacatgtgaaaagaactgtaatcttttaggatggtcgtacaagtatctgaagatttaattttcataaaccggttggttttggtaagagaaaaacatttctctatctgacatttgaattaaggagaattgttttcacggctctattgtgttattaatgcaagtctgcttaagtttagtatgaagtgcatagaacaagtataaagaggcattttgacccaaagctttcttgaatttgccgggcagtgatgkgtttagtatgagtaatattttgtgtgtgggcgtattctctatataattatgctgacatgttatagtcatatgtctctacttttgttcctcctctctgttgtctccctggtatgcagagtatttgatttctgacactggaggacaacagctctcaataagtgacgctttcatcaaaggtaattttataaaaagctgtatgtggaatggtgtctctttttttcatgaggatatacttagggcttagcacattgattagcacagagaaggtgctgaaaatatatttgattatggtggtatcatgggaacacagtttttaatatatataatgatttagagaatgttgagaaccaagaatgtaaacttggacttggtttgcgagaaggaggtctctgatgtgaaaagtaattgtttaaaaacttttaagtagaatttgaacttaattcttttaaagacatagtttacacttaactgtattgtgaatataatattaagtattgatataaatatcatcaaggattgtcaaatttgtcaaaaagcccacaggcagatctccagttaaggatgctgcttgccctgtggagtgaggaagagaagcaggcagtagaggttaaagaactaactctgatgataaatttcttttggacacaaaaggagaatagaaaagtattagccttctcctattccttccctacttagcttagcttagcttcctagagtaaagacattcttagtccatagtactccactggttaggcctcagataatgggagaaaatttctcttccttcttggctcccacggtttcagatcaaagagagaaggcaagcgggtacaaggagccactgcagcttatctgatagcttggcagtgcttctaaattcatctccaagcatctggttcggctagaagtttacagagtggccctttatgtaattgaaatgtgcaattcttgtacttcacatgtcatggacatatactttactgtgtaatctgctgggctgtttggtggaagtttttttgtttgtttgttttgcttttaagaggggacaggttagagaatttttgtaagcatttcccacttcttttctttccacttatttggtcagattattcaacagttatttagtgaacatatttttttgttaagcatttattatttattttttgtcttatctattttcattcatcctttaaaaaatttaaagattttacacaaattctacataaatgctatttattatgttttaatatttatgtttttgagtctgtcttgctaaaattttgttaaaaaacccctgtgccaatattgaaagagaaacactattgaggattgtctgaatagactttctacactgtcatctgttgttttgtgatatctgagctgagcttctttcttgaaaattcatcactctcgctatcatgtgttcttttgccagcattcagatttctgttgaatgcagttttcagtttgtgatttttttttttttttttttgagatggagtctcgctctgtcactcaggttggagtgcagtggtgcgatcttggctcactgcaatctctgcctcctaggttcaagtgattctcctgcctcagcctcccttgtagctgggattacaggtgtgtgccaacacgcccagctaatttttgtgtttttagcagagatggagtttcgccatgttggccaggctggtctcgaactcctgacctcaggtgatctgcccacctcggcctcccaaagtgttggaattacaggcgtgagctaccacgcgcggcccagtttgtgattttaaaggggaaattaacaccctcgtttttaaaaattaaaaggagaagcaaaagtttcattttatttgcttttcagaagctgtgcttataattattggcttgagagtcttagttacgtacatttgattttcacagttctgtttctgattttggctgttgccaattactgctcttcttaattcttgcatttctgtatttttagtgtattttatgtatttgtaagtattttcttatgcattttatttatatgtttattacatgttcttgcctttttacaccaataatttatgttggctaacttaaaacatttataaagacaaagggcaatttctaaatatatgagtagatggtataaaacaggacaatgaagtaataacttcttattttatattgtacttagaatccttatttaatcgccgagtagaggaaaaatccaaagagctgcctttcacacctttgggctggcatcataacaacctggagctcctgagggaggagaatggggagaaacaagccatggagaggttgctgtaaggcaatgaaatttttaattttaatttttcacttttattatcttcagtgacttgataagcatatgcatcattcctcttaaaaagggaggtctttttctttttccttagaaagtaaaaaaatactaaggttacttaggaaatacagtctattttgacttgtgattaaatttcttataaaaccaagagccccggctgggtgcagtggctcacgcctgtaatcccagcactttgggaggctgaggcgggaggatcacaagctcagaaggttgagaccagcctggccaacatggtaaaaccccgtctctactaataatacaaaaattagccaggcgtggtggcgctggcctgtaatcccaactactcagaggctgagacaggaggattgcttgaactcaagaggcggaggttgcagtgagctgagatcgcgccactgcactccaacctaggcaacagagcaagacttcgtctcagagaaaaaaaaaaacaaaagccccaaactgtgcttgtctgtccccattttacgtgttaaaatttcatttcagtcaattgcaggggacttcttagtggaagatattcagrtttcatttatatgcaaaatccttaaggtasagatataatgaaagaatgatattgacctagaaaatcttatctgtgagcygtaattgaaatgtttatttctttgtaggctgtttgttttatcatcagaattattgtctctggcagtattaactatgcaaacttctttcttataatatttttgtagttcagctaatcataaccacatgrtggcactactccagcagttgctccatagtgactcactgtcatcatcttggagggacatcatcgtgtcattggtctgccaggttgttcagacagtccgacctgatgtcaagaaccaggatgatgacatggatatccgtcagtttgtccacatcaaaaaagtgagctctgctaatgttttactaatgctaggaactgatgaggcaggactgattgtaatttttgtcttaatggtaatctgaaaagagtcattaccctgaggggtgctaggtgaggagtaggaggttttgctgtctgctttgtttgttagcagcgcacttaggagtcatggaagccacgcataggaagtgaaaggtcaatggaaaggatgagttatatcggagatgagttgggaacccaaacagagataggttcttcctttcttgcttcctcttcttgacaagtcagctatgagaaagcctgttctcacagattgtgatcactgtttggaggaaaagcagtgggtaatttgctttatttagatcaagcttgtcccactcgtggcctgtgggctgcatgcagcccaagactgctttgaatctggtccaacaccaattcataaacttcttaaaacatkatgacattttttgcgattttttttttttaacttttgtatgtctcgttctttttttttaattattattatactttaagttttagggtacatgtgcacaatgtgcaggttagttacatatgtatacatgtgccatgctggtgtgctgcacccattaactcgtcatttagcattaggtatatcacctaatgctatccctcacccctccccccaccccacaacagtccccagagtgtgatgttccccttcctgtgtccatgtgttctcattgttcaattcccatctatgagtgagaacatgcggtgtttggttttttgtccttgcgatagtttactgagaatgatgatttccaatttcatccacgtccctacaaaggacatgaactcacccttttttatggttgcatagcattccatggtgtgtatgtgtcacattttcttaatccagtctatcattattggacatttgggttggttccaagtctttgctattgtgaatagtgccgcaataaacataatgtgtgcatgtgtctttatagcagcatgatttatagtcctttgggtatatacccagtaatgggatggctgggtcaaatggtatttctagttctagatccctgaggaatcaccacactgacttccacaatggttgaactagtttacagtcccaccaacagtgtmaaagtgttcctatttctccacatcctctccagcacctgttgtttcctgactttttaatgattgccattctaactggtgtgagatggtatctcattgtggttttgatttgcatttctctgatgaaaaaaccactttaaagttcgtatggaaccaaaaaagagcccgcatcgccaagtcaatcctaagccaaaagaacaaagctggaggcatcacgctacctgacttcaaactatactacaaggctacagtaaccaaaacagcgtggtactggtaccaaaatagagatatagatcaatggaacagaacagaaccctcagaaataacactgcatatctacaactatccgatctttgacaaacctgagaaaaacaagcaatggggaaaggattccctatttaataaatggtgctgggaaaactgcctaaccatatgtagaaagctgaaactggattccttccttacatcttatacaaaaattaattcaagatggattaaagacttaaacgttagacctaaaaccataaaaaccctagaagaaaacctaggcattaccattcaggacataggcatgggcaagracttcatgtctaaaacaccaaaagcaayggcaacaaaagccaaaattgacaaatggtatctaattaaactaaagagcttctgcacagcaaaagaaactaccatcagagtgaacaggcaacctacaaaatgggagaaaattttcgcaacctactcatctgacagagggctaatatscacaatctacaatgaactcaaacaaatttacaagaaaaaaacaaccccatcaaaaagtgggcaaaggatatgaacagacacttctcaaaagaagacatttatgcagccaaaagacacatgaaaaaatgctcatcatcactggccatcagagaaatgcaaatcaaaaccacaatgcgatttttttttttaagctcatcagctgttattagtggattttatgtgtggcccaatacaattcttcttccagtgaggcccagggaagtcgaaagattggacacccctgatttagatagtaatggagtcctgtgtgtgctttttccctatgatatttaacttaaacaatagtgttaactgccacatggcactagtttattcagtcagtgagtactttagagtcctagggtagtacattagagaacaggggatgggaaaacagagtcatgcagagatgccattgatcgttggttgaaaggaagtattatttcctgaaattttttgttcttrtttgattacataatagtttaaaaaaaatggaaagaaataatagcgtacatctaactagattctaagcrtgttatcattgaattttattgttttcttaattgttccattagatcccaggtggaaagaagtttgattctgtggttgtcaatggctttgtttgtaccaagaacattgcacataaaaaggtaatgtgattcagttcagcagtgaagttcagcaaaccatggctgtgtgcttaggtaacaagttggggcaccttagttatggaagaaatggacaatggacaatgaaaggcagctgtgtctgccataggggtgaaatttggttggttcagggaagatttcccagagctgaggatgaatggattggaatttgaataatgggaattcaccagacagaaggaggaaggggagaggatcaggcttctagattaacagaatgataagatactggcattatttatctcctgatcctgttacgtcttagggagacagggtttctctagtaggctggagtccttccagaggcttagcattctaaaactgatagctcttctagtgctcggctacagaactgtcagtcytcttctgttatccttctcaccttatatctttgtagcactagcacaaaggagtggagtgagataacctggggtattaaggagactctgagttcctaaggtgtaatatgggcaatgtagatgaagctggaggaagcaggcaagggctttgtatgtcattaaaggtcttgaactttattctgaaatcttttgattctcagtgtagtgtacatacattgagatcacatgtggaccttttaaaaatgtctcttcttaacctaacccctagaaattctcattcagtaggttaagggcaatgggagtgtatggatgttagggaaatggtggtactgtatttaaagtaggcactaggctgagtgtgtaataccagcactttgggaggccgaggctggcagatcacgatgtcaggattttgagaccagcctggccatatggtgaaaccacatctctactaaaaatacaaaagttagccggcgtggtggcgtgtgcctgtagtctcagctactcgggaggctgaggcagaagaatctcttgaaccttggaggcgaaggttgcagtgagctgagatcacgccactgcactgcagcctgggcaacagagcgagactccgtctcaaaaaaaaaaaaaaaaaaaaagtaggcacttcaggtgtttccagtgtcatttgttggtccttgcattttgagataccatttatctatagtagtgttctcaaaccttgctgtgcttcagaatcaccagcggaaacattcaaaacagagataccctggccccacttctggggatactgattttgttacagcaagagctgaggcagatttctagcctgagcaaccagatggatgaactctagtcttgttttcactttttttctaagttgagcttaatatagttttttctaaggcattaagattcctgaaaattattagtgaccatagataaataaaaatatacttggcttgagttttgtacttatcgcgtattttattgcaataattcgacatcagtcaatatttctacacagagtcttactaaaaccacacattaccctttaaaggagaactttaaaccaaattaaatgatatttgttgaattaagaggtaaatatgttgtgccttctcagaaagtgaggaaaatttgtatgtgggtgtggtggaaacatatgcatgaatgactgtcttgccccactgattagagatagtccttgatttgtagttgctaaaaagagtcctgaattgagtttcccagctggtgagtcactgttttcggaactgtttgccagtttggggtccataaacttggtcagcctgaaacctcaattgctattctgcctgtggctttaagcacacgrttagggtatattatttgggtctctgcttcttgagatgctttcagattttctttttgaacttcatgtttcctatttcagcttgccaccttaatgattgtttggaaatttattctattagcaatatgttcaggaggcattttaattcttttctccctcttctcctcttcaattttagacagactaaaatatgcttttaaagttgcttatttcttggagtttgtgaagtaacctgtcattaaatactgctccctccgtgcacactsagggcatgatgtctcttcttacaacatcagaaataaaaaaaaaagttaaagagtatagaagatcaragtagtattaagaaagaaaagccattttttgaagaattttgcattgttctgaacatattatttgctttgaaaaaatttaataccgtaaaagaactaaatgagartatattaatactaatatgagatacattaagttagtaggaattatgaacaatatagatttaaagttataattaaaggagggctgtaaaatgcaaacctttaaacactttaacaaactgttcattttttgtagatgaattcttgtattaaaaacccyaaaattcttctgttgaagtgttccattgagtatctctacagagaagaaactaagtttacttgcattgatcctattgtgcttcaggtaagaatttactactgaaaataataatttagagggatgtttgtgtaccatgatgcttataaactcttaatgattttgacttaattctagctaattaaattggataggcaaacttgatagcttaccaaaacctctgtcactcattatttttaaagtttcatagtattaaaggtaacatgtgactgttcaaggatataaggaagaaaaagtgaaaatccaaatactaatttccctttcccacttaatccactgatttactgtgggaatttctygaacttaccagatttctaatggaatctctggtttgtaatacagtctatgctactaaaacatatttctagaacatcaattagcttatatgtagttggcaaacagaataatgtcagatgaaagttgtgttggtttctcagtggtttttcctaagcaaggaggcccagaatagctgcattaggttataaccctcarctggaaaggaaaacagtctcagctcagctgctacacaggcagaaacccttccagctctattttaagaaagtaaaagtgagcttttgcttgcagggctctctccccagggaggcacacccgcatctytgtgtggttcttggtagctttgctgctcagagctccatttctagttgtagcgttgcaatagtttttgtgcatttaattttacttgaggcagcctcatgccatatgaagctctctgcctgggctctccatgattcctcttaaggtaccaattattatttttattagtgctgaaggtataaagttgcataggttttaagttttctgctccaactccttttctcccataaatactgttaattttactttgtggtcattcaaagtggaagcttttagggaatgtgtatattatattatagtggaaacacttatgctgggttccagaaacatttaggaaaagcattacttgaaaattcctaggtaaatacatttttttcaagagtggtaggagcaatcacttttgtactgatttcctagataacaataagagaaaatgagttgtagtaaaagggacagtgctttataaaactctgctgttattacttaagaactctgtgacctggggctgttttctctttggaattcagctgtgctatcagtaaaaatgatgggttttgactagacattttagtagagaactctaaagaaataaagggaaatacttcttttttctttttcttttcttttsttttctttttttttttttttttgagacgaagtctcgctcttgtcccccaggctggagcgcaatggtgcaatcttggctcactgaaacccccgcctcccaggttcaagctattctcctgcctcagcctctcgagtagctgggattacaggtgcctgccaccatgcctggctaatttttgtatttttttagtagagacggggtttcatcatgttggccaggctggtcttgagctccagatgtcaggtgatccgcccgaggcgtcccaaaatgctgggattacaggcgtgagccacaatattcatttcttttgaaattaagcctttgtgataaaattctattagcattatgtttgagatctttaactgtagctgttctaggtattatatgatctgttgggaaattggaattaggaagtagctgaaatagcatctgttagagttatttattcagagatccagaaaaagggataactcatgttggtttcagaatgtagaggagagaattcataaccatactaaaacaacttagggatgggcatagtggctgacacttgtgattacacttttggagctgaaggcaggaggattgcttgaggccaggagttcaagaccagcctgggtaacatagtgagactctgttyctacaaaaaatagaaaaaattaggcaggcatggtgatgtgtgcctgtagtcctagaagggtgaagcaggaggattgcttgagcccaggactttgaggtcacagtgagctatgacggcacctctgcactccagcctgggtaacagaatgagaccctgtctcttaaaaaaaaaaaaaaaaaaaaaaaacttagaaattgcttttattttgggagttgtgaggttaggtttttttgttgttcttgtttttttttaacctctgaactagctaattggattcttggcttttaaattaagaattgaaaatctttcaaggaaagttagttggagaatggaatttctcctgaaactcttgtcagcataatcaagtttagaatgatgaatgagattcttactgtgtttgcattaatttgcttacagacttatttgtggatgaagaaaatttagtctaagattgataatagtcaagctatcttgatatatatatatatatatttttttattacactttaagttctmgggtacatgtgcacaatgtgcaggtttgttacatatgtatacatatgccatgttcgtgtgttgcacccattaacttgtcatttacattaggtatatctcctaatgctatccctcccccctcccccaccccatgacaggcccccgtgtatgatgttccccttcctgtgtccaagtgttctcaatgttgaattcccacctatgagtgagaacatgcggtgtttggttttttgtccttgtgatagtttgctgagaatgatggtttccagcttcatccatgtccctacaaaggacatgaactcatccttttttatggctgcagagtattccatggtgtgtatgtgccacattttcttttttatttttattttattttttattttattattattaktagtagtatactttaagttttagggtacatgtgcacaatgtgcaggttagttacatatgtatacatgtgccatgctggtgtgctgtacccattaactcgtcatttagcattaggtatatctcctaatgctattcctcccccctccccccaccccacaacagtccccagagtgtgatgttccccttcctgtgtccatgtgttctcattgttcaattcccatctatgagtgagaacatgtggtgtttggttttttgtccttgcgatagtttactgagaatgatgatttccaatttcatccacgtccctacaaaggacatgaactcatccttttctctggctgcagagtattccatggtgtgtatgtgccacattttcttaatccagtctatcattgttggacatttgggttggttccaagtctttgctattgtgaatagtgccgcaataaacatacttgtgcatgtgtctttatagcagcatgatttataatcctttgggtatatacccagtaatgggatggctgggtcaaatggtatttctagttctagatccctgaggaatcaccacactgtcttccacaatgttgaactagtttacagtcccaccaacagtgtaaaagtgttcctatttctccacatcctctccagcacatgttgtttcctgactttttaatgattgccattctatctggtgtgagatggtatctcattgtggttttgatttgcatttctctgatggccagtgatgatgagcattttttcatgtgtctgttgggtgcataaatgtcttcttttgagaagtgtctgttcatgtgcttcgcccactttttgatggggttgtttgtttttttcttgtaaatttgtttgagttttttgtagattctggatattagccctttgtcagatgagtagattgcaaaaattttctcccattctgtaggttgcctgttcactctgatgatattttaatatgtccagatactgcattttaccaggtgtaatatttctgatttatcttacttaggaaagggaattcttgaagaattatgtccagcgaatagttgatgttcgacccaccttggttcttgttgagaaaacagtgtctcggattgcccaggacatgttattggaacatggcattactttggtcattaatgtaaagtcagtgagtgtttttaattttctattgtattttaaaaaaatcacagcttttaaatttatatgcacgtatggtaggtatacaagaatctttttttctttgctrttctatttgtattgaaagtgggacagaagatatggcacctatttcattaagattcagaatttcagactggaactggaagaaagtataattgattatgtaatacttattggtgtctacaagaccaaaagtgaaatggacattagttaatcactaggtatttgttgatccttcrtttttgttggagaattgctcaagcagaaracgttctctcccttgaaaagtttaccctgtgcagaacaggggccaattctaggaagttgtttttctccccacattatcttgtggtaatccatgatgcttaagtgcatttttataatgttattaatatgagtaaggyttcagtgggcatatattgattactaagcaactaagtgtagaagaatccagaataaaaaaattcatcatatatttattaaaaaggaaatttgtgaatgttattttttaatttttccattacttttccagattaaatttacaaagatttttattcttctctagttttgtaatacaatgtttttctgttttgtagcaagttttggaacgaatcagtcgaatgacccaaggtgatttagtgatgtcaatggaccagctgcttacgaaaccacacctgggcacttgtcacaaattttatatgcagatatttcagttgcctaatggtgagtgatctttagcatagattgacctgaggaaaagagttaacttatcactactacaatgtttacttactaggaaatacctattaatagtgggtaagtgaggataggcaactgtgatcttattcatgtaagagtttttcttttacagatrttaagagagtgaattaattctatttgtacttctggattgccacctccaccatcttaactttctgtttgtttttgtttgtagaacaaaccaagacactgatgttttttgaaggttgtccacagcacctaggctgtacaatcaagctaagaggaggctctgattatgagctggctcgagttaaggagatcctaatatttatgatctgtgttgcttatcattctcaactagaaatatcctttctcatggatgaatttgctatgcctcccacattaatgcaaaacccttcattccattccctgattgagggacgagggcatgagggggctgtccaagagcagtacggtggaggttccatcccctgggatcctgacatccctcctgagtctctgccctgtgatgatagcagtttgctggaatygaggattgtgtttgagaagggtgagcaggaaaataaaaatcttccgcaggctgttgcctctgtgaagcatcaagaacatagcacaacagcttgcccggcgggtctcccttgtgctttctttgcacctgtaccggaatcattgttgccactccctgtggatgaccaacaagatgctttaggcagcgagcwgccagagastttgcagcaaacagttgtgctgcaggatcccaaaagccagataagagcctttagagaccctctacaggatgacactggattatatgttactgaggaagtcacckcctctgaagataaacgraagacttattctttggcctttaagcaggaattaaaagatgtgatcctctgtatctccccagtaatcacattccgagaaccctttcttttaactgaaaaggggatgagatgctctacccgagattattttgcagagcaggtttactggtctcctctcctcaataaagaattcaaagaaatggagaacaggaggaagaaacagctgctcagggatctctctggacttcagggcatgaatggaagtattcaggccaagtctattcaagtcttaccctcacatgagctagtgagcactagaattgctgagcatctgggcgatagccagagcttgggtagaatgctggccgattatcgagccagaggaggaagaattcagcccaaaaattcagacccttttgctcattcaaaggatgcatcaagtacttcaagtggcmaatcaggaagcaaaaaygagggtgatgaagagagagggcttattctgagtgatgctgtgtggtcaacaaaggtgagccagaccactttctgatgctcctgtgcatttaggatgtgttgaatgactcctcaaaggcaggctaaaaaaatcagtttggcagactgcatgcagatttgtgaaatatttcttctcctatgctatttttgkttttgtcttgagtctgctggcttatgtgttactttaatatgtatgaagcagaattgtaatgaaactgggtttcagggttttaaggtgagcttataataagctaggaagatccctgaagtaaggggaaatgtggagctgcttaaaatttctgacaacatgacttggatgtggtatgataatcctggatccttgtgtcagggagtgagagatggaagcttattgtaggaaatagatgtgtttttttaaaaaagttagcagcaaatatatttgttttctcaaaaaaagttagctctttttttaacataaaacattttaccttgttatttaactatgacagtgatctttttctttttaggcataaattgagagcaaattaaggaaggtttatagatccattattgataatggtagcaataaaactaattaacaaatccattgctagatgaggaaatgcaattgtttaataaaacgaaaagatgtccaatttcgccagtagtcaaggaagtgctaaataatgtatgttcaatttcactagtagtcaaggaagtgctaaataatagtggtgctaaataattttttatttgtcagattgacaaaaaggaaagtcgtaaaagacccatggttaatgatggcatggaaaaacacctttcataaattttatgtaagtttatacaaatgtaggtatatgtacatttgtataaatttatagaaagtgataggaaagtctccattaatttacacatacatgtatatacctttgacccaggactccaactttttataatctatcctgcagaaataattaagtatgcttatataagggtgcttgcattttttaagaatatatgtacaaagatgtttattgaaacagtttaaggatgagcaggatctcaagtcatttaatgacttggataaagcccatgatatatttgaagtgttaaaaagcaaattatgttttaatatgtgttgcattattccatatttataaaaacaaaaccccctgtttgtacttaggaagtgatgtgtgtatgtgggacaggtatgtaaactagcaaaaagaatagatattttaaaaccacagagtcaaactcckcagcttaggaggtggagtagaatcaggaggagcagttttgtgtattttatgaacttcttcatatgcttctatactatttcaattttaacagagagctggttttacctttgtaatgatcaaaaacagccataagcatagataaataaacactttagaatttagatttctgggtgtctcagattgatgttatatcccatcagttcagactgttaaatatgggtatatttaattaatttttttccaaaataatttagtgcagttgtgtaaaataaagagtaagttaagaaaacaagctatctagacattgttttgtatttttaagtttaattgaaactttttgggttgtcttttctcaaaaaccaactgcccttccttatatttagttttctgtagttttaaatcttgaccagagcccccacagtgataattggaggctttacaaatagagtggagtgtgtttggtgcattggggttgaatgcggttgcagtcacttgctcatccattcattccttctatttcaggtggactgtctgaatcccattaatcaccagagactttgtgtgctcttcagcagctcttctgcccagtccagcaatgctcctagtgcctgtgtcagtccttggtaggattcttttccccctacactattccacataagaacagaattccagcaattaaaaaaaaacaaaaacaaaaaaacagtcattaggacctgtatttaggtacacagcacactgctggtcatatatgaattgatagaacttttaaacttgtgaagtaaatatgaaaatacatgtttgttmatgagtagaagtaaatgagagtatattaagagtgaaaaaagtgtgagggatagaagaggaatttgtattggttgactttcccttatctgaaatgcttgggaccagaagtgttttggatttaatattttttcaaatttggaaatacttgcatatacttaatgagttatcttggggatgggacccaagtctaaacatgaaattcatttgtgtttcatatacaccttgtacacgtagcctgaagttaattttatataagatttgtaataattttatgtataaaacaaagtttgtatacattgaaccaccagaaagcaaaggtttcagttgtggaatttccctcttgtggtaccatatcaggactcaaaagtttcagattttggagcattttggattttggattttcagattagggatgcccaacctgtacttaaaaatgtgagaaagttgacacacaaaaagcttgtttataagcattttgatgatagcatgtacaatttaggcaggttttccttcaggcataatttttataaaagcagtcaaccttttgctttattaatgggttttagtctaaaacttaagtagattgatagaaactgaaatacattttatgttttaaattatttttttcaaattattgtcacaaaaacctcacacagacatacatagccttacattacatgttcacctttagttttaaaagtactatggaacataacttcttgtttgggggcactgtctccatgccagaacatattctgtgttttaattttggataactgaaacacttatttccagcagtgagctcatgggttcttctagtagtatagcttcagcaggaagacttgggagtggcagaacccatgggaattttctctgggagtttatatataggtcaaggcttgaataagatgtggatttcaacagttatatagccaaactgtcttgtgagcatttataggttagataaaaagttagaaactggcactttagcaagaactgctgttttccatgctcagtaaaggcatggacaagagagtaggagaccagagtcccaccttgtgctgacagggcttaagcctttgtaaaggaaacctttacctcttcttaactcagatcagttttactaaattaatattatagtttatgcatcctcattagtttcataagacactagtggattgggagtgaaaaagatgctttagtgtggcaagtctaaacttgttttattaaaacctgtttcataacaacaaagaacattacctcctttcatacttcattgtaagtaccatacatttaataggtaatcataatttgtggtctcatgaaatgtctctggggcatggtaattcttatgtttctaagaggtggtctcttctttaggattgtaacaatggaattttatggaaagaatgatcttacattaggaatatttttagagagatactgtttcaggtaagaacatatttcttccttstgttccattacacatttttgatgctcaaaatttcaasctaaaacgtaaacatgagtcggatgttaagtgactgttacatgatcctcactttcatagtgcatatcagagtatatcattcaaagaagtaataatctatttcatatttaaactgagatctcttatccagaacatccctcatatctctgcccatctaattaccctaccatcaacatttttcggatacctgtttttttacagtgattcaaatgagaggtaaaatgttggaatcatctagacctcagtttaagtcttagcatcatcactcgccacttatatgacaragcactttactagtcccctttatagggaataacaatccctagaattatcagaaggtaaaaggaaatgttttaaaattgtttggcaaatagaaggtgcttaacaaatggaaactatcaccrtgctgtagctgaagacgatgttcagctgcaggcccagagcagcatgagtaccttgtgcagattgttcactagtcatgctgcactttgacagtggttctgatttctgtttcatgcttaatgtgagaagggctcttttgtttgtcaaaggccttcttatcagtgtccaagcatgttctgtgatacccccatggtacatcatattcggcgctttgttcatggccaaggctgtgtgcagataatcctgaaggagttggattctccagtacctggatatcagcatacaattcttacatattcctggtgtagaatctgcaaacaggtaaatagaccctattmctatattttgtttgccatttatttctttatttgtatgttttttttttttcctgaggagaaggtttcctatatggtactggattcgttatttgttatagagctctatttgtcattgttattttaccttccagtgctgtatgttcaatctagtattcgttttttgaagatcccatcttaggaatgtatcagtcattaaataaaatacaagtgccytatacagtaaagtatcttgaggttgtatcatgacatatctcaattttgtttattcattcaacaaacatttagcaccatttatgtgccagatactgtgctaggccctaggaatgaaaaaaagaataaggaatgacttctgttctctaggggaggagacggacttgtaaagcaataactgcagtatattaggatatttgtataataaattcgagcctatgtgagcatttctattcacatacagatgagaccatgttgaaattgatctctattggtttttatgcatgttcttgagaaaaggacatgtgttttgtttcttctttgtgcctttctttacttttctaactctggggcaaaaatttggtgccaatattgtgtttttttaaaatatatgatttttatccagactgcttgcaatctggataaaatattccaaatttaacttattaccttaattaggttctttctttcttttttgagacagagtcttgctctgtcgcccggtctggagtgcagtcgtgtgatctctgctcactgcaacctctgtctcctgagttcaagctgttctctgcctcagcctctggagtagctgggactacaggcatgcgccactatgcccagctaatttttgtatttttaatagagacaaggtttcactacgttagccaggctggtctcaaactcctgacctcgggtgatcgcccaccttggcctcccaaagtgttgggattacaggcctgagccacagcgcctggccttaattgggttatttcaaagtgtgcttttggaaggcacatatgggaattatatataaaataatagcacgacctacattaatcagtggtagagaagggcaaaatcaaagttgcacctgcagcagcaaacatacagacataaaattatttctagcaattctcagtcttagtttcataattgttcttaccgactttagttcctattagttagctggtaatagtttgttgtagaatatgttaactgggtagactgaccatggtactaaatgaataacttaaatttgatctttatgacttacatgctttgctatatgcactttattttgaaacaaaaacttctgcttttttatgctagaaaggaaaaggtaagttttgttacactaaaatgaaaaacttccagtgtcaaggaaaaatacaacatatatgactaaacataaatatatataatatcaaatttctatgagccatgataatagaaaaatgggcagaggacatgacaatgcaatttaatgcaaatggctactaaacaaataaataaatgttattcattagtagtcagataagcataaatcagtaaaatctctttaaaattttttctttaggaggttacatttcaaaaatttcaattctgattcctaggattgggtaagaaagtgggggaaattgatattcttaaatattgttggagactgtatacactggtgcacttgttttggaagataatgtggcaaaaattatcaaagatcatataaatgtttatgccctttgacttaccaattcccacctttattaatttatcccacgggaataattgtggatatttgtaaatatgtatatacaaggatgttcatcagaacatcatctcagtatggaaaaacttgtaatgtcttaaaggcacatcagtaaggattggttcaatacatgtccagatactctgaagccatttgaaaagttgtgcaagaatattttatgtgggaaaatattcacgatatattgctaagtaaaagattatgaaactataggagtttttatttacaaatatactggctgtgtgtgtgtccatgtatgtatgtatatatgtatatgtgtgtgtgtgtatatatatatataaatacatcaaaaataaacatatactagtatattgatgttgttggtggatttattggtaatgctgctctcctccaccacccccaagtccacccacctttgaactttctcattcttttcccagttttctgcagtcagtatatattacgtttgtattagaaaagaaaatgttggccgggtgtggtggctcacacctgtaatcccagcactttgggaggctgaggcaggtggatcacgaggtcagaagatcgagaccaccctggctaacatcgtgaaaccctgtctctactaaaaatacaaaaaattagccgggcgtggtggcgcgtgcctgtagtcccagctactcaggaggctgaggcaggagaatggcctgaacctgagaggcggagcttgcagtgagctgagatcgagccactgcactccagcctgggtgacagagygagactccatctcaaaaaaaaaaaagaaaatgttattttttgaaaaagagattctcaatatgtgattaggtaaactatttttgctgaattccaggtaacaccagttgttgctctttccaatgagtcctggtctatgtcatttgcaaaataccttgaacttaggttttatgggcaccagtatactcgcagagccaacgctgagccctgtggtcactccatccatcatgattatcaccagtatttctcctataaccagatggtggcgtctttcaggtaagaaatcctaggaatcttgtgcatgatctcagatctcataatcccttaagaatttttttaacattttcaccattactagattgaattaatttgtgggattccccatttatacccttataaatgcagaggaccagactgtattaagaactttcagtattattttatttactctttaccctacaaaatagttcttattatcctcacttacagagcttacgatcattcacttacagagctctcaagtggtggagtaatgatttgaaccttggtcgatctactaccagcctcactctttttttaaaaaaagttttaatatagaaattttagaaaaatatgagacaggatctcactgttacccaggctggtcttgaagtgtgctcaagtgattctcctgcctcggcctttcaaagtgtggggattagaagtgtgagccatcatgtcgggccctggcctaactcttaaccattgttttggcatctgatggcatctgaaagtctgtcagaatttttgccaagatattaaccatcagaaggataatcacatatttctgatagagctaaaagtctgtgttcaaagaattgatagttgccattgtggtattaaataatttgagacagccttcaggttctgccttcaaaatatatcaagagtctgagcactttttaccaactctaccactaccactttgggctgagcctctgttatctttcacctggattattgtagtagccttagcagtctccctttggccttgtccctttagcctcttctcaacacagcagtcagagtggttctgttaaggggcaatcagctaaggccactcctctgctctagacactccaaagggtgtctgtttcacctggagtgaaagccaaagtccatttactggcctttaatctacctgcactggctgcccaggacctctctgctcttacctcctactgctctctcttcactcatcctgctgctgccccactggcctcctgactgggcctcaggtatgtcaggtaggttgctgcctgggagccttgtacttgttcttccctctctgaattgctcattccccagatatctgcttgttgcttccttgtgtcttacaagtctttgctcacatttcacctgccctgacactcccccatcctagcactctgcttctcttgctatatttttctccatagtactgaacatctgatatgtatttgttttgtttgttacctgaatcttgtttttcctaaattatgagaacaggaattgttagtgttatatcctcagcacctaaaacagtgtctggcacataatagaccctcaggggatatttgctaattagagcttatttccttttttaagcaagagtttttaaccgtgcatgtagggccttgcgggggagttgggttgtagcatttattagtcgatataaaccctcaggtggaaaggaaaccaaagactcatgaagaatcttcaggaggtggaaagtaatgaatacctacaattaggtgtaggtattttagtttccttattaatagggatggtttataacaatcgtttttggttttacagcaggtaaggataacttcaagggataaatgatggtactacagcataatgaaagataaaacaaaatccctccagaattggggaggatatttattgtaacagctaaaaattatttttgtgattgttttaaaatacgattttatagaaacttttcctcttatgcctcatagratatagttgaacatcatsatacagctctattcaagatattaagctatttttcattttctattggtccttgtattttcttctcagttattctcccattcggcttcttgaagtatgtgttccactccccaaaatattcattaagcgtcaggccccattraaagtgtcccttcttcaggatctgaaggacttctttcaaaagtaagttcagtttcttttatcatctttttttgtttatttacagctattttaaagtatcagatttattcattttattttctttgaaaatgtaaattttctaattgtatgctatgcatgcttggtgtacaaaaagaaaattgtagacgctatggaaagataataaaaaagaagccaaactcttttagacataacaacttaaaattttgaagtacatccttttaggtcttatttactctgcaaaactgtatgtmattcttaattaggtaaaacataatttcaattacattttgcatgtagcttttttttctatttatgtgagatagaaaatttgattcaccctttctaaagtgtttaatgctctcgctattgttagagtttcacaggtatatgttgccattgatgaaagacttgcatctttgaaaactgatacatttagtaaaacaagagaggaaaaaatggaagatatttttgcacagaaagaggtaatttatttctttggtagaaaattcaaaagttaattattgattaaaaattattgattaaaaatcaaaaattaataatagcagtttcttttggggtatgtctgtatrgtgtctgtctcctgaagttgtttctgttccttgtagatggaagaaggtgagttcaagaactggattgagaagatgcaagcaaggctcatgtcttcctctgtagatacccctcagcaactgcagtcggtctttgagtcactcattgccaagaaacaaagtctctgtgaagtgctgcaagcttggaataacaggtgtgattttgcagtctggttttctttaatattattgccacatttgttctaatgtgatatcttaaaacttaaaaatttttaattatggatgtttcattttgtgctcaagttaaagagccttttgtttcccgtcactctcctttcctctttatattttaaaatatatgtggtatattttaggtagcttgtgaagatgtaaaaaccaaagaggagaacagcctttgatgctgtttctaatataatttgaaacaatgttgttcagatgtgtgtgctgttgaattgtttttaactgaattagtatgccataagtcactattggtttttggccagcaatttcaaatatattgtatattgatatgtttatcttatgcctttatttaaacatttattttttagaagtatttttctttataataatttgctattttttttttacaactatagtgagatcaacaaatgctcctggttaattagatatgacaaaaacttactcttatttatatataactttaaagactatggtaatccaaataggaaaactttgtgatttcaaagttgtaaagagaaaatttataaacagcactcaaggggctagaaacaaaccatatatatatatattttttgcttttggccacaggttgcaggaccttttccaacaggaaaagggtagaaagagaccttcagttcctccaagtcctggaagactgagacaaggggaagaaagcaaggtatgaaatgtagtcttgtctttggtccttaatcaatagaaatatagttagtttcatttataatacttagcagggatagtttaataygtactttagtaatgatatccagtagggttttccattttgaatttgtgaggtttcaaggaactatgacctggattacttttatgttataacctgaaataaaatgatcacttataatttatttatttgaaatgtttataaaagctacagtttgctgcatcactgagggtagcatcatggtgacagcaagtgctacagaggaaagtcagtggatgctctgagtataatagggtgctcatttattttatactccgcagttttggttgtttttaaaatctccgtgcttaaataagaggtttttcttaaggtatttgaactgcgtaagttctttttcaactgtgttagttttctcttgctcagtgacagattatcccaaacatagtggccaaaaccacaaatttatagatagatatatctatatagatatttatagacagatacatctatatagatatatatagatataatacttaggattatcccttacacctaataatcttgtatagatctatatctrtctatagatctatctagatatatatcaatctatctagatatatctatctgtctatcgatctatctatctagatagatagatatatctatacctagatgcttaattccaggaagcgagctactatttagaatgcaattctcaaagtgtggttcaaggactcctgatagtccaagaccttttcagggactctgcaaaaatttttttttttgagagatggagtctcactctgtcgtgcatgctggagtgcagtggtgcgatcgcggctcactgcaacctctgccttccgagttcaagcaattctccttcctcagcctctcgagtagctgggattacaggcgtgtgccaccacacccaggtaattttttgtatttttagtagagatggggtttctccatgttggccagactgatcttaaactcctgacctcaggtgatccacccaccttggcctcccgaagttttgggattacaggcgtaagccaccacacctggctcatttttattttttttttcgattgcatatctgtatgaagctagattttcttcatatacttcaatcataatggtgtatctcaacagattacatgcagaagccaaatatgaatctagctattttctatttagctagacattaaagatatttttcaaaatgtaaagcagtgctactctttcaccaattttttttttaaattttagaaaatcggtatgttacgtgtttaaatgttacttatattaatgggtttattatttataaatgagttcatgcacatttaataactttctctgttttaatttctaataaggtaaaaatttctaaggtaaacaaaagctaattaaaaatattaagggggtttttagtaattttttaagggtataaatgggtcctgagaccaaaaagtttaagattcactggattaaaaaattttttgaatgtgattttcatgttttccataagaacaaagtatttacttctctacagataagtgcgatggatgcatctccacggaatatttctccaggacttcagaatggagaaaaaggttggttcttgagtctggtgatcacttgccgtaggatttaaagaaatttcttattgtataagttgttttaaactgtttgagcagtttttccgatgctgttgttcatagacttcttttccttcctgtagagcacttgtaatcctatcagattaagattatcatatagtgtattgcaataagataaatcaggttatagaaatacatgaaatataaagaaggctgctattaggggaagaaaaaacagaaaaaagtaaattgaattttttttgcttattacaaagtcaatccccaggtttcattgcaaaaatcttataaagtttaatttacatttttaatgtcactaaaatattgtctagacttaagatgtctttcacagtatttcattgaataacttggtgtcatcatagaaactttgtggggaaatttacatagactgtagaaccaggagctcaacttacaattcttggcatttttctattataattgctttttctctcccagaataagcatgccgtctttctcagagtgtcctaatttcattctctattaaactaaaaactaatatttaggtaggcattgtggtataatggatagcgtgttggataggagtcagtcttggttgacagttgcggtactgctaccaggatttgattgtagtcaagtcatayataatctttctggatttttgtgtccatttctatgacatgagctatatgacctagatgatttttaaaaagtaaaaattctaccttttaggaagtaggcatatgaatgagcatttaaaaaatattaggtagacatggacttaatgtatgtaaatgactcatttaagattgtgtttttctttagaggatcgcttcttaacaactttgtccagccagagctccaccagttctactcatctccarttgcctacgccacctgaagtcatgtctgaacagtcagtgggagggccccctgagctagatacagccagcagttccgaaggtagaggttaagtcacttttaccatatttcattgtatctragactgaaagatatatcattgatttacatgaattacagccatttctctaaggacagatatttgcttcataataacagattcatgccttgctttctgtttaggtggtaactacttaaattatagtataaactttgaaattaactttaaaattgctatttaactcgggtgtaatagccacagtgcttcagagatgtttaaaaaaaacaagtgtcccttggagtccatgctgtgtatgcttcastgttgtttcctgttttatcccatagtggtcttttcccttgatcagaaattttaaactgttattggtatagtatacatatgtccatattccgaaaggaaaagaaccaaagtcagcagtttatacttcttattctctgtgaatattaatatataartagactatttttcattttagatgtgtttgatgggcatttgctgggatccacagacagccaagtgaaggaaaagtcaaccatgaaagccatctttgcaaatttgcttccaggaaatagctataatcctattccatttcctttgtaagtattattaaaaccagtggctcttagcaggggggttatttttccttagttgctcgcttcatatttaaatatatttatctgatgcatgatttttcaatcctaaattttatttcattttagtaaaagagatgtcttttgatacaatgtaatttgtagaatatataatcattatgatatagtagatgagtggataaagcactagccagtgttacttataaatgtttgaattacttgttctggaaacacttgtttgtttatcttttttcaaagatatgtggctatatccactgatttaataattataaaaacatattgctggttatatatgaggttggtagttgatttgctgggacatggcattgtcctagcactgatgatgaactacagtgacttgtacaagttttcatgtgatcttttttttatggggtgcactcaaatttggaaagaatataggctggctgtgaaagtttatttttcttccactggttgacccatgtggctatcaaatgctgcccttgttatggaacaagtatatccaaaaagtggacatttttgttaataaggccttttattttattaactgacttacatatttattcaatcagtatttaaacttttatttagtgcctgtttaagtgtcctgtgatgtagaataagatttgtaaggaactgtcatcactcttaggagctcataatctttgggaagatacagttagggctcacagtacagtatgtgatatgttacatgacagtaaaatataaaaggtcccttttttctctactttagacctgattatatcagtttcttgattgggcttggatccctcttatgttatggtctttgttcatgctctcacatttatttttatttttttaatttttattatttttgagacagagtctccctctgtcacccaggctggaatgtagtggtgtgatcttggctcattgcaacctctgcctcctagattcaagtgattctcctgcctcagcttcccaagtaactgggactgcaggtgtgcgccaccacacctggctaattttcgtatttttagtagagacgaggtttcaccatattggccaggctgctctcgaactcctgacctcaggtgatctgcccacctctgtctcccaaagtactgagctactggacccggccctttaaacttttttttttaatatagtttttttctttttgtttgtttctcttctctctaaaccactttttgtgaaacacagtcttttttaatcattcagtcctgttctttctaagaagaatttactagaccttcccccttacctcctgctccagtcagagtaggtttctattatatgctcttatgattcctgtcttggtccgttcatgctgctctgatgaattaccatagactgagttgcttgtagacagcagaaatttaattcttacagtcctggaggctagaagtctgagatgagggtgccagcatggttgggttctggcaagggtcctcttttgggttgtagattgctgttgtctctttgtattctcatgtggtggaaggaggctgagagagctgtgtccagtcttttttatgaggacactaatcccattcaagagtactccactctcatgacctaaattaccccctaaaggccctacctccttataccataacattgggggttaggattttaacatatgaattttgtgggggctgggagggtaaacattcattctgtagcaattccctcatagcacttaccacagagattatatttatttatttattggattrtctgtttctttacccccactacactataaaccctatggtgccaatttttttttttcgccattgtattgttaacatcttacacatgtaagatccttaaaaatagtttttcttcatattgtatccttggcatgtttggtgttcagtaagtagcacctaaattaaaaatgactgtgcctaacagtgcctaggtgagttagggtcggagtcaggggagcaaaatttaagttgaaatggagctacactgggtttttttgtgtgataatagtaaagtggttgtgttgcattgtttattattgaactagtagtatgtcttctccacaatttctagaagactttttctctctagcttgtaatggaacaaaatattttagacttctgctgttcattttaaattctttttgagattagtgtggccagagtcttggcagtatggaaaggtttgtttggagtgactattgcagaactctctgatttgaaacctaattaattctgataattttctaattgccttcaaaaactttctcttgaaatctttttctttcctaatgattcaggttatcatatctgcatacattttggctttcttaattatattcttaactctagagtacttagttaacttatgtattttaaaaatttgcatagtgatccagataaacactacttaatgtatgaacatgaacgagtgcccattgcagtctgygagaaggaacccagctccatcattgcttttgctctcaggtattattcatgggactttgacttatgatgatatctatgtattttatgtatgtctattaatcccttatttttggaatctttcacataaagcaaaatgattaaatataagcaaaaatatatgttctttagtcgtgatagcttgttcttttttttttttttttttgagacagaatgtcactctgttgcccaggctggagtgcagtggtgcaatctcggctcactgcaacctctgcctcctgggttcaagcagttctcctgcctcagcctcccgagtagctgggactacaggcacacaccaccatgcccagctaatttttgtatttttagtagagacggggtttcaccataatggtcgggctggtcttgaactcctgacctcaggtgatccacccacctcggcctcccaaagtgctggaattacaggcgtgagccaccacgcctggcagcttgttctttttgtgcataaaaatcttctctgaacccaaataatgaagtataggatgattcctaagtaagctcctaataactaaattgacttggcaagttatttactgagccttgaatcctctatccattctgttaaaatatgttttcccttgtatcccttctctcagtttacttgttgacatagtacttggagcatcctgccttgtacaatctgaatatcttttttgtaccattcactcattttctactaccctacatacgaggtaaaatttttctacttagaaaacagcagtcacctcttacccattgaggatatgttctaagaacccctgtggatgtccgaacctacagatagtactgaaccctataaatgctatgttttttcctgtacatacatacctatgataaagttaaatttataaattagcctagccacagtaagagatgaacaacaacaataagataggacagttttataataatatactacaacaaaagttatgtgaatgtgctgtctctctttctaaatatgttaatgtttttggactgcagttgactgtgggtaattgaaaccatggaaagtgaaactatggatgaggagggactactgcaatgctgttcttatgccttattccgtagacatttctgactttttagtttatacagttatcatatatcttaaagctatatccactgtaaaaatatatagtatgtctaaaagggcaaagcttttaaactttttttttttttttgagacagagtctttctcagttgcccaggctggagtgcagtggtgtgatctcggctcactgcaagctccgcctccgggtttcacgccgttctcctgcctcagcctcccaagtagcccgccaccatgcccggctaattttttttgtattttaagtagagacaggatttcaccatgttggccgggatggtctccatctcctgacctcgtgatccacccgcctcggcctcccaaagtgccgggcttacaggcgtgagccaccgcacccagccttaaatcttaagaacatcttggtggtagctgaacttagtttaaatagaatctaagatgtttaaagcaattttttcccactggaaggcattacagtttttaatttttcttgttagatggtggttccagggagtccatttattcaacaaatatttgaatgtttacaaaatgtgatatactagatattggatgtacaggagtaaataagatagatttacatgcctctgcctttatgcagtttagagtttactgtgtagataatgaggaatttttttcctttataagattccatatgataacatttttagcctttgcctttggcctttgtgaacataatataagcttctcactttatttaatagtcataatatattaataggtaagaaaggtaagagagtcaaccaaatcaaaagtattttttgtactattaggaagtaaggattctagctgagwtcatcttttttcaatgtcttagaaaaacaatacatcctaacatgcctctcttgttgcatgacatttatctaaagcagggttcctaaactgctaacctaagagtcaggttttttttttttctttttggttaatagaacattaaacatttttttcccttaaagtttagtatgttaagtagaaaagcactctcaagttctttttttctctattgtactcaacactgaggcttcaaacttttacctgttcaatccctgaagtcatttgatctaaatattagtaagtaggcttttaaaatctttgttgagggtattgatactggttgatgagtcagtgggtcatattttgtattaccttctatgaagacattgaccttcctcatgaagcttctacttgattgcttttgtcagttaaccaaaattatttaattatggaaacgtataatgattgtgcttctataatgcaaaacttactctaaagcttatgatttacttttaaagaagaagttaatgtttaacgtttttcaacctatttctrccctaagttgtaaagaataccgaaatgccttagaggaattgtctaaagcgactcagtggaacagtgccgaagaagggcttccaacaaataggtgattcatgattgagtagaaactattttaatttagttatgttatcattttctatatgcttgtacttcagttttattayagcatttatcatcataaaaatttctaggattcagatagtggcactcatatttcagccaataattgagacaacaaagctcaaatatagcaaaagaacttaaacagtccctcaggatgcagttttatgataattgcaatagcagttaaatgtatattgcagatttaaggacatttttgaaaaaaatgaaaaggtgtttttatttaaaaaataataacttgtaaaattggtaagctcctgcttgacttggcaattcaaagtatctgtgaattgtttataataaataaaggtcctaatacttcaaaaaccaaacccaaaccagttattttggcaagttcagtattttagacttttagacagaaattgtcacatgctcattattgtgattcttactgaaatagagtttccatctctactaacattatagttttatctgaattgtcattgtgataactagtgtgagagaaaggaattgatattttctgtagttgtttgatttatgggtgctgatatagtgttaatggacttgggaaacataatgtattcctccatacatttttatagttacagcatttcactttaagtccagtagatatttcagacttttttttctgtgttctagcctgtgtttatgtaaattatgaatcagacttttgatattgtaggtgggcttaggtaggaagtaaatcagtgtacagcgtaattagtgtagagtacttactattttctgtttgacttgtataaaactaaatttttctttttttttcttttcattttagtacttcagatagcagaccaaagagtagcagccctatcagattacctgaaatgagtggaggacagacaaatcgtacaacagaaacagaaccacaaccaagtaagattacacatggaggaatatttataattagatttacctataattatgrtttgaaaaagaaaatacataaaaacaaataagtactatctggcaatgatttactacttatgatctctgaaatacaaatttagatatttttgtatgccctctttatacgtgttttgcttttcttcgtygattcttgtctcaagtgtaagttcaaggtattgaattagaaacttttagaagctctttggtctatgcaaaaaggagaatctgcttcctagaagagctttcagtttaaaatatacaacctaagatgcaagatacrtttttttcctttctagttttacagtattactggcactatgaaaataaattttcatacattccctcctttaatccccctagtaaccacataagaattatttgacatatccttatttttcaagaaggaacttaaaatttagatttagtaacttgttcaagatttgacagtgctggagctgggatttgaatttgtgtttctctgactttgtcaggaacacattcagctacaagtaacacaaaattcaactgtaaggatttaaacaaatgacagcttatttttctaaaataaccaaacctggaggttggcagttgctggcatttgtttagctgctcagcattgttataacattaggggaatagtttctctatgattcctttacgttttcctcatggttaaaagtgtttcatttttgtttgcatttgaggtagaaacaagggtgttgcaagctgccgctgttctctttcattaggaaagcagaggctcctcctttagtcagtctcattggtcagaactgaggctcatggccactcctgactgaaagagacagagaaagtagggagcagcattgtcccggttgggttatacaaatcatgatcctttcctggtgctgtacacatagttacacaccccaccccgctcccctcttcccctaagttggcattctgttggtggggaaccaggtaggagtggatattaaagaggcaatactagtgtctgttacccaagtaagcacatttatgattgacattttctgtgagttttgtaaatggtaaatttgcaagaattagaatcatattaatagtatgatgaatgaagctcaaaactaggagtaaaagtatagagcaagctttagtaaattcttggctgtttgatggccttttttattttttgaaagatgctaaaaaggaaatcttatattttcctgtgttaaactgtaggaacacaaatgacacaaagatgttacctttaactgaattcttgtagcttgtgaaattgttttgtgttcatttagttaactatattgcaatactgtaagaactcagccctaatataatcttgttgcttaagctgtgactgcctttgaaagatatttttgaaaggctttctagataattcccyatatttttatattaatctagctgagtgttaaccttctatctttttttatgtttttattaatargggtttttgttaaaaagggtgcttgattacgcaaaaacaacatgtgaaacaataagtaacaacatgaaggacaatgtgcaaacaaaagtatttgcattactcagattgattagcttcatatagtggttacaactaacaaagaaatgagctgaamatttttatttttcatctgtagtgacctgtacttaaaattaatatgttacttcttatttttagccaaaaaggcttctggaatgttgtccttcttcagagggacagcagggaaaagccccgatctctcttcccagaagagagagaccttacgtggagcagatagtgcttactaccaggttgggcagacrggcaaggaggggaccgagaatcaaggcgttgagcctcaaggtgtgttaaagaagagtaaatrtgcttattctatgctttgatttatttattttagttgcatatatttcttatagccttaaatagataattcttagtgctgaaactggggcattccctctgttctcacttgtcagtgtggtagagtggaaaaagcatggcactgggagagtccaactactttcagatttcactgccatcgtgtactgtgtggtagaatcagaaatctttagtttccataacgtgtaaagtggcaaaaacaatgtcttccaaggttgatgtgacattccacatgtaaaaacatttgtcttaatatgtaactcatattatatactcaaatgttttcattccactactccctcaaatgttttctttcttttcaagtccctgtaaagttgcagctatttatgtcccctttcattttgacatttaaaaattatgtctaatgctgggtgagatggcccatgtctataatcccatcactttgggaggctgagacggcaggatcacttgaagccagcagtttgagaccagcctgggcaataaaatgagacctctgtctctaccaaaaaaaaaaaagtgtgtgtgtgtgtgtgtgtgtgtgtgtgtgtgtgtgtatctacctcattgtgtttgggtatgggtttagatcaggaataggcagactctgatgacctgtttttgtaaattaacgtttattgggaaacagacccattcatttacttatcatctggttgctttcactttatattggcaagttgagtagttggaactttttcagagtgaaatatttgctctgtctctatatagaaatagtttggtgacctctgggttagtccgtgaattagtagttttaaaaaatagcaactgctgggcccagtatggtaatcccagcactttgggaggctgaggcgggcggatcacttgagactaggagttggagatgagcctggccgacatagagaaaccccatctctactgaaaataaaaaaattagccgggcctggtggcgcatgcctgtaatctcaactacttgggaggctgaggcacgagaactgcctgaacccaggaggtataggttgcagtgagccgagattgcgccattgcactcctgcctgggtgacagcaagactctatctcaaacaaacaaaaaaaccaactgctgtaataaattttgactagtaattaagatatctgtttagtattctataggctgcttgctattgggctgtagctgtttataatgggatccttggaaggcatagatgcttcaaaaattattttgaaatgtgaaacttaggggactatttgttcttctagatattaagatgtattttaaatctctaataattaaacagaaagtagtaggcttgcaaagcaagtcagtcacatataaaaaaatagctctgacatagattctagtatattttatgtataaaaatatgttttaagtatattaatatataattgtattatatgttaattatgtatgttatataattatatatgttataggctaataaagtkatatattatgtaactagtatataattttatgttttaaaattatgttttataaaataatattttatgcatattttatatagcttagtacatgataaagcattgcaaactmttggggaaacattattctacacacatggggaaaatagtcataataaagaagccatggaagttcttggtataagaactgagttactrtattgccactgtaggaatcattcagttgtaagaaaaagtattcaacctaaattctctatttttctaatttaaaaactgaaattccaaaaaacatacatttttattgtratcatttagacagtttaattgtatatcttatgcttgcttgatagtgacttgagtaggatatttttacttttaatttgctaagtttttttgttacatcaaggaaaaaggaaaggacaaaatgaactgataattactcaaaaccttggctttactaatgatattaaaccttttagatgaagtagatggaggagatacrcaaaagaagcaactcataaatcctcatgtggaacttcgtaagtatgagatattatatcattggtttggggagagggactrcagttgagccatctctattatttgagaattctagcttcatactaaataaatgtcccagttcttgaaatgaatattaagtctttatgctgacatgaggtatatttaatcaacagtttataaaatataaatttaatttataaagaaayttaatcaaaagtataatttatttgtaaattatgctcttatttctaatagttaaacatttacttattatgtaatctagagccacagaattttgacagttgcatttagaattgtgtatatgtgtgccagaaacgtattatccagaataatatgtacagtacattttaagatatttattaagaattactataaaagtacaatgatgttaatatggtaggtaacaagtgtaaaattagaactgagtcttttttttatgtgatttttatttttttctctttttttggaaagtatgtaaggatggtcatacgatgttctttaattccccctgaagatcagtttaacaaaattgtgataaatagggatttggatctaacatgcaaaatgccatcatgaagaaacttaagtggttgcatttggccagggtagggagtgagggagcggaggaggaaagatrttttctgagtcataaagcttttyaaaaaaacttctgttgtttatagaattttcagatgctaatgccaagttttactgtcggctctactatgcgggagagtttcataagatgcgtgaagtgatyctggacagcagtgargaagatttcattcgttccctctcccactcatcaccctggcaggcccrgggaggcaaatcaggagctgccttctatgcaactgagggtgagcctttctcatcgtttattgattggttcagtagtcttcatctctttacctcagaaaatgcagcaggaaggatattgcttaataagaactttcataactatgacttactagttttaacagaggtgtttataaarttttatttagtagttttaaaaagtagatcttctagaactgaacttagatgtgttattgacaaaagtagagggtttttgactatataaatccacaggatcccttcagttaattgagaattgtgttctgatcaaaattttcactgtgacattagaaaattccccttaaaatcataaaacaacctaatcatttaggatctttggaatgatgtgttatagattacagtatatattgtgattgagtaaacacataaaatttctgccttttagatgatagatttattttgaagcaaatgcctcgtctggaagtccagtccttcctcgactttgcaccacattacttcaattatattacaaatgctgttcaacaaaaggtagaaatctaaaaccatggtctgtaatcaaagtttggtggcttttttcacatcctgaatctttctgttagtctattcttgtgttgctataaagaaatacctgaggctgggtaatttgtaaagaaaagaggtttatttggctcatagttctgcaggctgtgtatacaaagcatagtgctggcggcgtctgtttctggtgagggcctcaggaagcttacagtcatggtggaaggcaaggggagccagcatgtcacatggtgagagacggagcaagagagcggggttgggggtgggggaaagtgctgcattcttttaactaaccagatcttgcgtgaactcagagcaagaacttattactgcaaggacggcaccaagccatgtatgagggttctgctcccatgacccaaatacctctcaccaggccgcacctccaacattgcagataacatttcaacatgagatttgcaggggcaaacatccaaactgtaacagtcctaatggcagttttctctgtggtaagatatatgcaggacacaaattgatctctgttatgctattgaggtattataggattcagagatcttaaactatatatttcctgcgtttgttagtgaggaaccaagtgatcttgagcaagttgcctttaattmgtttatataaaaaatcacttaagacattaagactggatgaaattaggtgcacattcagtagttggtaattttgctgagactgaaatttgaaacgtgtattgagaaacaaggggatgcttcctttagctagaaagagaggcagccaatggcccaggtttgcccacttgtcattgagcagccaccagtgccccccaccccatcccaactgccatcttagaatcatgaaagagttacatagttttgggttttttttttgaagttatcatggtttattacgtagtattgggggaaattacatgtcataatgaagtttttgaatttaatcaactgaaggattattccttgggagaatgttaaggatctaatatttttattggcattgctgctgtactcacttctgagattcaagagtttgagtttttttcaaagtcctttggtcatattaatagaaaattatgttcagttattacatggataatccttatattggtattaaattataaataaccctttttgataagaatttattttgaccttctcttgattagaggcccacggcgttggccaaaattcttggagtttacagaattggttataagaactctcagaacaacactgagaagaagttagatctccttgtcatggaaaatcttttctacgggagaaagatggcacaggtaagggtattggactatgtgaagcatttagctactggaaccttttgtacctttggttcttaaatatagtgaatcagagagtaacatcttattttatagtamatatttaactttggttactaggccatatttaacttttgacttgctcagccttggagaaagaatgaagaggaattattcttgtggagtggtcttaaaatacagcatatccaatattctagaatcacagaattggtagaataagaaggcagatctacttcccgcatcttttttgaagattaagaagctgaggcatacagaaattaagtacttcattaaaatcactcagttattcctagactcaggttagtctagattctaaaacagtactgttcaaagagctagtccttgaactgtttccagtctatgataagataaggaacgtgtgctagaatgtaattcagttcactgctttcttcattgagaacaccttctatgagaaaaatgtcagctgaactaaacartatacttaataatgtaattgatttatattctggcactagttccctaatgttgtagtgagccaggagcaactgaccagcattggtctgtagaatatactacaggttgtactggtcctggtactcaagtcccctgtcctttgagtgcattgcttttcctaccacccaaatattcctgtgttrtgctcttctacattgctgtaagtaattgtccagagtttggtatcaaaactatgtttcttaagactatttgcatctctctctcttttttttttaacactgttttgtgatccaatgatgtatttctggagttacttgttaatgtatcttgaagttgattaaattggccagtgtatttcggaaacgtttcagtaattgagtacctaggtgttaattttaaatgatagaattatgttactgtgtattttatgtactgtacaatgatatcaccatgcgtttaaaaacttaaaaattatgattcaattttcagttaaactttggagtgtgtgtaatggtagtgactataaggagtctttctgccttttttatttacttacattaactaatcatttgtggcaacctgtacataaatgacaaagcattttctttttactaggtttttgatttgaagggctctcttaggaatcggaatgtaaaaactgacactggaaaagagagttgtgatgtggtcctgctagatgaaaatctcctaaagatggttcgagacaaccctctatatattcgttctcattccaaagctgtgctgagaacctcgatccatagtgactcccatttcctttctagccacctcattatagattattctttgctggttgggcgagatgatactagcaatgagctagtagttggaattataggtaagtcaatgagtaccctgcttatatttcatgattgaagtcagagtcaaattttaaagattctattgaacctggtctaataatagcttattgaatattttcacaaactttcatttgaaatttcaaaaataagttttttattctagtctcttctactcagtttccacattttcattatctctaccaaaaatatgtgaattaaaaaagtcacttataaatgaggacttttgtgattgttgtgaggattaaacaaattagtgtggagaaaccctgagaacagcacttggcacattgttagcactcaatgaaagttaactgtcatagaagtagtagtaatagtcattgctgttgtcatttgattatatttattaacatagctttattgctaatttcactccttctaccccccagattatattcgaacatttacatgggacaaaaagcttgagatggttgtgaaatcaacaggaattttaggtggacaaggtgagaatttttgttttgtttaaattgttcacatgtatttcttatcagttaaaattttaaaagtggatactgattcttttttttagttgtaaaaaataagtggttatcattgatttcattgtcatttctaaagtgaccaaacaataatgagaattatataggtggggaaatattgggtgtaaatatgtgttaaaatgtcagaggttctcaaaaagattttttaaaaagccagatgttctgaataagagattgtctttaattaacacttgagacttccaagttctctaagcactgttagcctcatttgtgctcttagacatcgctcatctctaggcaggagctagtctttttaaacagaaactcgtaccaggtaggactttgtcccatggcatgtggcacaacagataacctttcctgcccactcagackgcttctgcatgtgtatctttatggcagtttatatgaaagaacatggtcagttgacttcagttgcccaatcaattatataacagctttttcccccttttctctttcataatctcaggtaaaatgccaacagtggtgtctccggagttgtacaggactaggttttgtgaggcaatggacaagtatttcctaatggtaccagaccactggacaggcttgggtctgaattgctgaaatcaagcacatattttgaaatggactgtgaaggaaaaggggacaggaacaaaggaccaaaaataagctacatgttttatttcttcatcgtgttcaccactgtatgccaaggcttttcagttctgtgkctgtttagactgtccgtaatggaatggtaaaactccatgaatttgcactttggtttttgatacctgtggagctgtctgtacgttgggaagtggcatgaaaattttcttaagctaaaatacagacatgtttcaaagggctaaagttggagatgagtagatagggtgaaaaatgggttaaatttgctagcttaattgttttaagaagaaaacagtgtctcataaattgactatcctggcatcacatttaacatgttatctacttagaaagcatttgtagagctgctgaatttgttttgtgtttttctgtaataatttaatgttacttattatcagaatttctgaaacctttacaaaaattctgatttattccattaatggccagttaaacacgtgggcatttattgttttattgaggaatttgacttaaactgggaatcctgtcatgttgtttatctttccagcttgcctgtttttgagtatgtttgatgtttttaaaattttgtcttctctgtggawgacaggaggctacagcaattaactttaagcctccttttagagatatttttaaarcttgtttaaaatttttgtgcaattcatatattaaattgcacttacttgcatacgctcatattctagggttttttctctatttttagggtatcatagtaaatcattagtaaatgagtctgtagttactaaaccctaatggaataattattaatgaaagatttttgaaatataaaaaataaattaggcccaatccaagaaattgagtgagaaggaaacacttgttttattcacagaggtaaagtgtcttttcaatataaccagcaatttaggtggcatctataaaataaaaaatttctactgtggacatccccttttccaactttctacataatggctagttctgactactaagaaatgttaagaaataggccaagtgcggtggctcacgcctataatcctatcactttgggaggcctaggcaggcagatcacctgaggtcaggagttcaagaccagcctggccaacatgaggaaaccccatctctactaaaaagacaaaaaattagctgggcatggtggcatatacctgtaaccccaactacttgggtggctgaggcaggagaattgtttgaacctgggaggcggaggctgcagtgagctgggattacaccattgcattccagcctgggcaacagagcaagactgtctcaaaaaacaaaacgaaacaaaaaaagaaagttattcttagtaaggaacttcttgtttaatagcatttttgtttattttaaaaagtgatcagaagtagtaaactatctttgaggaaatactgtaaccccagaatatttcctcttgacttctttttgtaacaaggataatttagggatttataaagttgtaaggatttcactgttttcggactgcctataataatagcacattaaccttcacataataagaaatctggacaagttcagttacacagtatgatgaatacttgaattaggaacattgtggaaaatttgctttagagaatcaaggcagtagtttggtatttggtgcttattaaaaatgtggtttgttttgaactggaagcaagttgaccaaggacttatgactaatgtgatgctaagttccacttggccccttttaaaaacgtgtatgtgccttttgaagatacacaaaacactgaggattttagttttgaaatcaaagactattaaaggagctgtacagaggtaaaaaaataaatgtggaacattattaacttattttgtgtctaggaacaatggattttgtatctgatttaaaatgccaacactgttttgtctctgttcattttttctgtgaggatacttaaggttattattcctgtctgtttcctgtactcccctagtcatgagcacttgaagtacaaggtgtctccccctaggtgcaattaggttgtttctttgtttttagtttcaattctatgtgcatagcaggaatgctccacaggaatggcttctgacaataatctgtcctgttgattttgttttccttgcccatgacttgaacaactgtgttttaaagtactgtagtctagtaggtaactttgtggcaaaaattttcaatataatacattctgaaacaatagttgctgccttgcaaaggtaatctctcattttaaaattggacagtattaatgaaggggaaatatacaatttatttctattgagtggtagaactatatgtctggtcccttgctgctcttgtttaggccactatcatagatatatttcaaatattgtactactcagtgttaagtattgaatgactgtttccctttccttcaaggcctagagtatattctgaaaatttaggaatgaggaagaaatcttaatacttccttccttaacatacaacatgagtcccgagaataattgatagtagcaagagaaaactatgtcagtaacatgttgctttgtataaaaatcttatttataaatgtgaagctttttgatgccatcaaaacttattaaaaaataggatttacttttttctaattctgacctaagaaaaataatgagaacaagctgttgcaagctcttttgtagtctattgaatattttatagatattcaaaatttcctacaaactataattttttccatgatttagcagtgagtgattttctagctttggctcttattaggtattgtaaatagtagggttatatcgatatcagcttttgtgatggcattgtggtcatcagcttcatgacattttacccatttgcagtgatcctgtgtaaaactgccaaggaaagtaattacctgtaggagtttgctgagcttgaagagtgaaaactgttgtgaatgagcctgatcataaaacggaccaggccattcattattcctcaagtgttaatatactgacttatgcagtattcaaaccatctagtgcaatgtttttgtttttgttttttttttttggtaacacaggtgcagtgtattatagaaaaaataaaaactacaatcattagcagttttaatactgctgtgtcagttttgtaaaaaatgtacattatgtcttttgacatgttgaattttaaactagggaaatgacattgtaaatcatagtagcctcttttaatttaatatgaaaaatgccactatattgaaagtacttaatgtattgtatatatttctctactttggttctagctattttatatgattgacatgttatttaaaagataactgccttgaacttttggagacttgtactgtaaataaagaaatcttaacaataaactcagaatctacttactccacttagttttgaatctgcttgaagaaattgacaacaaaaggaaatggagtttgtcctgcaagcctagtctttgtgttactggtggagggtgtccaggttcttggcgttttgaacaaagaattggacaaaacacaaaaagcaaggaaagaatgaagcaacaaaagcagagatttattgaaaacgaaagtacattccacagagtaggagcccaggagcactggggcacaagagctcccgttacagaactttctggggtttaaataccctctagggatttaccattggttagttggtgtacaccctgtgtaaattaattagtggcctgcaatcagtgtgattggttgcagaaagcaacccatcaggctgaagtgaagttacaaaggttaaaccctatgcaagtgtcgttgtggaaaacaaccagtcagaggccgaagttacaaaggttacaccctatgcaagcatctcattggttgtggaaagcaaccaatcagaggctgaagtgaagttacaaagttacactcctatgccaatgtctggttgcagaaagcagccaatcagagatgctttcaattttccgtctgccatgcagaaaagggaagagggtgcttgcaaacggagtattccagtccttttgttacttagatgtagaaagttggggttttccttttgatttagttctagaaagtcagtgtgaatcggccttaggttccctgcctccagactattctgcctcacctggcctagcagtgtcgctttctgttcattctgttcattctcttcctggttgtttaaccactggagaatccgtaacttaaggtaaacccacagttcatttcagccaatactgggcaagcagcattccccttctttcttctgatagggcactaaaggaagtcctgccctcttccatttgcgattggctgaatttgtgggtgggcagggctctccgctgccagtgcctccgtgctccgagggaccacaggtccactacgtgaggggaggcttccctcccacaggaactcacacctgtgggcaggaagccgggaggcccgccccctgcctgggttcctgcaggggaaggcgagggtggctggatagagcgtgccctgagaggtggttgggcaggaggctgggctggtggccagctgcgcagggagaccgggaggaggcagatctgcggggcgcccagtcacttcctccacgttctcgtgctgggcgggaggagcggatggggcttgggaggcagcctgctctccagtccctatccacccacaggttttttgggtcggagaggaattatctgataaaattcctgggttaatatttttaaaaacggagagtttttaaaaatgatttttttccctcgaaaatgacctttttatgcttcgaagcagtttgtcaccagcatagtgctttttcttttctcttctttttctacgataaatgaaagcatttcttcaagaaaaaggcacaggttccttgaacaggtaagaagagcgccccacttgttctcccgccttctgcgtgagcagcccctacggggtctcctactggtccctaggaactttcgccacacccggagcggcggcctccccgagcccctcggggccccttccctggcagctgggatgagggcagcgtgctcctcgcaggttacttggtcctgaggtcctccctcaggcgctgggcatgcctggggcgcagaaccgcagctctgggccagacccggctgagactgtgcttgtgcggcgagtggaggccgctcccggggccctgccgccctctcgctcgctcggggctctggagtctggcgggccgcaagccgcgctgcccgctctacctggctttgtccatccagccacccaccaagcgccagggtaaaacagcacccggaagcagtcgtcgcctgctgccaccaggctgccttctgtggtgaaggtgggggccagggttgcaaggccctcctcttgttggcatcagccaggcacgcagtgctgtcgtggctgacccaggccgtgaggcacccgctgactgagaagccaacctgagcacccagccgcacctaccgctggcctcagacatcagcaccccaaagggtatgttggagtcccatggtggaggtgccggccgctcctccacgcacttgatgtataccgaggatcccatgcttgacgtcgcagggggcattagccaggagcacgttgctgggatgccagtccaggctgaggatggtggagccaatgggcttcttgatgtacttgcacacccaccagttattctcccgctggaaataacagatggcgatgacacacagctgccgcccacagcaaacttgtcctgtgggcccagcacacacagcaggcagtgggtgcgggcttaccctcctggcccgtcagcgtccacacagaggccttgtggcctgtgccataggtcacgatgaggttactcttggaggcccagttgatgccttttacctgcccgttgtgctccttgagctcgggcaccttggcccacttggccccactcttacagcttcgtggttgttgaggcagatggtggccatctgggtgcggcccttgctccaggtttggcagcaatgggttcctgcagtcagctgtgggaggctgtagttgctctccttttcagagtaccccagctgcagactctgggcaggacgcacccaaccagtgctctggttttttgaagtaaaaaatgcataatgcaattttaccatcttaaccattttttaattatgaaatccggtagtgttaagtataattgtgttgttgtgaaacagatctccacaactttttcattttgcaaaactaaataactcctctttccccctactcccaagctccaggcagctaccatttctgtttctatgaatttgactacttatattacctcatataaaggggttcataagtatttgtcttttcttgcttggttacatcacttagcatgatttcttaagtttcattcatgttgtagcacatgtcaagatttccttttttttttttaaaaaaaaggatgaagactattcgtttgtatgtatatgccacattttgtttatccatccatttttcttcaaatgtttgagttgtgtgatgtttaattatgtgtcaccttgacggggcaaagggttgcccagacagctggtaaaacattatttctgggtatgttagtgaggctgtttccagaagagattagcatttgaattggcaggctgaataatgaagatctgccctcatcaatgtggatgggccagaacaaaccaaaaaggtggagaaaggaccagttatctccccaccacccctgtgccctttagctgggacatccatcttctgccatcagacatcagagcttctggttctcaggccttcagactccagaagttataccagtggcttccctggcttttggactcagactggggtttcactgtatgtttccctgattctcaggcctttggacttgaattgaattacagcatgaactttcctagttctctagcttgcatatggcatattgtgggacttcttgacctccataatcatgtgagctaattcccataataaatctcctcttatgtatctataattcatatagatatgatatctatatatcaatcccatagataaatagatgtctcatatatatatcaatgtctctatatgtagatgtctcatatatggtatctatgtatctgtatcatctctatatatctaatcatctaatatagatgtctcatgatatctatatagatatatctatatcatagatgcagagatatcatatatatgtctgtttctttggagaattctgactgatacaggttgcttccgccttttggctatcatgagtaatgccgctgtaaccatgggtatgcaaatacttctttgagaccctgctctgagttcttttgggtaaatacccagaagtggattgctggatgatttggtggttctacttttaattttttgaggaaatgccatactgttttccataatggttgcaccattttataatctcaccaagagtgcacagggtttcaatttctctacatccataccaacacttattagtgtgtgtgtgtgtgtgtgtgtttaatggctgtcctaatgggtgtgaggtgacatttcactgtggttctgatttgcacatctctgataattgctggtgttgagcatccttccatatgcttgttggtcatttatatatcatctttggaaaaaatgtctattcaagtcttttgtctattttttttccttccaacttttattttaggtctgggggtacatgtgcaggtttgttacatggataaattgtgtgtcatgggggtttggtgtacagattatttggtcgcctaggtaaatgagcatagtacctgataggtagttttttgaccctcccccttctcccaccctccaccctgaagtaggccccagtgtttattgttcccttcttagcatctgtgtgtagtcaatgtttagctcccacttataagtgagaaaatgtggtatttggttttctgttcttacattaacttgcttagaatgatggcctccagcagcatccatgttgctgcaaaggacatgatttcgttcttcttatagctgtggtgtatatgtaccacattttctttacccagtccactgctgatgggcatctaggttgattccatgtctttgatattgtgaatagtgctatgatgaacatatgtgtgcatgtgtctttgtggcagaacaatttacatttctttgggtatatatccagtaatggggttgctaggtggaatgattaattcacttttaagttctttaagaaatctctaaacctctttccccagtggctgaactaacttacattcccaccagcagtgtccaagtgtttccttttctgcacaaccttactaacatctgttattttttgactttttaatgatagccattctgactcatatgagatcgtatctctctgtggttttgagttgcatttctctgatgattagtgatgtagagcattttttcaaatgcttgttggccgcatgtgtcttcttttgagaagtgtctgctcctgtcatttgcccactttttaatgggcttgtttgttttttgcttgttaatttaagtttcatgtagattctggatattagacctttgtcaaatgcatagtttgtgaatattttctcccattccataggttgtttactctgttgatagtttcttttgctatgcagaagctctttagtttagttaggtactacttgtcaatttttgtttttgttgctttgtccattttaaaaaatagagtaatttgattattttgttgttgaattgtaggaattctttatatattatggatgctaacatcttatcaaatatgatttgcaaaacattttccctcattctgtaggttgccttttcactattgtgtccttcaatgaacaaaagtttttatgtttgatgcagtcccatttgtccattttttttggttgcctgtgattttggtgtcatatccaagaatgtggaatgtgtcatatccacattcaatgtcctgacgatttttttctatgttttcttccagaagttttattgctttgggtctttggtttaagtctttagtccattttgagttaatttttgtatgtggtgtaagaaacaggtccaactgcattgttttgcatgtaaatatccagttttcccagcatcatttgttgaccagactgtccttttcccatttagtgctgttggagctcttcttggaggtcagttggccatgtgtacacaagtttatttctgggctctttattctgttctattgatttgtatatctgtctttattccagtaccacactgttttattcttctttttcaaaattgtttgactcttagggccctttgagattccatatcaattttaggatgaattcttctatttctgcaacaaatgctattggaattttgataaggattgaattgaatctgtagactgttttgagtga

SEQ ID NO: 94798 - DNA, 14105 bp, Homo sapiens
agaccccctgaaactgtttgtaagatgggttttgaccacagatcccctgaaactgcttgcagccctcattttgagaatcattactttaaaccatctcttaccaaaatggaattcattcatagccagaattctcagattttttcaaatcgtcttctttctgggcaactgcttacagaagtggatgaatcttttgtttctgtttggtggccagcactcttagaagcttttgcatgagactggacactttccttgtttggttgctcctggtgaatctgtgactgttgtctttcttcatcttactggatgagagagattctgtgattggactaccttccaccaccttcatccataaatgtttttgggttttttaattaattaaaatcatcatatttttcttcattattttagttaggttttctcttccattgattaggaatttgtatctattaaggtttagtccaaggagcaaaaacactatgggtgttatgggataagatacttcgtttagaattgtggagaaagctggagaagaagaggacttgaagagaagtttgaggatcagagacagagttaccactcagtcagcttgagaaaccaagtatgtctagccagcaaagtaggaccacaaaggggaaatttgtggagaggtctatgaaaagctgttgcctctgaataaccacgacctctgtgggcccatagccaagcatctggggtggattggaggctctgttggtcaacaataccagtagtcaagaaaagctagatgtggagcagaagtgagtgatgacaagctggcccctctctggtaccctttcttctgtctgtctctgattctgcctatgagaagatttttcaaatggttatggccattgctttttccaccttccaaatagcatgtaacttcctttcttggccaacttcaatctgcagggatacaagtaagagacatatggaaaatgtaattaattcccagcttagcttcactgacaagaatacaaactaccagagtataatgccatatgttatgtttttaaggcataaatattaaacttatcaaattattttctagataagaagtatcacagaattttctaaagaatgtcccttattttgcacaaaaaaaaactgagaagaaaattccattgatttaaataatgcatactacccgtataggctctatggagttaaacgatttttttcacaagggttaaaattattaaagttatagtgatatagaagtcatccttaattttctatgacctaaggcacttcttggtgcatgttctttagatatatttcaatagcaaaatgaagcagtaatgtattatttctatcaccagaaaagagttaactatacattatatatacaaacacccaygcacaaatacataagacatgcacatccctgtatatgaccatatctacaggatcttacatggtctcttacctgtattcgagcttaataagtgtttcctattgaaagagggtataaattagaagtgtataagcatcattaaatcatccttacaggtttctttctagttcataaaggtctatgaaactcataaacatgggtttataatctgctttcttttcattcttgttgtatcttcccacctcagacattttcattgtaggctgcgtagtggctttgatttcatatattttggaaggataaaaatattccttcaacaacaatgctttattgataaataaagtttcttttcaagtatcttggatctgtaatttctttggggaagtttttaaaggtttggtgattttaattttttttagaagagcttttatacttagatatttttcaaggaaaaaaagtgatttcattgaggctactttgccaaaatagccatagaatgttggaataggaagacataagagatactttggggtttatttagcccaacttctttcttttatttttatttttatttcttcttatactttaagttttagggtacatgtgcacaatgcgcaggttagttacatatgtatacatgtgacatgttggtgtgctgcacccattaactcgtcatttaacattaggtatatatcctaatgctatccctccccacaccccccaccccacaacaggccccagtgtgtgatgttccccttcctgtgtccatgtgttctcattgttccattcccacctatgagtgagaacatgcagtgtttggttttttgtccttgcgatagtttgctgagaatgatggtttccagcttcatacatgtccctacaaaggacatgaactcatcattttttatggctgcatagtattccatggtgtatatgtgccacattttcttaatccagtctatcactgttgaacatttgggttggatccaagtctttgctattgtgaaaagtgccgcaataaacatacgtgtgcatgtgtctttatagcagcatgatttataatcctttgggtgtatacccagtaatgggatggctgggtcaaatggtatttctagttctagatgcctgagccatcgccacactgacttccacaatggtcgaactagtttacagtcccaccaacagtgtaaaagtgttcctatttctccacatcctctctagcacctgttgtttcctgactttttaatgatcgccattctaactggtgtgagatggtatctcattgtggttttgattttcatttctctgatggccagtgatggtgagcattttttcatgtgtcctttggctgtgtctttttgatggggttggttgtttttttcttgtaaatttgtttgagttcattgtagattctggatattagccctttgtcagatgagtaggttgcgaaaattttctcccattttgtaggttgcctgttcactctgatggtagtttcttttgctgtgcagaagctctttagtttaattagatcccatttgtcaattttggcttttgttgccattggttttggtgttttagacatgaagtccttgcccatgcctatgtcctgaatggtattgcctaggttttcttctagggtttttatggtttcaggtctaacatttaagtctttaatccatcttgaattaatttttgtataaggtgtaaggaagggatccagtttcagctttctacatagggctagccagttttcccagcactatttattaaatagggaatcctttccccatttcttgtttttgtcagatttgtcaaagatcagatggctgtaaatatgtggcattatttctgagggctctgttctgttccattggtctatatctctgttttgataccagtaccatgctgttttggttactgtaggcttgtagtatagtttgaagtcaggtagtgtgatgcctccagctttgttcttttgtcttaggattgacttggcgatgcgggcccttttttggttccatatgaactttaaagtagttttttccaattctgtgaagaaagtcattggtagcttgatggggatggcattgaatctataaattaccttgggcagtatggccattttcacaatattgattcttcctacccatgagcatggaatgttcttccatttgtttgtatcctcttttatttcattgagcagtggtttgtagttctccttgaaaaggtccttcacatcccttgtaagttggattcctaggtatcttattctctttgaagcaattgtgaatgggagttcactcatgatttggctctctgtttgtctgttattggtgtacaagaatgcttgtgatttttgcacattgattttgtatcctgagactttgctgaagttgcttatcagcttaagaagattttgggctgagacgatggggatttctagatatacaatcatgtcatctgcaaacagggacaatttgacttcctcttttcctgattgaataccctttatttccttctcctgcctgattgccctggccagaacttccacattcaaattcagtgactcacagttgaactgtgagtcaattaaacctcttatcttcataaattatccagtctcaggtatgtcttcatagcagcgtgaaaatggactaacatagcccataagtcatccacttcaagtgagcaagtgaatgatttctagtaagtttaccaagttgtacaaacatcaccataaatcagttttagaacatttcatcacaccaggaaggtcccaagtgctcatttactcttattccctgtcactagcctcctctaccctaggacactgcctactctatttgcctctttaaatttgctttttagtttgatgctctttgtatcccaatatgatgtttgacgaaagtattcttgtcttccatacttacatgaatatcatcaatgtaaactttaacaccttttctggagtatagcaaccttacaaaaacattgtatttatcctttgaaactgtcttacgaatgaaaatatatcatttctgacctaattctggtgaattaggtatgagaaatttttttcttgcaaacattttttgtaggatattcctaacatccaattgaatgagtgcttatcattaggatataaaaaattatttcatttcttaggattcatttattcctgatgaaattttattttcttgttaaattagaatcagtgtatgctttctttcaagctagtttatcctcttttattttgttagaaaaacagaaataaaggataaaatatggaaataaatttggatacatatcatatctgatttgaaatgccattctaagagataaaactagaggtttcgtttctattagaacagagaatgaaaaaccctgtctaataatcccaagagaaacaacacacttaaatccaaaattccctaaggatttattgcagtctgtgatgattgtacacacggattcacacagggctaaaaagtatgaattgaaaatatgagaatacaaatttccataataagaaatgaagtggccgggcgtggtggctcacacctataatcccagcactttgggaggccaaggtgggtggatcacgaggtcaggagtttgagaacagcctgatcagcatggtgaaaccccatctctattaaaaataccaaaattagctgggcctggtggcacggacctgtaatcccagctacacaggaggctgaggcaggacaaccgcttgaacccaggaggcagaggttgcagtgagccaacatcgcgccactgcactccagcctgggtgacagagtaagactccaactctaaataaataaataaatatagtaacttaagtatcaagatatattcatttcagaagcttacgttttggccataaaatcaatgtaaaatgaggtttcatgcagaaacttgatcatttttcatcagaatgattcatcattttcaatatcagtgtgatttgagtaaagcattaggcccagcttccttccatgctgtcactgcccacaggtagttgtggccactgtgcgtggagggaggtggtggccagtaatgcctgggaaactccttggggcgacattatggagctgaaaacacccttggaggagtccgagagccagaagaaggacaggcaaaaggtatttattgaacctaatttgtactatactctttgctgagcaccgaggggcttaaactaagaaatggtccctgccctcaaggagcctgtagaggagttgtagagtctttcctcctcccacccgcctgccctccaaaaaaaaaaggaaaaggaaaaaaaaatcctgaaacactcagaggatcacagggtgctggaaaatgcacaggtaaaatttttactggaaacatttgacctgcaaaaaagaaatcagctgaagaggctaaggtggcagtatttgaaggctgacattcaacaaaagaatgagacttattttgtatagccttagaaagcagaatctaccccctgaccttatcactaagagctctatcgatattgcaatttcagataagggattatagacctgtacttcccttatagggttgttatgaagatttaaacaagataagctgaaaacacattacacagtgctggagtgacagaaggaagtcaaggcaccattatgacccagatgagaaatcaaaaacaagagaaaatgttgttatagatgacctggatgcttccaaggccaaaaaaaactaaaatgaaagagaagctaaatggagacactgaagaaggatttgtagactttcagataaattctctaaatctcataggaagaaaagatctaccaaatggaaatattgatgaatatgaaaaaaaaaatcaaagcaagtatcatccttagatagttctactcataaatcaagtgataataaactagaggagaccttaacatgtgaacagaaagaaagagctttctcctatttccgtatttctgaagagactgtaaagcttctgaaacatcaaagggtaacatatctctttcctattcaagttaggaccttgtcctgtatttgaaagaaaagatttaatagctcgagcatggacaggaacaggaaagacattcttttttgccatccccttgattgaaagactccaaagaaatcaagaaacaatttttaaaaagctgctcaacaaaggtacttgttttggctccagcaagggaactggcaaaccaagtagccaaagacttcaaagataaaactaggaaactcagcatggtgtgtttttatggtgcaataccatatcaaagccaaattaatcatatgcaaaatggtattgacatcttggttggaacccctggtcatatcaaagatcatctgcagagtggctgattggatctttctaaactgtgccatgttgtgcttgatgaagtggatcaaacgttagatttagattttaatgaacaagttgaagatgtgattcacaaatcctacaaaactgaatctgaagaccatcctcagactttacttttttctgcaacttgcccacagtgggtatacaaagttgcaaataaatacatgaaatccagatatgaacaggttgaccttattggataaatgactcaaaaggctgcaactactgtggaacacttggccattcagtgtcattggtctcagaggccagcagttattggagatgtccttcaagtctacagtgggtctgaagggagggctattattttctgtgagaccaggaagaatgtaactgaaatggccatgaatccacacataaaacagaatgcccagtgtttacatggggatattgcacagtcacaaagagaaattacactaaaaggcttcagagaagatagttttaaagttttggtggcaaccaatgtggctgcccatagtttgcacattcctgaagtagacctggtgattcaacattctcctcctcaggatgttgaggcccgtatccatcgctctggatgcacaggtagagctggacagggatttgtatatgtttttatcaaccaagagaaagaggtcaactaagatatgtggaacaaaaagcaagaattacttttaaatgtgtaggtgttccttctacaatggatttagttaaatctaaaagcatggataccatcaggtttctgacttccgtttcttatgctgctgttgattttttctgaccatcagctcagagactgatagaagagaaaggggcagtggatgcattggctgcaactttagcccacatttctggtgcatcaagttttgaaccacagtctttgatcgcctctgatgaccatgactctggaaagcctagaggaaatacaggatgtcacctgtgcctggaaagaacttaayagaaagctaagtagtaatacagcgtctcagattaccagtgtgtgcctcctgaaaggaaatatgggtgtttgctttgatgttcctacaactgaatcagaaaggttacaggcagtgtggcacgattccaactggatactctcagtgccagccaaattacctgaaattgaagaatattatgatggaaacaagtcttctaatccccaacggaggaatggctggtcaagtggctggtcaggcgggtcaggccagtcaggtggtccatctggtggcctatcaggtagacagagtcgacaagggagtcactcaggaagtcgacaagatggtagaagatgaagtgggaatagaactcgatcaagaagtgggggccacaaatggagttttgactgaatatttgatacttaatctaccagtgtgaacttgcctatttgtgcctaattatgtatattatccaccaaaaattagctcatgatagttgaggtatgtgtctgctatttgcacagaagttggtcgtattttttttaaaaagtgtttcacaagaatagctataaacaaatctacctattcagttatacctttgaattaaaaaacctccttttattatctttttagaaaaaatgagaatattagataattaaagacatttgaaaagataacattttgttcttcattttatacagctataaaattggattttgaggggtttctattattccttccactgaaattatctcctctacttctcttaattgtgaaccctataaaataacaaaatttatttgtccattaaattatttatccctgtaattttaggactgtaaggagccaaacagattgtctgtcttttgctattcaaagtatggttcctacaccagcagcttcagcatcatctgaaaacttttagtaagtgcagaatctcaggttcaacaatagactccctgaatcaaaatttgcatttgcacaaaacaagtttttaatttaatgaagtccagtttatcaaatatccttttatggatcatgatttttgtgtcaagtctaataaccccttcctagccttagatctcaaagattttctcctatatctttcaaataaaatttttagttttacattttacatttaagtttacaattcattttgagttaatttttgaataaactatgaaacagatgtagctggttatttttttttttttttttttttttttttttgcatgtggatgtctaattgccctagcactgttaattgaaaaggctaactttcctccattgaattgtttttgtacctttgtaaaaagtcagttgggtatatttgagtgagtctacatttggattttctattctgttccatttttctgtgtctctatccctctagcaacaactcaattttgattattatagctatattgaaattagatatcctgattcctcccattatacagtcaactctctgtatctgtgggttcctatatgtgaattcagccaactttggatcaaaaatattcagatacaaaattatgcctgtactaaacacatacagacatttttcttgtcagtattccctaaacaatatagtaaacagctattgacatagcatttacatgatattaggtattataagtaatctagagatgattttaaagtatatgcgaggaggtgcacagattatatacacatactatgccattttatataagggacttaagcatctgaagattttgctatccacaggaggtcctggaaccaatcccccacagataccaaagatcaactgtatttattttttcaaaataattttagctattctggttcatgtaccttttcattttaattttagaatgatcttgtctataactgtgaaaatatcttgctgggatttttgtaggaattatattaaatgtatagatcaatttctacagaattgatatctttactgtcaagtcttccagtctatgaacacaatatgtctcttcatttattcagattgtcaactttttaaagtgtcatgtagtttccagtatattagtcctatacatgtttcataagatttacatctaaatctttaacctttttagcaattgtaaatggtactgcattttttattttgatgtccaagagttcattgctagtcatagaagtacaaatgattttgtacatgtatcttatatcctgtgaccttgcttagctcaatcattagcttgaggattttttgtcgattccttgggattttctacataaatcaatcatgtcatctgcaagttgcaaaagtttcatttcttcctttctggtctgtacaatttttgtttccttttcttttcttttttatttttgagacagggtttcactctgtcactgaggctgggtgcagtggcatgattatggctcactgtagcctcaaatccccaggctcaagtgatcctctcacctcagcctcctcagtagctgggattacaggcacacaccaccatgcctagctaaatttttttattttttgtacagatagaggtggaggctacagtgagctgtgagcatagcactgcactcagccttggtgacagtgcaaaaccctatctcaaataagtaaagaaataaatattgatgcagccttgaatttctgaaagaaaccctgcttgatcattgtacataattctttttatagattgctgaattctatttgctaatatttgttaaggatgcttgcatctatattcatgagtgatactaatctatagttttatttttttgtagtgtctgtagagtttgattattagggtaaaactaggtttataaaatgaatcaagaagtattcctttgtcttgtattttctgtaagagattgtgcagaatttatattaatccttacttaactatttgctagagttctccagagaaaacataaggctgaagagatttctttttgaaggttttaaactacaagtttaattatcttaatagttacagggctattcaaattacctatttcgcatttggcacattgtagtagtttgttttacaagggatcaatctatttcatgtaagttgtcaaatttgaatgtgtaaaggtgtttgtagtactcccttatggtactttcgatggctgcagactctgcagtgatatcctgtttcattcctaatactggtaatctgtgtcttctctttgtcactgctgctagaggcttttcaattttattgatctgttaaaaaaataactttttgtttcattaatttcctctttgtttttctgttttcaatgtcattgatatcagcttttatctattttcctcctttatatttgctttcagtttattttgctcttctttttccagattatcaaggtgggaggctagactattggtttaagactattactcttttctaatgtatgcatttagtgctttaaatttctctctcagatcttccctagcaccaatttcaatatgttgtattttcattttcattcacttttttttttatttccctcaagactacctttttaactcttagatgatttagaagtgtttagtttccaagggcttggagattctcttgctatctttctgctatttatttctaccttatttctgttgtggtcagagaacatactgtttaattgtgtttcctttaaattccctagggtttgtcttatggcttagatagggtctatctcagtatatggttcatgggcacttgaaaataatgtgtattctgttgttgttggatggagtgtcctataaataaaaattttctatctataacattttctacaaatgttgattagatcttattgattaatgrtgctcttctacactcttgttgattttctttctagttatcctatggattgttgcgagagaggggttgaagtctccaacagtatttgtaaatttgactatttctcctttcagttctatcagtttggctttatatatttaacagttctgttgcttgctctatacatatttaggattgctatgtcttctaagtggatggatcactttattattatatagtaattttccctgtctctgataactttcttttgtctgaaatctattttatgtgatatcactatagccactcttgttttccctttgattgatgtttgcatgatatatcttctttttttactttcgacctgcttatattattatatttgaaatgagtttcttatagacaatatataactgagttgtgtttttaatccattctgccaatgtctggcttttaattggtttatttagactacaagaataaactactgcagaggaatctgctgtctaattcagagataaagattgtagaaatcaagttttattatctacctcttcctagtctcaactactggcactagacactaggattagaaagcttaaaaacatcttggattcctctctcttactcagcttccaataataactaacatttatggagcacttactatgtatgaggcactcccctaatcatttcacacgcattaactcatttaatctttatattttgcaagtgagacaactgaggcttacagaagtaaggattatagagatagtgactcaggtgtatgcgactccacagcagtacttcaccactaccctccacagcctcaatagttttgcctttgcaatacttcaatagtccatcccacgtttgccatttttgctacctactgaagttcagatcttgttttttctttccacgtatgattttaaaaaccttctattggtgctcccttccaccacactctcctttctccaattcatcttagatcctcagtggcatcatggaaaggatttggaatgtgagctgaatttagatcacagttaaaactttaccttcctatattacctgggcaagttagttaatctcttcacatataaatttgtttgtctgtaaaatgtaaataattttaccacccgtgtgattatattatatatttcgcatgtagtagatttcacatgtaatatggtttggyggtgtccccacctaaatctcatcttgaattgtagttcccataatccccacacatcatgggaggaacccggtgtgaggtaattgaatcatgggggcagttacccccatgctgctgttctcatcatagtgagtggattctcatgagatctgatgattttataaggggcttttcccccttttgctcagcacttcttgctgccactatgtgacgagggatgtgcttgtgtcctcttccgtcatgattctaagtttcctgaggcctccccagccatgctgaactgtgagtcaattaaatctctttcttttataaattacctagcctcgtgtgtgtctttattagcagcatgggaaccagctaatacaacatgtaaaatgccaagtgcaatgccagcatatagtacacacttcatatatattcattaccttcccttattacctccctatgactcaattatatcatctatgagttcaggataattactatctctattttataaggttgttgtgaatattaaataagaaagtgcatagacagtgcttaggaagaaggttgatacaaggctcttattcagcaggatcagtaaatattttgggggatggatatcaagcctaaaaatctgttactcagttgttagagttttcatcattaaaaacaacaagctggccagatgctgtggctcatgcctttaatcctagcactgtgggaggccaaggcgagcagattacctgaggtcaggagctcaagaccagcctggccaacatgacaaaaccctttatctactaaaaatacaaaaatttagccaggcatggtggggcacacctgtaacactagctactcgggaggctgaggcatgagaatcacttgaaagaggcagagattgcagtgagccaagattgtgccactcactccagcctgggtgacagagtgacattccatctcaaaaaaaaaaaagaaaaagaaaagaaaagaaaaaccttaatttgtagcttgaaggcctttgaggattaaatgtgaaatgtgttaaaattcttagcacttttcatgcctcttacagacccttgatgaaggccctcattttcttgcccttgttctctctttccttgaggaattcttgtgttttctctaatttgtgttcatcaaacatttaaatgaaaatgacagaatgacacaaggtatattctgcgagttgaatatgtgaaaacagtaacgacatagttttgcatattgaataaaaaataaattccaaaaagtaaattattaaaaatctacttttgtttttctcacaaagttcttgttcttagtgctattttttccctctcaatgtccttatctctactaaccatcttaaatggtcgtgttccacttaaattcctcaatgtctgtactttaagaggcctaaagtcacctaaattacctaacgatc

SEQ ID NO: 94799 - DNA, 30720 bp, Homo sapiens
cggcccattgtggaggcttctggaatatttccccctttaaactcatctccctggcgaaggctgtgcccctttccccttttccctcagcctgctctaggtctagctcctgggtaaaacaaaagcctaagtgtcagcaatttgggagcctcagtcggccccacacctggaaagcacctcgcctccagctggcattcacaggactgagtccccaggaccaggtcctcaagctccagccttcaagtcggttcctgtggttggcaagcttcagcagcggtttagcctagcctcatttctgctggaacaggggcctggaacctgccccagagcgggacctgggccagcaggctaggctggccatccgggacctgttctggaacgtgcctgccgtgtggtccaggagactcagcccagcctgagggaggtgcagggcctggggctgtgcccaggggttccactcctcttctctctgacctcctgcattgccccmccacagggcgccagtgccagcagacgacagggtgggtctgctcatttctctcttcctgccgaacacccaggatcacgggcaaggatactctggaccccagctggggagacccaacccccttaagctctcttgggccacatctcccaagatgggcacggggcagcacagagcctctcacaaaacttcctrgcaaacgtgtgccctgggcctctccaccggaagaaggatggcccagagcctctggggtccctgcgcaaggttcagagtggctgagaccctcagcagggaggcattcgggggatcctacaggtgactgggctgacgaatttcctccagaagcctccgggttagtcatcaattaaggaggtatttcagatgggaggagctttcagaagggaatgtgacgcccctatgccctcaggggaaaagattcatatcagttaaagtgtcggttatctcagtaatcatattagtcaaatctgtgacaaatctatgaatatctgttagtcaaattagacaaatctatgaaaatctagtgtctagatatcctagatatccgtggggcaatgagggaagagttgcatgcttttccaaagaagcaaaagtcctgggaaggtagaatagacgggggttgtgagctctggcctggaagtttgaattctaactctgtccctgctaactctgtgaccttgggcaagttagcctctctgagcctcaattccctcatgtagaaaatgggaggaaatgggagtactgtcttttgaagctgtgggaggataaataaagttacagtagtgtagggaccagccccacagggtcggtgggtctctccccgtgtgcggtgacgagagagtttagaaataaagacacaagacaaagagataaaagaaaaggcagctgggcccgggggaccactgccaccaatgcgcggagaccggtagtggccctgaatgtctggctgtgctgttgtttattggatacaaagcaaaaggggcagggtagagmgtgtgagtcatcttcaatgataggtaaggtcacgtgggtcacgtgtccactggacagggggcccttccctgcctggtagccgaggcagagagagagaggagacaaagagaaagacagcttacgccattatttctgcatatcagagactattagtactttcactaattgactactgctatctagaaggcagagccaggtgtacaggatggaacatgaaggcagactaggagcgtgactactgaagcacagcatcacagggagatggttaggcctccaggtaactgcgggcgagcctaacgtcaggccctccacaagaggtggaggagtagagtcttctctaactcccccggggaaagggagactccctttcccggtctgctaagtagcagatgtttttccttgacacttttcgctaccgctagaccatggtccgcctggcaacaggcatcttcccagacgctggcgtcaccgctagaccaaggagcccttctggtggccctgtctgggcataacagaaggctcgcactcttgtcttctggtcacttctcactgtgtcccctcagctcctatctctgtatggcctggtttttcctaggttatgattatagagcgaggattattataatattggactgaagagtaattgctacaaactaatgattaatgatattcatatataatcgtatctaagatctatatctggtataactattcttgttttatattttattatactggaacagcttgtatcctcggtctcttgcctcggcgcctgggtggcttgccacccacacggtaggtaatatggttagtacagtattgtcaccctacagaaagacacgagagaaaatgatctctatgttgtgtttactctggaatgagaaatgactgtggctcggaatgtgtcgaatgacaggccgccagggcaattgtgagggaaggggaaagggaagcttttactggaaaaaagggggaggctcacagaaactgcttggaaacagagttcattggttccagagctcaaagccagagttgtcagttcattggtggagatgctgttactgggcacgtgttttctgagagcatcttatctgaattattgcagtcctaatggatgtctagtgatgaaccttgtcaactcatctccctggcgaaggctgtaccccttcccccttttccctcagcctcctctaggtctagctcccaggtaaaacaaaagcctaagtgtcagcgatttgggagcctgagtctgccccacaactggaaactgcctcacctccagccggcattcacaggactgagtccccaggaccaggggctgtgcccaggtgttccactcctcttctctctgacctcctgcattaccccaccacagggcaccggtgctagcagggaacagggcgggtctgctcatttccctcttcctgtcaaagagggactttggcatgaaggatgtgaagctgttttctgtggggtttgtaggaagtccttggaaacaactctcatctcagacatgtaaatacgagctctgctctttcatgcgttcccagccctaatttgtcggggtctgacaaaagtgatttcatcctggtatctgcaacattcacagtgcctgaaaacatggcaaatacttaataaacagtagtagcaatagcagttacctaaaaactgcttactttattcctaagcagtctgcaggcattaacattttaagcctcagaatactatgtgaggtcaaaactattatttccactacacatgaggaaacagaggcacagagaagtttagtgacttgtccaaggtcacacagcaagtaagtggcagggccagggtttaaatccagacaacctggctccagagtctgcctttaagcccccgtaaagaccagtcattgtaatcactgtcccaataataccatgttctgggcactccatgttagcgatgatcttagaggtgaagagaatcgggatttttctctagggaaaataacctgccggggaatggtgggctttctgaggttgagaagctctcagtgatgggagggagaaatgaaccacagtgcttaaacccgggatggtgactggctagacagtgagtaactggggccacttctcagtagcccaagtgactttagagcagcccacaagctgtggacctgtggagtatcagcctggccgggggagcaggggagcgaggctgggctgcctctgcccttcacctgtcttgtcttggagcgggacattcaaactcaataccctgcagggccccagcatcccagccatcacctccctgtggccggcagtggtggaatctgagtgaggggaggaaatggagctagatgtcccaaagttcatgaaatctctgctgctgacaacctctataaggcttaaggtttatagagttgacatgttgctggtgccactggagttaatccccaagaagagagaaacaaatctaccttgctcggggaggtcacatgtgctctgctgggaagctgcctggaatgataggacgttggcatggaaccacagagaggaaagatgcaggggcagggccaccaggcatatggctttgctgtggcccatggtcctttacagtttttggtggggagtggagattcaggtccccgtgggtgctgagccagcccctagcaagcagcatctgtgcagagcgggtacgagtccttgtgggcaccgagaacttccaaccacatgcatggaagtgggtctggtcacgggagagcgcaaagcaggaaacacctctggttttatcacaacagtctcccagctatgcgatatcaaatgttcactgtgcaaacactgcactggcttttggctccctcagggtcggggaggagcgggtgaagggacatagggtctgagaagatcgtacttacttaatggggagtctaacctggtggcagagccgctgaatggcagaagccccagcacgggtttttttctggaatgaaggtggtctctgggttgttcagcagggccgccacactgcatggctcctggggttagcatttcataggccttcatgtgcttggtgcctcctgggggtcctgccatgctgtggccctgcaggatcccctcctggctggggctcccactgccccactccccggcacaggcagtgttccttcctgacagcccctgttctaacagaccctctggacatgggctctttctgctggggccacgtgcctcataggtggtcctcctgggaaggctcccttccaagaggatgcaaggccaacagccttccttggggtcagcccacaggaaaaaatgccatttgccctgccaaaccgatttgagtaacctcacatcaaaggggcttataagaaacctgtgccagatgcccagaaaaagccgtgctgcagggctcaggaagaacagaaactccagggccctcctgatcgtggcagtgccggggacctcagcagtagggtgtggggacacccccagtgctctgaccccagcaggcctcagccacgcccctctggccatctgctttccctcctgccacctactctcggctcatcttctcctccagcttctgcccactcagctgcttctccctcacacctgggctgtctgtggctgatgtggcctcatcagcatcttaatacacagtggcctttcacccacagcacccactgctccctgtgatggctggatgctcttggagtttcctcattcataccccttacagtgcagatagctgagatccagggtagcrcctgtggactgggctgctgaggctcaccctcccttaagtcatatgcctgcttcccgtccggaagggctgaggggtgggcagtgctggcagcagggtcaccaaaggtaacccttgttttgccaaagggctgccctccctgggagctctgggaatggctgacatctaactgacctctgtggttgccactccttggccctcacttccttgctctgtccactacccatgttgctctgttcccgaaggggaaggggttccacaaattccacatctgggtgtgctgctattccctgactgctgcagcccagaaccatgacccccaaaacagaagtggacaaaggctctttggtccccagagggtgtccccggaacgcctggcaggggtgtcagcaccaccaagtaccaggagagtggtgaggggtgtcggcagcccgggctgcagctccaggcataagggagggaatgcaggaaggactctggagtttgattttctcttcagggggaggcctctacctgctggcagctcacagtgagggtcctggaggcgcggaacctgcgctgggctgacctgtgtgagtaaccgccctgtgcgctctgtcgggagcagggaggaccagatcccataggaagggccaagacgagtgccctggggctgggctgggtcacctgcggtgaccgccagggtcttggtaggaaactggcatggctcatggagaggggtgtggggagtactccctcacgaagacttccttaaccttggcagtgagtgaggccgacccttacgtgatcctacagctgtcgacygcacctggaatgaagtttaagaccaagacgctcaccgacaccagtcatcctgtgtggaatgaggccttccgtttccttatccaaagtcaggtcaaggtgaaggcccgggactcctggccactcccttgtgaacgggctggacccccatgcaagggttcctggggtagagcatgcttcctctggggctgtcagagaaactctcagcagtagggggtctctgtgccctggcctgtctgtgctgtgtgcaagggaatgtatgaaagaatgaacatggtcctttcaccaactggctgtgggactgactcccacaagctgggttcctctcgaagcccagctatgaaacagagacagtaagagccccctcctgatcaggtcactgtggggtgagatgagataatgcgtggaagaccgtgaaagatcaccagcacataccttagggtgcacctcagggagccagaaaagccagggagagagagacacacagacagggagagaggaagagggaattatttgacagacttttatgtgttttgttttgtttttgagacagagtcttgctcttattgcccaggttggagttgaatggcgcgaactgggctcactgcaacctccgcctcccaggttcaagcgattcgcctgcctcagcctcccgagtagctgggattacaggcacccaccaccatgtccagataatttgttgtatttttagtagagatggggtttcaccatgttggccaggctggtctcgaactctcgacatcaggtgacccacccacctcagcctcccaaagtgctggataacaggcatgagccaccatgcccagctcagaattttatgtttgataaaaacaaaaattagaaggaggaaatttgaaatttaataagatttccttatatttaagttttacagtttttttttttattttgaagcgcagacgtgtggtggcataatgatcttctctgactctagacatcaagtaagggctcaacagaggtgagctactctcactatgagcaggtaaaatgctaagtcgctgttcctggttcctagaatgttctggagcttagcatctatgatgaggactcagtcacggaggatgacatctgcttcaaggttctctatgacatctcagaagtcctccctggcaagctgctccggaaaaccttctcccagagtccccaggtgggtgggtgggtggggaagtccccrtgggccccacttcttccaactccaagctgaggaagtagctatttctcccacctgttgggaggctgctggggtgaactcattcacagaaaaatctaaacccctttttagatttgcattttaataagcaaggaaaaggcttcactttacagttacaggctgaatcacccagtggaggaattttagccacctgtggcaggaaggccacccctcaaaacacagctcagcatccatcactcctgctggtggtgccaaggcctgctttgtgaaggcctcacgtcccttcctgctgcagcctgggggtggggacggcagagttcgggggtctgggccctcctcaagaaaaagatatgggtcctgcacatcatgcctcctttggctgtgctccttgtcttccccttcagtcttgcccagagttgtgggacctccaagggagggagacctgttctctgcagacttactagctgtgggcaatgtgggcaggtagcccatctggccccatacctcagtttcctcatccataaattggaaataattgtactaacgtgcctcccttggagaccgcttgagaggatgagatgacacctgtaaaagaactgtgtcaactctgaagacacaggtatgtgctgatgacttgctcatsctctctgatttcagggagaggaggagctggatgtggagttcctgatggaagaaacgtgagtaatgtcacacagcccagggagtgtctcaggactcaggctctgaggaaatggccctgacccagatctccctgtggtcagtccagcctgactgtccctcatctcctacccctgccagagaggtcgggagtggggcggggcttctcttagggaaacacagagaggaaggccgatgttttctctctctgctctctcccctcccctctcctcctgcaaagcatctccccttgtccctgaaccgaatccaggacttacagagccctcagcatcacccagggagaccccacatgggcgggagcgggaggtcaatgcaggaagcgtttgcctttgcatggtttgatttttccaggtcagatcgcccagaaaacctcatcaccaacaaagtcattgtggtaagcaccttccccaggcttaggggaggggccccagagcagacgcttggggagggagggcagctgcctggggtgtggaccagcagggacaaggaaggggcagggcttcgtggtaaaaccacccctagccttccagccaggtggtcacctgtggctgtgggtcttggaggggcctggagctaaggggcgcatagagagaggggaggcagggctctgctgagaggaggttctggcccacggctgttcggggtgcttccggaaggtgtttagtcacctgcggtgaactcatagttctagggattgactgagtgcttccctgggaagcggtgaagaaatcaggtaggccaggcccaccttccggttgttcacgttgaggtcaccgaggctcagagggagttcccagggcggtgtactgccaacctaggaggatcagaggctcaggcagctagctcctccttgggactggggagagtcctggtcagcgctcctgaccacgggctcacgaagctgcagtggacagaaatggccgcaaggtggcgagcgggcgacgcgctcgattatcacagtgacccagaccagcagcacagacctgggagcaggcgggtccagggtcacgggcgaaggcacctagagcccagcatttaagctcctaggggctgtttgatggacgggtattacttttaaaaatacacatgaaaataaagtcaagccgatggcactgcctcttaggaggtgatggagacacacagcaggtgggcaaattcagtgattgtgtggagcgtgggtggcgggcatctgctggtatgcttcacagacagcatgcagaggctcccttggcaaggycacgggggcctggccttgtcattgtcccccagttaggccacagaggacagccaggagacgttctgagggtttgtccgacgccccgtctaccctcctatggatgggcggcttgcttagattatttggagttgtggtagaatacctcctccagctccaagccacagggaaacaagagaagaaacagctgtgtctgagggctgggcgctctaggaggtttcgggagtttggcaaagccaggrgagctggaggggaggtgtggagccagggccctcctggctgctgcggaatatcaggttcagccgcggcagaggatcggcaatgggatgaagggcctctgcagccaatcccatcctgagcccacacaactccttgtgtgtgtggtggatttgggacagtgggtctcagagggttgaggttaaggggacctcagcttaccctgcagaggcccctgcccatgatgtggtcttccccargcccgagagctgtcatgcctggatgtgcatctggacagcacagggagcaccgctgtggttgcaggtgagaccagcttagaaccaggcctggactctgcctggatgtgggggtgaggaggattgctgggaagcctgcgcagggcaggaggccagcagcagggtagagcttgcctctctcttctcacccacatggcacagagggccacgcatctccgctgggcaggagggtcccctgacctgggggagagcatgttgcagaaggcaggagtccgggatggggggttgtggggccccttgggctgggaagggcccttttcagaatgctgttgacgatggcccagcctcccaggcatcctctgaatccaggtggtggtgctgctgtcccaggtccgagctggggttccgggctcttgttctcatgctaacccgcctactctctccctagatcaggacaagctggagctggagctggtgctgaaggggtcctatgaggacacacagacatccttcctgggcacagcctctgccttccgcttccactacatggcagccctagagacagagctgagcgggcgcctgagggtgggtcttggctctagacctcgtttgcaatcctaggcttgggcagctccagctgcagcgggcccctccctgccttccctgcccaccagggccaaggcccctgtggccttgtcagcctcccctagttaggcacctcactcttggcagacacagaggaccaccagtggccagagcgggcatggggctgctgcaccatatcagtctctgaatcctccagcggcccctccagtgatacccttagaataagacatgacatctgtgcccacatggccctgcacagcctggcacccgtccacctctgccgcctcattttgttccacactccccccatgcacgatgcctcagccatccttgtctcctctctcatttccaatatgccaagtgctctcctgtccccagctggcttcctccaaggctgcctcctcctcctcctcctcaacatcttagctcaaatggtggctcttcagagggtcctccttgacccccacctcaaataaaccccacgcactccacctttggttgcattagaaactgtcatatcacaccacttatttccttcacaacacttactaacatcagttcattacccatgtctttataaatttatacatgctattccgtgagaacaatgccttcgtactacataaatattagctcttataattttataattataattatgatacttatcaatattataatattctgtattatcagggagaatgtgtctgtctggattgtagtctagatacttagtagggatttgttgaatgaatgaatgaatgaatgaatgatgctttcccttcagagctccagaagcaatggctggaatggggacaactcagctgggtacctcactgtgcccctgaggcccttgaccattgggaaggaggtgactatggatgttcctgctccaaatgtaagtggcctcaactggatgggaaatgccagtaagaatgaagataaggctgggctctgtggctcaagcctgtaatcccagcactttgggaggccaaggcaggcggatcacctgaagtcaggagtttgagaacagcctggccaacatggcaaaaccccatctctactaaaaatgcaaaaattagccgggtgtggtggcgcacacctgtaatcccagctactcaggaggctgaggcaggagaatcacctgaacccaggaggcggaggttgcattgagccaagatcgcaccattgcactccagcctgagcaacaagagtgaaactctgtctcaaaaaaaaaaaaaaaaaaaaagaatgaagatgaaggggaccaagtccccagggatacccatgtgccgcttagggtctaggagggtctgagcagagtctctggctttgatttcaggccccaggagtgaggctgcagctcaaggcagagggctggtaagggacattcacatctgtggggacagtgagaggcgggcatgcaggaggggagggctatggacaaaggtggtccttgagattggaggagagggcttctttggcagctcattgtgggcttggccagccagtggctgagctatgcaggtgtcccctgacccctggatcctccattgccacagccstgaggagctggccgtgcacctgggcttcaatctctgtgcagaggagcaggccttcctgagcaggaggaagcaggtggtggccaaggccctgaagcaggccctgcagctggacagagacctgcaggaggatgaggtctgggggtgcagagggatgtgtgtgcagatatcctggacgggccataagggagtacctgattcctatgcctctccagaaactccagtcagtggagagtgggcatgtgtgtggagacatgggagcgtgagtgggctttgtggttctaactcccttgggagctccatcctgagctgagagccattgcttccagaggagggctggacccagctctaaccctgactctatcaggacccaactatgcrgtcccttccctggagacaaggagcggggcagggccctgggtgagacaggaggcagctggcccctttccttgttaatccagcctgtctgtgtgtggtccaggtacccgttgtgggcatcatggccacaggaggaggtgcccgggccatgacctcactctacggccacctattggccttgcagaagctgggcctcctagactgtgtgacctacttcagtggcatctctggctctacgtggtgaggatcctgggggactgggtggcagagacaatcaggggccatagcggggcagagtgggcaccagagggacactttgtgtggggaggccaagtaggtgtgatcattgtgatctgatgggcgccaagcagctttcccacaaggaaggaaacagacgtttacagaagccctgccgtgagcgaggcggcgcaggaggtgcattccagatgttactgaaaggctgtgaggtagctgactcagatgcagctggatttgagtcctggcagcaccacttactggctggctgacactgagcaacttatctcctctgattctcagttgatgcagctccaaacggacaatcctagcacacaccgcgtgggactggggtgtggggatcacccaagtaaagcacttaacttaatgcccagcacagccaggaattcctaattggtagctctttttatctttcattgttattattgcatttaatcttcaccacactcgaggtagattcccttattgtccatttaagactgtgtagacattgaggtcgagatactatttytacctaaagctagcattacctccctacgccctcacccygcagcatgacgaggtgcagcatcccgctgttagagattcattcctttgagtcttattgaaatgcgactttgaggagtaaaagaagaggaaacgcctcagaggagtttaggtgacagctgttgacaagcagagtgtgaaaaggcttcaggacaggaccgtgaagatgggagtggggtccagaactgggctgtccagtacagtaagccactatggtagccactagccacattgtttattgaccatttgaaatgcagccagtccacattgagatgtgttataaatacacagtgaatttggaagacttagtttgaaaaaaatagaaattacatcaataactgtatttactacttgttgaaatgatatttttgaatatagcgaattaaataaaatattaaaattaatttktacaggcttgtatatctttttaatgtggttactaggaaatttaaaattccgtgtgtggctcacatcgtattaatattggacagcrctgatctagaaggagagaaagccctgagacccatttaccagatcggcagagccttggtggcaggagccacgtgtcaggagaagctgccgagtgggaagcaggagttgcagcgccccatgctgggcctcgggctcctactgttctgtcccctcgttcttccaggacaatggcccacctgtacggggaccctgagtggtcgcagagggacctggagggacctatcagatacgcccgggagcacctggccaagagcaagctggaggtcttttccccagagcgcctggcgagctaccgccgggagctggagctgcgggctgagcagggccaccccacgacctttgtggacctgtgggcgctagtgctggagwccatgctgcacggccaggtagggcgcctgcgcacgtgggggagacgcgtgtgtgcaccgcgggggcgaaggcagggctcccaagcggctgacatgcgcgtgcgtatttcttgcagcgtggaagagccagtgttttagtgtctgcctcactttggaatgctgcctttctgagttagcagattctttaattaattgctgtaaaacagaaatttctggatctcccaaaagctgggaatgagtcgatgtcaaagtcagttaagcaaacaaagcttttgttttgaatgggtaagattgctagaaccgtttttatttatcctgcaatatgaaatttactgttcttcttcatcttcagggtgctgttaaaagcacaaactctgtaaccagattgcctgggttctaacaccagtacctcttactagctgtgtgtccttaggcaagttacttaacctctctgtgtctccattttctgatctgtacaatggggataagaatagttcttaagtcatagagctgttctgaatactcagtgatacctcaccatagaataagcattaaatgtcagctattatatttctttagtattctaacagcatcaagacaaaactaaacatacattttttaaaaaaattacaatgctgcttgagagaaagcttagtaagttaactgctgaactttacacagatacaattattaaaatcagctattttttcacgctgttgttttaccacacataactatctgaacaaagcttcaaaagcgtttgaaacaatgaaaagacaaagtatggaatatattagtagcagaaggactcatctttatctttgggtcaggggtttaatcaagtatgattatcatgggaggggaggaagaaaaattcgttaatgggtataaaaataaatttatatagaaggaatttgaaaagaatgattatcgtgtaaactaaccaaaaatgaatttgccttcaacttttttctttaaatattattcttaccggttaagtacaacactgcttagaaactaccatccttatttgttattagctatacatattcattatgcaaatctcaatctttattatttattatgaaaatcttcacacctaagacattgaataaagcataatgacataatgaatatgcatgaacttaccaaccagcctatgaaatgaaatgttacagatacagttaaagccctttgtataccctccccagtctcatttcactcctgccccaggggcaaacaacatcctgaatttaggtttatcatcatgttgcagggcaagggagcctcaaaactggggttccacccatggagattcttggtgtcccccaggaagaaattcaagtgttagctggtggtagaaaaaatagctttatcaagggcacagtgttacagctctgtgactgctcctgcagagcagggccacccatcagcagtgtgtccagagcagcagctcagggacagttccacagtcacatttatacccatttttaattacatgcaaattaaggagtagattattcagaaatttctagaaaaaggtcgtaacttccaggttgttgccagggaatgagtaaactgtcatgatactggtgagcatgccttacagagaggtgctttcagcccttccctgtttcagccagtctccaatctagttcgagtcaagccctgcctcctacctcattcctgtctcagagattagacactcctccttaatcttaacagggctgcagaagggtagaaatctgtcttctgtaactgcttcctgcttatgttatgggcgtaggccctggccaagcaacagaggagtaaaaatctctggatacctgatctaaggggcccataggcagaacattttaattctcctggtcagtaggcaggatggattggaagccttgtgccagcattgtctttacctggaactattgtaatctaaaagacacaaactttactaagaggttaatcaaacaagggccaaagattagtaataacaaaatagctaacaaaggtcctaggagaggtaagaatgaggtgagacttgggaaggcatttttgattatgtaaccagggcactgatcccaactatatctgttgatgtgatgtatcacatttattgatttgtgtatgttgaaccatccttgcgttcctgggatgaattccacttgatcaatggtgaataatctttttgatgtgttgctgaatttcgtatgatagtattttgtcgagaacttttgcatttatgttcatcagggatcttggcctgtagctttctttttttgtttgtgtccttatctggcttttgtatcaatgtagttctggccttggataatgactttggaagtattccctcctcttcaattttttggaatagtttgagtagaattggtattagttctttaaatgtttggtggaattcagcagtgaagccatcaggtccttgacttttctttgatgggtgatattttattactgcttcaatctcattgcttgttattgktctgttcagcttttctgtttcttcatggttcaatcttggtaggttgaatgtgtccaggaatttatctgtttcttctaggttttccagttcacaatattttcacatatatatccttaagaaaaatatgatattatttgcatgaacaattttgtacaagtctccttgcacacctgcattaaagattctctaagcctccaagatacatacccagtagttaaattgttgggccactgggtttgtgcaccttcaactttcctaggtattgccaaaccattctccaaaggagttgtgttaattcacactcccactaccagtgtataatagttgcttttttctctatatcttgggcagacttttaaagttttgtttaactatggggtgtgaaaggaacatttatcatagttttgcatttctttgatttttagttagacagttgatgtttttaagtatatttatcatttgggcttcctcttccatgaattacctattcaaacccctttccattttcctgtttaatttgtctttttcatattgttttgtaggaattctttatgtattctcgatgtgaatccttaccagttctaatggttttaatgcataatttcaatataatctaatttatcattctcctttatggtttgtgttttggggagtcttccttttcactcccccaaagttataaaatatcttcctatacattcttataaaatttttaaagatttatttcttactaataggactttaatccacccagaatttatctccaggtatcatgtggatagggatccaattttgttttttctcacattaataacaaattttcccagtctcatctattgaattttttctccactgatctgcattgctaattctgtcatgtatcaggtttcatatatttttcatgtatttatattcctgtgactcttcctgagtgccctattctgttccaacaggacagattctctatccctatgccaacagcacactgactaaagttttgtgataaatcttggtatctgataggccaagttaccagtccacttgaattgttcttcagaattctcttggctgtacttgaccctttgctgtttccttccttccttccttccttccttcttcctctcccctcccctcccctcccctcccctctccctccctccctcccttcctttcctcagagtcttgctctgtcacccaggctggagtgcagtggcacaatatcggctcactgcaacctctgcctcctgggttcaagtgattcttgtgcctcagcctgccgcatacctgcgactacaggcatgcaccaccatgcacggcgaatttttgtatttttagtagagatggtgtttcactgctttggccaggcttgccttgaactcctggccttgagtgatctgcctgcctcagcctcccaaagtgctgggattacaggtgtgagccactatgactggcctgctgttgtaattatatgatagaatcacctagtcatgttttgcaataaatgttgttgggatttttattgaaatggcattgaatttatgaagccaacttaattactagaaatattttcattttattactatgtgctatgtagtctttggatctactgtttaagttcatattcagttttgatggtgttgtgttttaataactgactttyctgctgagtggcagcaattagttactacagaatgggagaagctgttttaacagttcactttacaaggtgctagaaaacgcagtttgatcctaggctgtaaagcagacttttatttaattaccattggatactccagtaatgacttaatgcacggttttatgtgcaagctttatagacattttttagaagacattttttaattgttcacaaaaatagaaatgcttgtggtattattagacacctatatattcttaaaaatgaamctggacaacatagtgagaccccatctctacaaaaagttaaaaaattagctgggcatggtggtgcacacctgtagtcccagctactgaggaggctaatgtgggaggatagcttgaacatgggaggttgaggctgcagtgagttgtaatcaccccactgcattccaacctgggctttagagtgagactctgtctcaacaaaagcacctatgctatttttaaaattttgtcccaatatgaaaggtttttaatttattatttttttcttctgattatcataccttacctcttaaagccaacattcattgtagactttacaaaataatgttttcttcgggcaattttagtgtcaatttctaattttttaaagactttagataaaaacaggtatttattacctctataatgtaataatctaaaataccaaaaatcacttacaatgtcagratatataactccatttatgaccaatcacaatttcattaatattaataaatatcataccctgaaactttgctcagaatgactttattagtctacatacatctttaatattgattaggtttttataaaaacccgctygtaaaatacactagctataatcagtgcttctcaaactctcatctcttcgaaacttttttcttcagtcttttgctggcaagtactgaactgcttagaagctgcttatcattcctcaaggagaaactcagagtggttctcttatcctttcctgagttaagagctgacacactttccttccctttagtctgcattgccggtactgcaccaagctccagtgtttcccatgggaccctcgaatcatcagaatggtgttctgcagggttggggttacttgcttggaaactggggggttagagactgagagtcctgccgcagcttactggtgagccattagatataccgggtgggtttcagtagatggaggggtgtgctgacctttttccagaactttccctagggcataaattgtgcaactatagtaaaaggacacattttccctagtcatatgtatcaaaagagcaacagagtttctaaataaaaagattttgagaaggggtcacgtacacacatttgtacctaaggactgactygtacgtacaccaccaccatcagtggcaggggatcgagccctatttagagatttcctgcaaattccctgtaattcatactggggaccattggaaaatggggtggaaggatgactgtggttgacacatgagtgttctcgtcagggacagaagagctgccagcaaggaggacacacacactgggtgtgttgagtttygccatggatgtgggagagggaccctccttgggtaggctgggtaggaatcctcacacctggctgggcatcaggatcatctgagggtttttaaaaggcaaactccaaagtgacttctgacaggctgattctcaggggagacccagaagtccgcatgcttcacatgytctcacgtgtacacattcactgagtcactctgatgataagggctgctgcggcaggttgggagcctctagaactagayactcttccatcttggagagcccaaaggaaggatgacgtattcatggtacacatactgcccagtagaaacagcccagggctgacagcatcaacctcagctctggcggcagaatccttcccamggtggtgctccaggcaggcaccaccattcgccttgctggtgcttgggaagagctctatttgcaattctagctcagcatagaatgaggcctttctgttcccttacaattcagggaggctctgtggaggctcccccaaaaggcaagctatagtcgttgccatcaaagagcttgggccaggcatggtgcctcacgcctgtaatcccagcactttgggacrccaaggcaggtggattgcttgagctcaggaatttgagaccagcctgggcaacatgatgtaactccatctctacaaaamatrcaaaaattagccaagtgtaacttgtagtcccagctactctactcgggaggctgaggtgggaggatcacttgggcctgggaggtggaggttgcagtgatccaagattgcaccactgcactccagcctgggtgacagagtgagaccctgtctcaaaataaaataaaacaaaggcagagcttggagctctattgaggaggaaattaagaacagaaggcaagaataatcaatggggtacaacctcatgttatgcaaagcaagaaagaagagggacgatgagggggaggcaaggatgtcaggaaagcattcgggaggagctgaaacttgaactgcattaaggtgaacctagaagagggggcagtccatcccctggcataggttgcagtatatgctaaaagggcattgctgcatcctttctacaaagcaatacgtggatgtgtgcatgtgtccttgtgtctgtgtgtcagtatccacacccacttcacccttaaatccacgaagatgggcctggaagcaccgctggcattgtggtccctatgaatggccctcgctggagattcatagtacacagcctgcatgccctgtccagcgaccctgcatctagggctgttcagaacacaggggcaggagtgggaactgacccacatayggtccccagaccccacgggaggagctgcctcctcacccccagccaggtcccccatcctgcccctgtcctggyggagccactgcctccagggtactcccagcctcacttaggccctgatgccctctggccccaggtgatggatcagaagctgtcaggacagagagccgccctggaacggggtcagaaccctctgcccctctacttgagcctcaatgtcaaagagaacaatctggagacactggacttcaagggtacagttctacctactcccctcccacatactccaccccccaaaccctctgcaccccgacagcccccagagaattcatgctggaagctccgcacagattgcccaatgttcyggaagggcagtggtgctgaggggctcagggcakctctctgtgcttgagagtgggtagtgcttgagggtgtggaccaagggctgggaggggtgtggtcagtccaggactgcccattcctcacatctgctgcattggtgccaggcacagcagggctcaggcctgctgggggcaggggcagtgtctttcgccagagstggggactcccgcaatccactcccctcacactcctgcctctccttcccaccccattagagtgggttgagttctccccctatgaggtcggtttcctgaagtacggggccttcgtccctcctgagctcttcggctccgagttcttcatgggacggctgatgaggaggatcccggagccccggatctgctttctggaaggtgagggtggtggctctgaaggccctgggcagccctgggccaggtgtctgaatggacatgggtcctgtagctcaggtggggcagracctcaggacaagggggaggggtggcgggggggatgcattgtaggggtagccctcgccccactcccattttccatcagtacctgagggtggggccgctggctggggcctgaggctgayctcttttggtgttcctcagccatctggagcaacattttctccctgaacctgctggatgcctggtatgacctcaccagttctggggagtcctggaaacagcacatcaaggacaagaccaggagcttaggtgggaagggcaggggcactgaggggcctgggatgacgctgttcctttagaatgcttgcggtgtgcggtgtctgaggggaagaagtaaggggaagaagggaccaatttctgtttctctggcttcagagaaggagcccctgaccacctcggggacctcctcgcggctggaggcctcgtggctgcagccaggcacggcgctggcccaggcatttaaaggcttcctgacaggcaggcccctccaccagcgcagccccaacttcctccagggcctccagctgcaccaggactactgtagccacaaagacttctccacctgggcaggtcagggccgtggccaggggtccctaggtcacaaggttgggcctctgggtggtgtggcagggactggctgaggcctaggaggtcagcatccacttctggggtgtggcctggagacgatccccttggaaggtcctggggaagggctgggtggcatttaaggagtgacccagaggagagaaggggacatggatgacctgtggcagggtggtggcctctgaccatcctgcgattcccaccagactaccagcttgactccatgcccagccagctgacccccaaggagccccggctctgcctggtggacgccgcctacttcatcaacaccagctctccctccatgttccggccaggccgcaggctggacctcatcctctccttcgactactccctatctgcgcccttcgaggtaccctggtcaccccaggggaacccctctgcccagccaggccaagctccagaggcgagcagcagggccaytgagcccctgccccacaccgccsgggtcccgaagggaaggagaggtgtcaggccttgatctgctggctcctgccagggtccttaggtgggaaggctggggtggtgcaggggccttgggctcccaggacaggtgaacagggagggacctccccacacctactccaaagaacagctggacggagctgagaggagaccctagcatctccatgtccatcccccagacctcccctgagacgctgtgccaatgtgggtctcctctcggctctgggatttgaacagtccagcaatagcaatccagaattggggttttggggggctgggggatgggtctgaccccacctagagcttttaaccaaacaacattgcagaccaccagagtccttggactccccctgggtctccctccgagtcactctgcagcttggcccgaccacaaacaggacagagccaggctgttgtcttgacactgaagcagctggtgtgggctggaactggcccagcattgacctgggccgggctggttctctccgggccaccttctccccaccaggcactgcagcagacggagctgtactgccgggcccgggggctgcccttcccccgggtggaacccagccctcaggaccagcaccagccaagggaatgccacctcttctcagaccccgcctgccccgaggccccgatcctgctgcacttcccgctggtcaatgcctccttcaaggaccactcagcccccggtgaggcagcccctcccaagcacccaggctgcctggcccctcagaggcctgccctgggccccccggctgcccagcagagggaagggaaatgagtctgccaggagagggcttcaggctaggcccatccaggcccactcaggccttggagcccaccctggcctccttgctgatgcccrcatccctgcaggccctctgtttgcagggtcgctatgcaggggtcccctttgtcatgatgccgggctcctgcagccttccacttgccctagtacccccagctgcccagggctcctctgctctcctgctctgtgggggactcacttggcctctccaccatccttccccagcccaggctgggccccttctcagggagctgggcctctcctcaggggctcccgaaatttaaacccccatcacattccttcctatcttctcttctcaccaactggtcagaattttatttccttctggtgggaaaaactcattgctgcctttgtgcgatattcccagytttccagttcctaccatcattctagatctcccagctttcctctgaacatgctcagcccacatctgagaattctaaagaaccttcatctctcagcaagttctcgctgcccccttgcttccaccgtgagttctaagaatccattcgcaaacccagttgacttcccccttctggctgtttccaccttgcctcgaagcgatgtagagacatgtggggctgcctgaatagcctaaggggtgtcacgccacaaggcaatgaaatatgaaattgtattttctaccaccaaatagtacccatccaaagagcaccctgccacccacatttacattcctgggcaaaggacacagagagctgggaggaaagcaggggcccctccagcgggggcagccctccctgtgcgccgctgccaggctgtagaagcccyggcgtcctgctcctgacacccctcctacccctgggcaggtgtccagcgcagccccgcagagctccagggtggccaagtggatctcaccggggccacctgcccctacaccctgtccaacatgacctacaaggaggaagacttcgagcgcctgctgcrgctcagtgactacaacgtgcagaccagccagggtgccatcctgcaggccctgaggaccgcgctgaagcaccrgactctagaggcgaggcctccaagggcacagacctgaggttgctcagaggctgcaggaccctccagggcctgcgggcataacctgatctgtagctgggctcagccacaggccttcctggttggagttctgggctctcccaggcctgggtggcctctgtagctggtctcactgcccagagggaactgcacacacagacttctctcttacgttcatggctggcttgagatgagttgaaaataacttcgccaggccagtgtgtagaacagctggtccaaccagacagactttcacaccacaattacttccatgcctgagcaggatagatttgaagtgcaagccggaggcagcagatcaggagtagggacaggaaggacaggggatgcctgacctgacaggtggcttcaggcctcgggaatcacaagacatcctgaacacattgcctcctcatcttcttcctgctcctccacctcctcctctccttgtccttctcctctttgtcctcctgctttccgtatccaagtcttgtacttgtttaaatttattcctaaatattttattctttttgataagtggagttactttcttaatttcatttagattattcattgctattttatagaaatacaatggatttttaaatgttgatcttgtattccgcaatcttgctgaagttgtttaccggctctaatacttttgcggatttcttagaattttctgtagacagatcatgccatctccaaatagagatggttttacttcttcctgtctgatctgaatgccttttatttatttttcccaattgccctgagcagtacaatgatgaacacacgtttcaagagcagacatcttgtcttgttcctgactctgacaagaaagcataagtctctcaccatttagtgtgattttagctgtgggtttttcttggacatccttatcaggttgagaaagttctcttttatttctagtttattgagtgttttatgatgaaacggtgttaggttttgtcaagtgatttttctgtgtctatgggcatgatcatgtggttttgtcgtgtattttattaatgtactctattgcattaattggtttttggatattaaaccaactttgcattcctggggcagtttccatttgattatggtatataaacctttttgtttattgctggcacatttctttttctttttctttctttttttttttttttgagacagaatctcatcacactctgtcacccaggccaagttcaatggtgcaatctggctcactgcatcctcaacttcctgggctcaagtgatccttccacttcagcctcccaagtagctgggactacaggcatgtaacaccatacttggctaaattaaaaaaatggttttttgtagagatgaggtctcaccatgttgcccaggctggtcttgaactcctgaactcaagcaatcctcctgcctcagcctcccaaagtgctgggattactggtgtgagccaccacggccagctgctagcacatttcttacctccctcatgcaagggtgcgtgtacacatacacacacacacacacctggccccaggtgggggttgtagtgagagcttcgggacagaccttggctcagggactgccctcatctgatgtcctctctcagcttccttccctgtgcctcttctgcatttggctttattttgattcttcactttttccctttatcatggactcttatttttttaacagtgatatgggaattgactagctgttgtgttttattttatgctgggcattttacattattccccttaattctcacatttgcctaatgtgttaggtagaattaccgtctccttgttatcagtgatgaaactcagggttgggaaaggaacagaacaaagcatcctgtgactcgtctgcaggtccctggtgtccgcctgatgcacacaaacttcacagagcacctgtgtcaggcagggtcaccgcgcccccgtgacgcagcaggacagaatcaaggccactccataaatatgcctgagcatggacaaaaaatgagggcactgtgaaaccataaaaatggccaaacagtgccctctcctgtttcacgtgagagactgcggtttctctaccaggcttttcgtccctcccgttcttccacctcctggataaaaattgtgaagatcctcaattatagactcgccccactccctgacagcacccaatccacagcaacactttgcttccttgaacatttcgtaatgtcaccctacaaacgcccaaatccttcaataagcacccccccaccacacacacacacacacacacacacacacacacttactgagactgcactgcctcctagtatacagtcttcttagtgcaatgggtaccagttaactcaaatttgtttggctactgggctgttcctgctggcctctggctggtaggcgtccacagggattaagtaacttgctaacctcaaaggtggcaaatccaggactggagcttctgacagccacacctctctgtgtctttgggcactgactttgtaacgtgccctattcgtagtttagaattaacctcaccaaagagaggtccagtctctgcccgtggctagtgggaggtgacctctgggtcctggaatgtcctgtctgacaggagtgtctttgtttgctggggggctttggagactaaaggtcggtcacacaggcagcatctgatcaagactcagtaaagtctctgggcaccaaagtctcaggtagactttcctggtggacaacaccctgtgcgtatcctcacacattgcggcccagaggaggcaatgctgtccagaaccccaaagagagaggacacctccctggaagcttgcaactggacccctcccagattctgccctaagcctctcttcctttggctggttttaatttgtatcttttcatgatcataaaactgtaatcataaggttagtgctttcctgagttctgtgagtcaccctagaaaattactgaagctgagggtggttgtaagcacccccaaatttgcagccagctggtctgaagtgaaggtggccctggggactctgaacttgcggctggtggctgaagttggggcagtcttgtggggactgttccctcggactggacagtttggtgacctctgctgcagaggtcaggcgtcccagaagatgtggtggtctggaggactgtgctcccaacctcagggtttggccaactgccggcacggatgctctggagagtgagccggcatggtagaaaaaaaaaaagaccctttccatttggcgaactttcaataaagccagccagacagccaaggagagtgggctgggctgaggctcaaagccacacctggcatgtgagtgtggatgtttatctgtctcatatacccgccccccactagctgctgtcaccccagcccctgactacccaaacacccggaggccctctcagccccaccctgacccgggtgaggaccgtgactccagcagctgtcaggcccccacacaaaggcatctatgtaaatcacacagtgctcttcctgcagcctgtgggcccttcctggggccagctcagagacaggaagacagcaggctgtctgtcaccagtcccaggacaaggctggcgctctgccctctgctcaccacaggctgtggccgggggaaaggcgagcaagatgaactgagagatgctcccttttcctcatcaagttggatttatctccactatgcaagaatgcttttatattagaaaatttacaatttttaaaaacaatgtataaacaaatgagaacaacaatataaaagtaattgcttgataaaattcaacacaaactcggaagttatgaacagctcttaataaattagggcatctgcataacctgatgtagggtaactgtactggttcattttatgtgtcaaattggctgcgctacagtgcccagagatttggtttaaaagtattctaggtgtttctgtgaagggaggtgagcgtttaaattgctggatttggggctgaatgcagtggctcaaaccagtaatctcggcactttgggaggctgaggggagaggatcgcgtgaagccaggagttcaagaccagagtaggcaataaagtgagaccctgtctctataacaataataataattataaataaattagtggattttgagtaaagtagattatcttccaccatgtgggttggcctcaaccaatcagttgaagaccttaatagaacaaaaacggacctccccgcagcaagaaggaattctgttggcagagtgccattggaccccaactacaactcctccctcagtctccagcatgtcaacctgccccatcagactctggactcaccaagcctccaccacgttgagctaattccttacaatacatgtcttggctgggtgcagtggctcacgcctataatcccagtgctttgagaggccaaggtgggtgggtcacctgaggtcaggagtacaagaccagcctggccaacatggtgaaaccctgtctttactaaaaatacaaaaattagccgggcatggtggtgtgtgcctgtaatcccagcttgggaggctgaggcagaagaattgcttgaacccgggaggtggaggttgcagtgagccgagattgcgccattgcactctagcctgggtgacaacagcaaaactccatttcaaaaaacaaaaacaaaaacaaaatgtctctctctcgcttcactcacacacacacacacacacacacacacacacacacacactctctctctctctctctctctctttctcggttctgtttctctgcagagcattgacaaatacagtatatatttgatgaaaaaacaaaacctgtcatcctgaatagtgaagtgaaatcctagattcatttccttacagctaaggaacaagatcaggatgcccactatctctgtttcttgacaatggttttctggagctcaatcagtttctgtgagtcaggaattgaggcatgacttaactggccatctgcaatcaaggtgttggccaggactgacctcgccccgaggctcagctgcggaggcatctgtctccaggctcatgcatgtggctgctggcaggggtcagctcctcgtgggccatgtgtccctaggccaccctccgttccttgccacatgggcctatccacggggtggtcacaatatggcagctggcttcattgatgtgagcaagcaagaagaactctgagaggaggaaacaaaggccaaaattccgtaagagagcaggttcaggggcttaaggaagatggagatccacagaagactctgaaggctgtggcctgaaaggccggtggtggcgagcatgatgaggcgctctggagaggctcccagtattggcagagggtgcggtttgaggagctgttgtcctgtgtgctacctctgagaagccatgttgtcagcaagaggaatgagctcacagaggtgatcccagaagtatgcactcgacattatagtggaaagatctggaggactggacaagctatgatgttaaagggcacaggagtggcaaggaagagggtgacagggcagccagagcccacacaatcagaggtcaaggtcagatggaatctcagggacctttagctctgccatactcatcaatgatgaagacttgggcatttgggatgtgaagtctcttatccaaggtcacacagcaagcccagggcgcgttggacactcactttttgtttgttttttgttagagacagactcttactctattgtccaggctggagtgcagtggcatgatcatagctcactgcagccttgatctcctaggtgcaagtgatgctcctgcctcagcctccagagtacctgggactacaggtgtgcattaccccacctagctaattttattttttgtagagacaggatctcactattttgctcaggttggtctcaaattcctggcctcaagcaatctgctcaccttggcttccttgtgctgggattacaggtgtgagccaccacgcctgtatgacacttactgttttgggcccgctgtg

SEQ ID NO: 94800 - DNA, 152996 bp, Homo sapiens
  misc_feature (1)...(152996): n = A,T,C or G
tacaccgttttgtttactcttagaatagttaggtggttagttgtgtaagtgagagcctctacctagatgctaattagcagcattcttgagttagctattaactgcttaaatggcaagaacagcttctgaggcacaagtgatcttcccatacctgttgtgtctggctttgcataacttcactcttctctgaacctcatttaaatgttactttcctgacccaggggtcctgcttctgatttttgttttttccttctgttacgtgcacagtgatcttaaaagttgtgaagtattgcaacccatactaggatgttttcatatttcctgaacatcgataggaaaactataagactaggccgggtgcggtggctcacgtctgtaataccagggctttgggaggccaaggcaggcggatcattggaggtcaggagttagagagcagcctggccaacatagtgaaaccctgtctctactaaaaatacaaaaaattagctgggcatgatggcacacacctgtaatcccagctacttgggaggctgaggcaggagaatcgcttgaacccgtgaggtggaggttttgcagtgggccaagatcgcgctactgcactccagcctgggcggcagagcaagactccgtctcaagaaaaataaataaataaaaactaagactagggcttcagtctccagattcgttatttggttttgctctagtctgatgatactccttttctggctggcttatacaagagtcattgtggggtataaagtgtggtggagatagtgaggtggctgctaaagatttgtgctgttgccaggtgtggtggctcacgcctctaatcccagctctttgggaggccaaggtgggtggatcacttgaggtcaggagttcgagagcagcctggtcaacatagcaaaaccccgtctctactaataatacaaaaatcaggccggacgccgtggttcatgcctgtaactccagcactttgggaggccaaggtgggtggatcacctgaggtcaggagttggagaccagcttggctaacatggtgaaaccctgtctctactaaaaatataaaaaattagctgggcgttgtggcaggcacctgtaatcccagctactcgggagactgaggcaggagaatcgcttgaactcgggaggtggaagttgcagtgagccgagattgtgccattgcactacagcctgagcaacgagagtgaaactccgtctcaaaattaaaaacaaaacaaacaaaaaaccccaaaaattagccttgcgtggtggcgtgcacttgtaatcccagctacctgggaggctgaggcaggagaattgcttgaacccaggaggcagagattgcagtgagccaagatcatgccagtgcactcaagcccgggtgacaagagtgagactccatctcaaaaaaaaaaaaaaaagaaaagagatttatgctcgtagttattgctgagaaccaaggactgcatttcccagcatcctttgagtctatgtagactcatccttactaccatataggtgagagtgatgtctgccacttctgggccaagtttttggtgaatccactaggccttcccataccttctcatccctttccatggtccccatgggaaccttggagtccccatatagacgatgatggtggcacttgatggaaggtacctgactccctgagttactgtttggaggacagctggcagaggaggaatatccactttggattttgcatgtgcaagagagaagcttttatttggtctggttactgagattttggcatcgtttgttatagtaataagagagttgcaacttaggttttgaaaatctagtccaactgctagaaaattatctcctggggtaggccttaccaagaaagagtcaggctatgggtcatctcatgtcacgaatcattactgttcatagtacatgccaatcatggagcccccctctatgctgctgtgggctaagaaaatagaaatgagatgcttggaccatcagccatcaggttaatactggcttggcgtgggggtgggtggagacattttatcttccttcatggtttcatcagttttggaggctaggtaactttttcaaatgttttatttttattattattttttacataaaatctttcaaaaaataagaggtttggtgctgtaggaaccctatacctgtttggcaagcttttgtttctgggcttttttttttttttttttgagaggaggtctcgctctgttgctcaggctagagtgcagtggcacgatcacagctcactgcagactctacctccctagctcaggtgatcctcccacctcagcctcccaggtagctgggactacaggcacatgccaccacatctggctagttttttgtacagacaaggttttgccttgttgcccaggctggtcttgaactcctgggctcaagcgatccacctaccttggcctcccaaagtgctgggattacaggcatgacccaccgtgcccagccttaggtaactttttcctttggcattaaatgatactgtagtgattgttagtttttatctgacagtgatattgggcttttttttaaacaaaagatatgaaatggtttaaaataaggctagctttagttttccttgccacctttcacgtgagttatgtctggcttctccctctgtggtggtatctctggattctttattagcttgatgcattgtgtggcaaagacagtgttcgccaaacatccatatgttcttccacatttcttcatatcccttgggccctcgtgactagtactggccagtgcgatgtgagcagcagcagcaagcatcactttgggcttaaagcagttaggtgacgcactcctccatctctctgcctctgttgtggcagacttgaagatcggggattaaagatagcaattaagccactgaagccttggggattcgtctgttgtggcagcatagcctagcttatcctgactaatagagcttgtcatgcattctgctaaaaatacctaaatacatctcttttctctttctttccccctcccctcccctcacctcccctcccacagggtcttgctctgtcacctagctggagtgcagtgacacaaacagggctcactgtaacctcaccttcctggactcaagcaatcttcctacctcagcctcctgtttgtgtagctgggactacaggtgcacgccactatgtccagctatttttacttttttttgtagagatggggatctcactatattgcccaggctggtctcgaactcctgggctcaagtgatcctcctgcctcagccttccaaagtgccgggattacaggtgtgacccaccatgcctggcctaaatgtacgtcttgtttcaacttattttagtgggctcagcccacatgtgcatttgctcctgcaagaaggagcctgaaaaatgccttaagacttcttatatcctatggccgggtgtgatggctcacacctgtaatcccagcactttgggaggccgaggcaggcagatcacctgaggccaggagtttgagaccatcctggccaacacggtgaaaccctgtctttcccaaaaaatacaaaaattagccaggcatggtggcccatgcctatagtcccagcttcttgggaggctgaggtaggagaatcacttgaacccaggaggtggaggttgcagtgagctgagattgcgccactgcattccagcctgagcaacagagtgagactctgtctcaaagaacaagaagataacttgctgaatattccttcctcatcattctggagaatgcttaaagttcagaggaagatggacctgtgggagatgttggtttgatggctgtgcagtgatgaaacaggcagccctctgatacagcacatacgttttgcatgccatctacacatggtcaggagactggccacatttatttctagcagagcataggagcgatagttaatttagacattgccatctataagggtaagtaaacatggatgagtaaaatcccccacctagcagttcatgtcagaaagctaggagtcagtgatcccactctctccctcattgtcaaatccaggtagttacttccaaaatgtttctcagatttgcccgcttctctctatatgccctgctactgtcttggtctaagcaccatcttgtctcatccaggttactgtcagtagctttgtaactggtctctcaaagttgggccggtcttgctgcgttcaaatttatgtatctgcctagaggctactgtatcctggtttccgtccccatattagtctattttcacagtgctacaagatagtaactgagactgggtaatttatatacaaaagtggtaattttgttttgttttgagacagggtctcaccctgttgtccaggctggagtgcagtggcacaaccttggctcgccgcaacctccactttcccgggctcaagtgattctccagtcacagcctccagagtagctggcattacaggcatgagccaccaatgtctggctaatttttgtatttttttgtagagatgggcttttgccatgttggccaggttggtcttgaactcctgagctcaagtgatccacctgccatggccccccaaagtgttgggattacaggtgtgagccactgtgcctggccccaaaagaggtttaattgaatcacagtttagcatggctggggagggcttaggaaacttaaaattatggcagaaggggaaggggaggcaaggcacgtcttacatggtggcaggagagagagagagcacaggggaaactgccacttttaaaccatcagatctcatgagaacttcctcactgtcatgagaacagcatgggggaaccgcccccataatccagtcacctcccaccaagtccctccctccacacgtagggattataactcgagatgaggtgtgggggacacagccaaaccatatcagtccccacccccacctgtagtcttcctctgatcaatacctgttcagctttcatatccaagttcttcaagggagcctgcatggactcccctccttctccctgttggcttttgtatgctgaggttttctttcctcacaggcaaaacaattgtgattaaataataattattactttttgagactgagtctctgtcgcccaggctagagtgcagtggcacggtcttggctcactgaaacctccacctcccaggttcaaacgattcacctgcctcagcctcccaagtagttgggattacaggcatatgccaccttgcccggctaatttttgtatttttagtagagatggggtttcaccatgttggccaggctggtctagaactcctgacctcaggtgatctgcttgcctcagcctcccaaagtgctaggattgcaggcataaggcaccgcacccagcccttaaataattattgatttaatgattgatcttctgccagacagcgaactcttcaatggccgggagccaggtatagttttctttgccactgtttgagtgattgctacgaatatctacccagctcctgttaaaaataatcatcagtgggcacagatgacagctggcttctcctgttgagataaagcagatcttatgtggtgccctcaaaagaaatttagaatgcagtttccagtggcatgttgaaaatggtagtcaggccatagatagagtgcacttacgattttattaagaagtaacatccatcctaatgacagatttctaggtctgaacctttctcttcagtggtgcatatctgacagaagagactagaagaactcaaactggacatgctgggatggaagtagtggtttcagttattgctgggaatggaataccggttctttttcttctggtttgtccatattttctatactgtatgttattttctagaatataagtacgatttttactttaagtacagtaggcgattaaagatggcgttgtaactcagaagccttctccctttctccctccctgctggagagagtggccaggcgtgctcaggctagacaaccatgagtgctcccagggacccccggctgcagaagtccatggctggacctcagctgtcttctgttggatttggctgttggcttgtccataggggcccttccctgagcttccttcgtttccatgctgctgttagtgctactgactcagaattgagcctggaactttcctcacgttagttatgtgggccaactttgaaagaagcatttcacctgcagcatttaatggagacattgctgtttgagccttgagtgcattttagagtagatatccgtgggctggtctgctaccttactggctgtgttattatctgttactaggacaaaatgtattttcagttccctgcagtgaacttccaaacrtagttttggaatacgagccataaactgttttaaaagtcttctatgtatctggctttgaaataggtgctgtttcaatcccggccaaataacatggttggaataggactgaactttctgtaaagcaggctggcaaaattcttgtttcccagtaacttgcacaggttttggcaattgcatgtgatgggactggcagaaatgcctggcggttgttggggcttggtttggggagggagagtggttggggagcagaagggagttgagtagtgggtgagtcctggcaggaagtagagctcattcaggaattggggtttgtggcaggccatcccaggggccaggcagaactggacacagatagggaggggaaagagaaggtagagagagacaggagcattcgatgtagataactttccctcttaaattattttatcatggaaaatttcaagcatgtacattacccagctctgacaattattaacatcctgctgttctcatttcttctttacctctatccattccctacctcatacttgattattctttttattttattatttttatatttatttagagatggagtctcactctgtcacccaggctggagtgcagtggcgcgatctcggctcactgaaacctccatctcccaagttcaagcgattctcttccctcagcttcctgagtagctgggattacaggcatacgccaccacacccagctaatttttgtatttttagtagagattgggtttcgccatgttggccaggatggtctcgaactcctgacctcaggtgatccacccgccttggcctcccaaagtgcttggatttcaggcgtgggccactgcacccggccaattattctttttaaacatattaaatgtaaaatgtataggcattgtgatatacaaatctcagctgtacaactttaaaaaatgactaaacctgtctaatgcaacccccatcgcaatatagagaacatttctgtttttccagaaagttccatcatgtcccctctccctcaatcctacctttacccctataaggctatgactgatctgctgtcatctctgtagattagatctgcctttcctagagcttcatctaaatggtctcatacaatatgtattctttggtgtctggctttgttcactcagcatgatgattttgagattcgtccatacagttatatgtatttgtagtttgttcctttctaatattatacaattttattgtaagaatataccggttagtttaggcattctcctattgatgaacgtttgggttgcttctagtttggagttgttaacaaccaaagcagctctgaacatttgcaatttgcaagtctttgtgactttttgtcgaccagtgtttttattcctcttgagtaaatacctatgagtagaatggctggatcaaagggttaagtgtgtgttgaagtatatcagaaacttccaaccctttttctgaagtggttgtaccattttatattcttagcaccaatgtgtgacagtttcagtggcttcacatcgtcaccaacactgtattaccaatcgtgtcaattgtggttcttctcataagggttgtggtggtttctcctcatggttttaatttgcctttccctcatgattaatgatgttgagtacttctccatgtgctttttggacatgcagatatcttcctttgtgaggtgtccattctagccattgacccatttaattgggttgtctgtcatcttattattgaattatgagaggtttttatgttttggatttaagtgctttgtcatatattttgtgaatatttgctcccagactgtggctagcttctccatgtacataatggtggcttttgatgagcagaagctcttcgttttgaagaagtctaatctagaatattattcttttatggttgcctgctctatcttgcctaaggaaccttccaggttgcagttgtgcaggaactcttttatgtgttcttccaaaaactttgtttcggcttttacatttagatctgtgattcatctcaaatgaagtttgacacagttcctcttgacaaaccgagcctgatgccttgaacacgtgggatgccagtcttgccccacgatgagtgcccccaggcactttgagtccagaaggcaggaccactactgcctccttttcgtctcattatccaggaaagtacaggaagtgcaggttatccttgatgcagtggcctttctgccttccggagcaaaaactcccaccagagacctataatgaaaccttctaaacatgtcttctatcattgtgtcacactggccctggtgatacaggtggtgacggagaaagaccatttgctttataggtctgagtttggatttctatcttctcgtttattggctgtgtgagcctggataacttacttaatatctctgagcctcatttaaaaagacccctgtgtagagattcaaagtctgtgccttgaacttagtaagtgttcagtaaatgtcagcaccctcccccacctgcaccactccccttgacccccatcaataaacataccagaaccccagtgtagaatgaaatgtgctttgtgaaataataaattgctgaaacccggtgtgtgaactttttcacaaagtattaagttaatgtttccataatttaaactagtttattggaataactacattaggaaatatatgatacatgccaaagcttgcttttatgtttaaattaatggtatcgatcagtatacatttccatttatcacatttcacttgttagtatatattctttttatacattatttaaaagcagcaaagttatttagttaaataaaaaatgcagggctcagatcccttgggcagttatcatgtagtggggttgctttatatgcctgcaggttgtaaggaaagttttcaaaattctgaggttgaagattgcatcctaaccccattccttgtcctgtgcagaggaacgcaaacttgtgccacttgattttgaggtgttttgtcatgtagtagtagtaatcagaatataataaaatatctctgcatcttatcgacaatgcttactaatgcaccaggatatcctaatgccagccatgttgcatcagcccagttctagccatacaagataccttgtatggccattaatattgagagtaaaagaaatgtagaataaatgggacaaaaaggaaatgaaaattgttgatattgtaaaagtgcttcattggtctccagtaaatcccaccaaatattttggttgagctggaagcaaagaccattttgatgttcacaatgattgtcattggctctcacaaggctaaagttttaagacttgttagatgagtttattttaaaaatgtgttatctgggccaggtgtggtggctcatgcctgtaatcccagccctttgggaggctgaggcaggcggatcacttgaggtcatgagtttgagaccagcctaaccgccatgatgaaaccccatctctactaaaaatacaaaaattagccaggcgtggtggcgcatgcctgtrataccagctgctcgggaggctgaggcaggagaatcgcttgaacgtgggaggcagaggttgcagtgagccgagatcatgccactgcactccagcctgggcaacagagtgagattccatctcaaaaaaaaaaaaaaaagtattatctatcctgagaatgagaatactgcatccaatgtgcttatcattgctaagaagcaaatagataagtttttgtaaagcactgtctggctatggagtgcttgatgcagatcataaactctgcacatcccttctcaaaggaccacctacgaaaaaggaaattggtacatgaaaaaaaggaaattagaaggggcaagttccaagcaacatggcccctgtatctagcaatgagtcaccactcccacaggctatggggacagatactgctgaggaagcgtaggggacagatactgctgaggaaacgtagagcacagaatgggtgaaatcagcagccaggcagaagtccggatgcttagtgatgatctttaaggagctgttgattttgttaaggaaagagtgtattattgtgggaggagtatatgtaaaagcgatggttccctcgagccggctgacattcattttaacaagacctaattaagaaatgcaggggctacttactgtgatttttgtcacagtaacaggaaagctcagcggtgcccttgtcagggtctgcagcgtgtggctggagtacatcaaactctgcaccactctagaattgcgcacagtttgaaggtgatgtgtgacacagaccttttgaaagaagaggttgctatctgctggtcagaaaaggcttctcagaatgtgtctccaaaaattttgctacagagagtcatgttaaagcgttccctttagaaaagggttgaggaaagctgaagaggaatcttcagatgacgaagatgaaaataatgggatggtggccaggcgtggtggctcaagcctgtaatcccagcactttggggggccgaggcaggtggatcacttgaggtcaggagttcaagaccagtctggccaacatggcgaaaccctgtctctactaaaaatacaaaaattagcctggcgtggtggtgcacacctgtagtcccagctactcaggaagctaaggcacaagaatcgcttgaacctgggagatggaggttgcagtgagctgagatcatgccactgcactccagcctgggcaacagagcaagactccatctcaaaaaaaaaaaaaaaaaattggggtgatgtgttcactggctgccagggaacccagagttggagctgtgaagggtgtgacagcaaggatgatgacaatgatatcaatacccatgtatttttatttttttagagatggggtctcactctgtcacctaagctggagtgcagtggcacaatcatagctcactgcagtttcaaagtcctgggctcaagcgatcctcttgcctcagcctcctaagtaacaatattgatagcatttaaagtgatgaatgcagtctagcttgcagtatcatgctgcatatttttctgtattgtcagatggaagaacaatatgtatttgcaaaagatgaagtggcttaactcatgctataatgtatattgcaaatatttcactttgagtggtctcaaattaagcccattgagcccattcacctcagtgagtaaaacgtagttggcatatatgtgctgcatttcttttggaaaaactggtagtagacacatctcaatcacacttacatagttgaaaaaaaaacaaaagatttactttcagtcattcttacaaaaaaatttgatactgggaagcaaaagataggccaggtagtttcctgatgtcctcacgcctcccctccttcctcctagttaaaactcgatcccccaggcaacgagtaccactcactatgacacttggtaaggacttgctgatgtcctaacactgaattggtatattggctccttcttatgagattggaaaataagatttaagtgacacttcaagctgggtgcggtggctcatgcctgtaatcccagcactttgggaggccgaggtgggcagatcacttgaggtcaggagctgaagaccagcctggccaacatgggaaaccccgtgtctactaaaaatacaaaaattagccaggcatggtggtgcatgcctataatcccagctactcaggaggctgaggcaggagaatcacttgaacccaggaggtggaggttgcagtgagccaagattgcaccactgcactccagcctgggcgacagagcaagactccatctcaaaacaaacaaacaaaacacttcacaactttcttcactgacttgacctgagtatgttggaaataagcagcagtggataagtaagatctaaattatggtaggagttaggagaggtgccttctgtccagtatatctgggctttttttttttttaaaggtagcttttaggtagctagtgttgtcatatgtccaatccaatttttgttttgaagtctttggccaaaaacttattctgaagtctagcgcttttcattttgacaaagccagtcttacttactttcataatttcttttttttctgcagggagttagatagacttaaggataacctggtatatatttaaagactggtatgagccagtacagtcacagaattactatatggtaaatcatttgccatcatatcactttgttgactaatgctttgcttcagaaatcagatacttttaaaccacactagaaaattatagttttatgtattacccataaaacatttagcaaaaatagtattcaagatagtgttcaaaagttttcaacgaactaaagtcctatgcatcatctttcttatttaacactagcgtgtttcaaggtccttgtaattgacctcctgcttgaggtcattgtaactggtttttaaattacactttcctgctaagcatagatttcaactggaaccttggctttttgcaaatccttgatgtagtatctctctccctcctcctctctctctctcttaaaaagacagagtctcattatgttgcccagactggacttgaacttctaggttcaagtgctcctcttgcctcagcctccagagtagctgggacttcaggcacacgccaccatgcctggtatcacttcttaaagtttgctaaaccaagataggtagggtgggtgtgtgtgcctgcctcagggtcagaaaagatggtttatatgatatgtgttttttttttccctgaagctggcctgcgtcagtaggaactgaaaggtaatggttgctaggagcacagggtgtatttgggaatgaaaatctgaattttatctcttcctttttatctgtgatctttttgcttaagatttagcctgatatataaatttgttttgcccccaggtagctcagttttacacagtgtgtcaggaatgtactaagcctcatgagggcatcggggaacacaggacttggggttggaaaagctgattttgagccctgacttgttcatgctgtacttgagcgaccttgggcgagtctgttaacctctttgcacttcatttttctacctgcttagtgaagccagtgcttgccctgcctgcctgctggggttctgaaattcaactgagaagtctgtggaagtgttttgtaaatggcaaagcatgtgaccacggtgatgatgaaaggttttaggtaactggtgctctctttagggataaagcccttttttctttgtatagaataaaagttccaatctggtgttttattacaattaacaatttataaatcagatgctaaattcgtgttttaggaattctgaaaataagccagttgcatactattttggtataaatcctcaaagtgaacttagtctactggcctgagtgacaaatgtcaggcaaaaattccaactttagattcgaggcagttttcctattgaacatgaattgctcagaattttttttttttttttttttgagtagcagtattaatatgtcctgttttcattgacagtgaaaagtctctcccaatccttggtaggccggtgggtcccagcacagaatgttgagaaggcaaagaagggaggacttcatgtcacttgatcaaaatggaatcttggcaacaagttcctctgccacgttcaaggttgcctgtgaaaatgggctgtgtgacttcgggactactgtccctatcctcccttctgccccgttccgctattcccctttgtctgtttctatttgcttccttgcctttattaactaattataacagtcaccatggccttggaattaatatctatgttgctactttttcataacatcactatgaaacatgtaattttaaaaaaaatcttttgagacagagtttcgctcttgtcatccaggctggggtacagtggtgcaaccttggctcactgcaaccgcctcctcccaggttcaagtgattctcctgcctcagcctcccgagtagctgggattacaggcgcccaccccacacccagctaattttttgtatttttagtagagacgggatttcaccacgttgggtaggctggtctcaaactactgayctgaggtgatccacccacctccgcctcccaaagtgctgggattacaggcgtgagccaccgcgcccggcctgaaacatataatttttaatgtagataagtaagagtccaggaagcaatcctataggcagaatgtctaatttactcagctgcagtggcgcattatcttgactctaagcaaatgtctttggggagtggaattacccatttgagagaaattgatgaggctgggttgtagagtgtttcctcagtatagacgtgcatcctttcattagtagatgacctctaaagggtaaatttgactctgagagtctcctgctaaaaaactctcttgattatttaaaaatatttttaggtgagacattgatactatggttatttttttctttgagttctcatcttttagtgatatatcctgaaatattgggggataaaacaacgtggtgtctggtgggatttattttaaaataacacagggagggaggggtggatgttgcggatggtagtaaagatgaaacaaagccggccttgagttgatcgttgttgaggtgggaggtatggagatttcattatactattctgtctactttttatgtatatttgtagttctgcataataaaaagttttaaagaggccaggagcagtggctcacagctgtaatcctagcactctaagaggccgaggtgggaggattgcctgagcccaggagttcaagaccaccctgggcaacagagtgagaccccatctctgtttaaaaaaaaaaaaaaaagtagccaggtgcagtggctaacgcctgtaatcccagcactttgggaggctgaggtgggcggatcgcttgaggtcaggagtttgagaccagcctggccaacgtggtgaaaccccatctctgctaaaaatacgacaaaattagccgggcatggtggcacatgcctgtagtcccagctactctggaggccaaggcacaagaatagcttgagcctgggaggtggaggttgcagtgagccgagatcgtacccatgcatttttgagactctgtctcaaaaataaataagtaagtaaaaataaaaagttaaaaaacccaaccataggtttcccattgcctcaaggaaggtccagccctccacctccaggctcgttttctggggtattgtggccccaggaagtgatatgtgggtggccttcacacttacaccctggcttgctgctggccccttgcactagctggcttctgttaatgcaccgctctttccttccctttgatcccccatatcctcatcccatttgcctgcctgactcttacagagcctcaggtcatggacagtatcccttcctccaggcattctgtgattgccctccgctcaggtgtggattatgtgccctcctgggggtgctctgttcactgtttcccttattttggctgccctcatggtgatcctaaccatccccttccttctggttacccacattgtattgtagttggttttttcttttgaggaaagtgattatgccctgttgacacttctatccctggcacccatcagaatcctgccatacagcaggcaatccataaataagagaataaagggcccactctggggcttagtggcacttggcctcaggttcccagcgcctctctacagagctagcggtgtctggtgctgatatgctgcctgcctgccttcatgtttcttcacgcccttgttcaactggcctctgttgtgtcccatcgggattttgagtgactttctagaagtcacagcagtgcgagcatgagtttggacactacattcctatatctccactgcacatggtaaggaagctcccatcaaacttggaactcttacatcctctagaatgttttgagttttaaaacggtgccccatactactaagcgtaatttaaacatgctcattattcatgtaataagttgctcctctgttttgaataggtctctattacagggtgcaactccagggtgcattttattttttttttttttttagtttatgagacaaggtcttactctgtcacttaggctggagagcagtggcatgatcacagctcactgcaacctcgacctcccagtctccagccatccacccaccttagcctcctgaataactgggactacaggcacgcaccaccacacccggctaattttttgtattttttatagagatggggtttcgccatgttgtccaggctggtcttgaactgctgagctcaagcattctgcccacctcggccaactaaagtgttgggattacaggcatgagccactgcgcccagccagggcacgttatatgttgttaagttgatggtagacatgtgagccaggagctatgacaggactgtttattgcagcagtgtgaaataggaaatgaataaaaatctgtcacaacagaattctatacagaagcgaaaacgtatgaactggagctaaacgcacaaattggttgaatgccaccaaaaaatagcaagctgaagaatacatacaatgcaataccatttatatgaagttcaaagacatgcaaaactgagcaatatactgttaaggaatttttgtatgtatgtgtgtgtgtgtgtgtgtgtgtgtgtgtgtgtgtgtgtgtgtgtataatgcctatacatgcctgtacgtattgtcttagtctgtttggactgctgtaacataatgcctgggcatggcttctaaacaacagaaatttatttatttatttagagacagagtctcactctgttgcccaggctggagtgcagtggcacgatctgagttcactgcaacctctgcctcccaggtacaagcgattctcctgccttagcctcccgagtagctgggattacaggcacctgccaccacgcccaactaatttttgtatttttagtagagacggggtttcactatgttggacaggctggtctcgaactcctgacctcaggtggtccacctgccttggcctcccaaggtgctaggactacaggcatgagccactgcacccagccagaaatttatttctcataattatggagactaggaagtccaacatcaaggtggcggcagactcattgtctggtgaggacctgctttctagttcacagacaggaccttctccctgtgtcctggaatgatgaaagggggaaagcagctccccggagtctcttttataagtgcactaatccaatttatgaggcctccatcctcatgacctaatcacctcccaaaggcctcatcttcaggtaccatcatattgggggataggtttcaacacatgaaccttgaggggacacaaacgttcattctatagcgcacacacacgtgcgtggaactgacaaatacatagatccggacagaaatgctctctgggcaggagggaggagatgtgatcagggaggggcacatgggaccctgagtgcaggtaaccctctgacttgggctgcacagaaggtacatggtttttcgttgcattatactttatgcctcatatataagctaaatatattcttcagatgtgtgatatgtcataacaaaaataacattaaaaatccatcagcaagttctaagtgaggttacattcccagcactttgaagaagaaagaggattaaaaaaaattcttactgcatttcttccacagttcatagggtaattttaatcaaatcattccttactttacctaacaggctgatgacagaaatacacattgctatagctcctcrctggtgatcaccagtgagtagatgaagtagacagatcatctcccctaatcctgtcctctccttgttcattgcagatgttgctgtggtagacatgagcgatgtctccagacagccttccctcttctaccatcttggagtccgagaaagctttgacatggccaataatgtgatcttgtaccatgacaccgatgccgacactgctctctctttgaaggtacagtgtattcaccttctcctgagtactttgttttgggaaagcagaattatatgtctagctgaaatgccacagtagcacaggaagttggagaaaaacaaagacttgcttgtgcaattctttccttcccaccacagattctagttcacacagatgacttcctggctacttcgtgagcatctgtgctacagtcgtacgtttgcaggcaacttgggcatttccgggctcgttagggaagtggaggcaaacactcctattagtttccattgaagcaaacacactgtcccgaattccttcatgagcaattggatccaaacctacacataaaaatcagttctgaattccttcatgagcaattggatccaaacctacacataaaaatcagttctcaacttggataataatatgaagacattgaacagttaccgaaatggacagaatattttagtatagacacaattagtctttgatgttattttcccccagtctgaaagcaaagcaaaactgaaaacgtgtgtgttcctgcacaactcaatcatggttgagaatttctaaaatgtatttttgcaagtttgagacaagcttttttgggtaacatagtatttttttaaaaaatgcttgcatttgtatagtggaaatgtttaacatgagttattccaaaattcagtggatattgatattgttgaatattttagtcagaaaatcctggcctatgttaaatcattttaggaataatgaattagtttgtttatagcagtgcttctcggccttgagtgcacttcagaattactgggagagcttgtaaatatccccatgcctaggccccaccccagaccaattacatcacagtctcggggatgggggttgggaccaaggcacggagatttttttaacctcccaaatgtgcaaccatgggtgagaaccaatggtttggagagtcagccttcacagacatcatttctaaaggttcagttccctcagtattaaaaatcactggtagatagtagtacaattttatgccaaagttggacattttcattgtgtttcttgagatttaatattaactagattttctgggttgtgtaaggatttgagattatttcctggtagaaataccacctgcttgagatgtgtaacttgtatgtgctaaacatcatatatactttacatagatatgtactcagtaattatggcaaaatactgtattttaataagtcatttgtatgacagtgaaagaagaaacttttattagtgtactttacattgtagaatagtttccccagggctataaaccaatgtgaattacattagatagttagatattgaccttttcttttactgattttcaccaaggtagctatgcttaggaatatttagaacttagcaagtatgaaagatatagattattaacctatattttgatgaaaaacatgaaattagaatttttttttcaatttaggacagtttcttcaactgtgccttagcaaagccctctggaaagttcaatggactagatgttttaatttttaataatacagaaaaatatttcctaaaatggaaatgggtagtcagttatatttaacaccagaagaagcagtttgcacttgttatcaggaaataaaaatctgagaatatataaaacatgttttacagggcagctgtttagttatggtgttttctccgcccttccccccccccacccccagaaatgttggtgcgtaaatgagacagtcaaaggctgcctaattatcatactaaatttactgactagaattgttgtcattgaatttgaacattcctagacagttgtagcagggtgtcaggaattctactaccaacaccccttctgtaggaaggctgactgtggtgtggccttcacattgattgattcaggaagtggttccagatccggggatagcacggtgccttctgggccctttcttgctatcgccgacattcttttctgggaaggcaagatgcagggcactcagcaccccaaacttgaagctcaaaatatcttttgggcaaaagcattggccctgttctggggaaatccttataaatgccccctaatagttccagagactaaccagtggtgatcaattttctttggaatatcaatgttgcaattcagaggttcattgtgtttgaagcttttggagagggaggtttcacatgattaattcttgctctaaggtgggtgcttttatgtgattaattcttacatgattaatttcttttatagaggggagtgctggctaatgcttatggaaattagctgttttacaaaaagctatattcatcttttctttttcttttcaggacatggtaactcaaaaaaacacagtaagtattaacattttcagaattttaattctgaaattaaatgtaaatgtcaatttgtaaaatgcttgcctgaaaatcgcccaggtagcaagatgacttctaatcacgcctgtgggttgtgtttctaaggaggacagctagaaatctccctatgcctcaaccggccggccccaggccccactcagccattgaggcagtgggccagaaggcaaggcaaggccaggcaagaaagtgtatgttcttcattacctgctgggactttgagctgtaaccttctgggtgactccttctgatctgggtcgatgttccatggaccaccagtaatckttttgctggagtcaatacctcccatacttcccaagcagagtttccctaatgatggaggaacgtgaagttgtatgccagttaatatggggcaaaagtttcttgccacaaacggaaaagaagtgggatggaattctacttccttstgtcccatttatgtactgaagtctcctgatttggcttaaaagttcctgaaattacatagttttattgccacgttggtttgaatagtataatgaaatcaccaccctaaaaatgttttaaaaggatcttggccttggaaatgttgccaaggttatcctgtrcccttgagtgcactccaagctgcccatccctccagacctatggcattgtggtttgagaaaccgtgacctagactcaggacaggcccttggtcccccaccttacagccttagtctccttcctgctagctcttctagaaggaacaggcctacagactctcttcctattccagttggagttcctaggagagggagaaaagggcccaggaggcaaagctttcccctgggcgccctctgcagaagtccccaacctgcagcttgggggcccaggcttccccaggaccctgacagagctccccacctgagacataagtttcagaaacagagcacgtggtatagtgcacgtgattactattggagcatgaattttacaagcaggcctgtaagataaggcatccggtggttttagattccttttggaacagaaatgggatcaggtgtgactttttttggtcccaattaaaaggcgaagttggccacttggaaggggctttcccggtcttcccaggggttgaacttttttttttttttttttttttttttttttgagacagagtctcgctctgtcagccaggctgaagtgcagtggtgtgatcttggctcactgcaacctctgcctccagggttcaagcgattctcctgtctcagcctcctgagtagctgggattataggcgcctaccaccacgcctggctaatttttgtacttttagtagagacatggtttcccaatgttggccaggctggtcttgaactcctgacctcaagtgatctgcctgccttggcctcctaaagtgctgagattacaggcgtgagccacctcacccagccttgatttttaaaattacctaatttgtggagaaatggggaagaagtcgaaggagattgggcctgaggcccaggaggtgcagttgtagccgcagccctgtctctaagtaacactgggcagtcagttgttccacccctgcctaggcctcaggatcctcagcaataaaatgagaaatgttgaactgtgctgttttgctcattgataccttctagccctcaacatctgtagttccatatttgttatacaagcaaaaagatgtaacctggatttaatgcaagaaatggctatgaaatgctgattccttaaaacagcaagagttacgttgaggcaaggagcaaggaagacaactcgttttctttctccattcctcactgttggatgcatcagtactcagaaatagtctctcgtcccggagacttggtgtcacgctgttacaattccactacatacctccctcctggtgcattctccctcttccaaaacatccaggaattccttaacattcttagtaattccaagtataccttggcactattcttcctaggtatctgtttgctttttaggaataaacttactctaaagcagcggtccccaaccttttcatcaccagggactggtttcatggaagacaatttttccacagaccagaggtgggggatggtttcaggatgaaactgcttgacctcagattatcaggcattagattctcgtaaggagcacgcagcctagatcgctcacatgtgcagttcacaatagggtttgcactcctgtaagaatctaatgtcaccaatgatctgacaggaggtggagttcagacaataatgcttgctcacccaccactcacctcctgctatgtggcctggttcctaacaggccactgaccggtactggtccatggccccgggggttggggacccctgctctaaaggatttggcagctaatctctttgctatatttggcattatgttagaatttggtgcccagtattggttgtcatgcttggcaagatgtgaaaatttagagcactcagaagactaaaaggatcccaggtgatgggatgagtggaaaattgcactaagaggaaaagctaaagggaactaagccttgaggggtaccattagtagtcatcttcaaatgctatcctctttctgaaagaaaagagacgtttactttttccactccagatgggatggaagtagggtaaacagaaaaatggtttggatcagcagaatggacatcttgcaactaatggtggttaaacattaaaatagaatgtcaaagtaacttgggtggcttctaaggagaatttgctcaattgtcccctccatgtggattggggtgaccctggaatcagacacctggatcatacgaccccagagattccaagacagaatctgatggaattgtgggtttatgatcattttggaaagattttgattaacacacacacacacacacacactcatagttagtgaacagtgaagtcttataaataaggggtacgaattagatgccacaccctgaacatgtagccaggtgtttgaaatgatttctgaatatgtgaaaaccaagatgcattgagatctcttttcaaggagtcatttgatatttctaaaattgtacttttacccagaaagggagatggaaaaataaaaagtaataaaataataataacaaagataaaattgtgcttgatgatgtattgaattcagctttatgtggcagcgaagtgggcacatttatctccatttcttttttttttttttttttgagatggagtcttgccctgtagcccaggctggagtgcagtggcatgatcttggctcactgcaacctctgcctcccaggtttgagtgattcttctgcctcagcctcccgagtacctgggaatacaggcatgtgccaccatgaccggctaatttttgtattttttttttttttagtagagacagggtttcaccatgttggccaggctggtctcaaactcctggcctcagatgatccgcccgcgttggcctcccaaagagctgggattacagatcacgttgcctggccatttgtctccatttctaggagcagttgctttgcagggatgccgaggccaggaagccaaactccagacttcagggtggaccacctgcagctcttctgggtttctttgctctttggaaacatggtatcaccttttgtgttcacctctttttcagatgatgctcatattcttgtgttctggttttgttttgtttttttgaaatgctttatgtaggtataatttacataccacaaaatgtacctagtttaagcacacacaattcaatgatttttaataaatgacataattgtgcagccagttgtgggttgtgtaccacagtctagttttagagcatttccctgaccccaaaatgcttatttgcagacaatctctcttcccacacccagccccaggaagaactaatctgctttttgtcttatagacttgccttttcaagacttctcatgtgaaaggaaccatacaatatgtgatcttttgcatctggcttctatcacttaggatgatgttttcgaagatcatccttaatgcactaggatcatggatgcatggatcagtagttctttcctttttattactgaatggtattctactgtatagatattccacattttatccattccctagtagatggatttttggatcgtttctactttctggctattatgaataataccactgtgaatattcgagtgcaaatctttgtgtgggcacatktttttwttcctcttggatacatacctaggaatggaattgccaagtcatatggtaaatataggctttttttttttttttttgagctggaatctcactctgtcgcccaggctggagtgcaatggcgcgatttcggctcacggcaacttctgtctcccgggttcaagtgattctcctgcctcagcctcctgagtagctgggattataggcgcccaccaccacgcctggctaattttttttgtatttttagtagagatgcgatttcatcatattggacaggctgatctcgaactcctgacctcaagtgatccacctgcctcagcctcccaaagtgctgggattacaggtgtgagccaccgtgcctggctggtaaatatacctttaatttcttaagaaactgtcaaaacaattccaaagtggctgtaccattttacatttccaccagcagtgagaggtccagtatcttcacatccttgccaatacttgatatcatctgtctttttattatagccattctagtgagtatgaactgatacctgagtgtacttttagtttgcatttccctagtggctaataatgttgagcatcttttcatgtgctgattggtcattcatagtcttctttggtgaaatgtctgttcaaatcttttgcccgtttaaaattgggctgtgttcttattacgaagctgtgtaagagttctctatacattttggaagcaaggcccttattagaggttttatcaattatttcttttatggatcgtgcttttggtatatctgtgaactcttagcccaaaccaaggtcatgaagtatgactcctatgttttcttttagaagttttatagttttagctcttacatttaggtctctgatccattttgagttaatttttttgtctggtgtgaggtagatgtccaacttcattctttctcatttggatccctagttgtcccagcactgtttcttaaaaaaaagaaaaaaaaaaactgtcttgtcatctttgaatcatctttccaccctcgtcaaaatcaattgactgtatacgtaagggtttatttttggactctcaattatactccattgacatatgtgtctactcttatgctaataccacactggtttaaaactttttttttttttttttttttgagacaagttctcgctctgtcacccaggctggagtgcagtggtgcgatcatggctcactacagccttgacttcccctggttcaggtactccttccacctcaacctcccgagtgcctggaattataggtgtgcaccaccacgcccagctaatttttttattttttgtagagatggggttttgccatgttgcccaggctggtctcaaactcctgggctcgagcagtctgcccacctcagcctcccaaagtgctgggattacaggcatgagccaccatacccagcccttttttttttttttgagacagagtttcactccagcccaggctggagtgcacaggctccgctcactgcaacctctgcctcccgggttcaagcaattctcctgcctcagcctcctgagtagctgggatcacaggtgcccgctaccacgcacggctaatttttttttttttttttttttttaagtagagaccgggttttgcagtgttggccaggctgatctcgaactcctgacctcaggtgatccacctgccttggcctccaaaagtgctggaattacaggcacaagccaccgtgcctggcccgcacccggccctttttaaaaaatttatttttctttgttttttgttttgttttgagacagggtcttactctgtcaccgcagctgtggtgcagtagtgcaatcacagctcactgcagtctgcactattttgattactatagctttgtagtaatttttgaaatttggaagtgcgaatcctctaactttgttctttttcaacattgttttggccatttggggcctctcaaagttccatatgaatttgaggatcagcttttccatttctggagaaaaaaaaagccattgaatattgataaggattgcatcgtatctgtagattgcttggctggtattgacatcttaatagttttaagtctactaatctgtgaatgtgggatgtctttccatttatttaggtcttctttaatttatttcagcaatattttgtagttttccatgtacaggtctttcactttcttggttacacttactcctgtgtattttattcttttggatactcttgygaatggaattgttttcttaatttctttttcaaggttgactttaaaaaaacacctgtcacaaaaatcttcaacactacatttcacttcatatttcagtatttgattgagttgaaaatgtaattgactttttggtcagagttctatacaaatggcttctggtttttcctgtattttcatccattttaattcttacactattttatactgctttggagatgacagagatagccactttctgcagtttatcactttagagaaaacatgtttatatggtgacagatcaaggctgtctttatgaaagtaaaagagtgaaaatacagccaaccccaaggctactttatctgtttaaccttggaacttcctagtactttgccactagtgtacatagtccataggcattgcgtagcttcatttgttttaattttccttagcaaggataatcatacctttatacttacagcttattttgcaggttgatttcctctagactcagactctgaggctgagtttagggtacaggaggtttattaagggatgcctttgggatggctgctggggaaggggagtaaatgaagcgggactggccagagggagacatgcagctgagatgcaggctcaatgacagctttggctgaccacattgggagggaggtctggagctgaaatggcctttctgagttgtcttgggttgggatgaaatggccaggcctctatgttcctccatttgtccttcatcactaggaatgtagcttggatgagatactctctggaactgacacagttcagaagggactaacagtaaggggctgcttcctaacgagctcccagaaactggggcaacacatccttccttgaggttgggttggggggttctgggtagtatacctgcatatccaccacattataattatttcatttgagaaatgtgtgtatgtatgtgtgtcatatataccccaagactaagaaatacatttccaaggcttagaggtactgctataatttttttccactgaattggtgggtaaattacctgaaagctgtgcatagccttgctagagaggcaccatggagacaagcaccttctctgtccccaggagaattactgggagaaaacaaggtgttctacccaacacttgcagaaggaattgttaaaagtacattggactttattttcatttgtcatgtcctaaagccagagttcacagttgtttttttaaaaagcagagttaaatttccaagctaagatcacattattaaaaaaaaaaaaaccttattaaaaaacacgttattaaaaaactaatctggttcttgacctctggtttaggtgattttttttttctggaaagccagtgagatttaagagaaactcattgttgccattaaaatggttatctttataatccaaataaattagaaattctttgaaaaacagacactggcaatattggagacagtgtcttcaatactcgaagtctctcctctggcttaggaacatgtgtaggtctcggtcagggtaacaatttctcctgtttttttcctcttgccattctcaggccttcagtttcctatggcttaggactcaaaatgatcaaagatgatatggattgcttagggacgctttggtagaaagacaattaagtttcttttctcttttctgtatcctttggattttctgagttcaaaagatttctagtacttttattagcaaagactcaatttcaaacaagaaagctacatctcataatagggagaattttatttactcacagaannnnnnnnnnnnnnnnnnnnnnnnnnnnnnnnnnnnnnnnnnnnnnnnnnnnnnnnnnnnnnnnnnnnnnnnnnnnnnnnnnnnnnnnnnnnnnnnnnnnnnnnnnnnnnnnnnnnnnnnnnnnnnnnnnnnnnnnnnnnnnnnnnnnnnnnnnnnnnnnnnnnnnnnnnnnnnnnnnnnnnnnnnnnnnnnnnnnnnnnnnnnnnnnnnnnnnnnnnnnnnnnnnnnnnnnnnnnnnnnnnnnnnnnnnnnnnnnnnnnnnnnnnnnnnnnnnnnnnnnnnnnnnnnnnnnnnnnnnnnnnnnnnnnnnnnnnnnnnnnnnnnnnnnnnnnnnnnnnnnnnnnnnnnnnnnnnnnnnnnnnnnnnnnnnnnnnnnnnnnnnnnnnnnnnnnnnnnnnnnnnnnnnnnnnnnnnnnnnnnnnnnnnnnnnnnnnnnnnnnnnnnnnnnnnnnnnnnnnnnnnnnnnnnnnnnnnnnnnnnnnnnnnnnnnnnnnnnnnnnnnnnnnnnnnnnnnnnnnnnnnnnnnnnnnnnnnnnnnnnnnnnnnnnnnnnnnnnnnnnnnnnnnnnnnnnnnnnnnnnnnnnnnnnnnnnnnnnnnnnnnnnnnnnnnnnnnnnnnnnnnnnnnnnnnnnnnnnnnnnnnnnnnnnnnnnnnnnnnnnnnnnnnnnnnnnnnnnnnnnnnnnnnnnnnnnnnnnnnnnnnnnnnnnnnnnnnnnnnnnnnnnnnnnnnnnnnnnnnnnnnnnnnnnnnnnnnnnnnnnnnnnnnnnnnnnnnnnnnnnnnnnnnnnnnnnnnnnnnnnnnnnnnnnnnnnnnnnnnnnnnnnnnnnnnnnnnnnnnnnnnnnnnnnnnnnnnnnnnnnnnnnnnnnnnnnnnnnnnnnnnnnnnnnnnnnnnnnnnnnnnnnnnnnnnnnnnnnnnnnnnnnnnnnnnnnnnnnnnnnnnnnnnnnnnnnnnnnnnnnnnnnntctctccctgtccttccctctctctctctgtctccctgtccttccctctctctctctctctctctctccctgtccttccctctctctctctccctctctccccatccctccctccctctccctctctccccccgtccctccctccctctttcttctccctctccttcttttcttccttcattcctttttcttttcttttctcttttcttttccccttcttttcttctttttttttttttttctaacactcttgctctgttgcccaggcaggagtgcagtggcatgatcttggctcattgcaacctccacctcccaggttcaagcgattctcctgcctcagcctcctgagtagctgggattataggtgcccaccaccatgcccggctaatttttgtgtttttagtagagatggggtttaaccctgttggccaggctggtcttgaactcctgagctcagatgatctgcctgccttggccttggcctcccaaagtgccggggttacaggcatgagccaccatgcccagcccctttgcatatttattttatttttgtatgttctgttatttctgcctcatcttaggttgttagtctttttgtctttttgttgttgttgttgttgttgttcctgcctgtggtcttggtcctgtgtgttctcttcaattggagtactctgggtctgtgaaccataaaacttttctctgcacctcttgaatatcagaggggtaatgtcagatttcacagggccaatgtcagaaccaaattattcatatttaattctacctgccaactggatatgtctttcatatccatggcacccatctattttctttaaatcgagacataattcacagaccatagaatttgccattcactcatctgcttatgttgagttctttgtacagctttatttaaggatatttcagaattaagcagaagtggcagttaatgactagaatcctgggaggacaggggtagggcctgagattatctggctccgtggtcatctgtaggccagttggttaacctgctgggtcttggtttcttcctctgttaaatgagatgattttaatgaggtgacttttgagatttgtgccagctctgaaataatcctgtgactttgtgatggccattcagttgtgtaaacaaagtaaatcaactgtcacaacaggttaattagcactccatggcacgtttccagcagggatatcttcgtttacttttaagtggcaccgtatcctgattatcctgttgaaattgttatacagtttctgaatatttttttcctcctatgaccagataattagagaaaaggagtagtgtagaatgctatttgcgttgctctaaaaagaaaaccactgcatttttctggacaatgtatatatgtatgtatctagctggctagacaaataattatatctgttgagcctaaagcttatcttttttggagttgtgtcaacttggattttcttctacaataaattaactttgtcatacctggtcacatgaaataatataaaaaatccattgccccgtatttgttcatttgctccctaaattttcctgggaacaatcttctgtgttttttcagttgcggttttcactaagtatttgtgacccacttgtgttaaaagatataagctccaaagtatcacattgtgccaccagttgagatgtgcattcttctgaaagtgctcagaaatcagttcatcttgagtagtgttaagtggctttctatctgccttagatactttatttccctcttctcacttggccatttgttgactgattaaatgtttgtatcattataaaagatgttttctggaaggccaagccacaagtctcattatgaagttcgctggtacaaactcagacatatcatatttgctgcaaagaattaatttataaaccctgtgctgctgttgaccagctttgccacctgctgtgagccataaataaaaataagtgctggtgtaatgagggaccttggcttgtatatctttcttggccttcttggacctttggatgccttgcatggggtgcctgcggaaaagaaggaaaatatagccaaccccaaggctactttatctattaaaccttggaattttttagtagtttgccattagcgtacatagtccacaggtattgcgtagcttcatttgttttaatattccagctgtggaggagccagctgaggagcaaatcctaggtgtccttagttagtggccatgattgaagccaatggacaattgagtggaggctctgacatgctctgctcctgggctgtcctgtagaatctaggaagctgtttgcagatgggccttgcactgtttattcgtggagagctttatatgtgcagcccactgaaggaagtccgacattttaggcctgcagttaggatgttctacgtgaagcatctaagagtcacgattgggggtttttagccttttaggggtcacgggacccctttgccagtctggaggagcctatgggcccttcccagaatatgttttaaagcaagggtcctcaacccctgggccacccgaccgggccgcacagcaggaggtgagcagcgagcgaggaaagcttcatctgtatttatagctgctcccccattgctcgcattaccgcccgaacgctgcctcctgtcagatcagcagcggcattagattctcataggagcataaaccctattgtgaactatgcatgtgagggatctagtttgtgtgctccttatgagaaactcatgcctgatgatctctcactgtgtcccatcattcccagatgggaccgtctagttgtaggaaaacaatctcaggggtcctgttgattctacatcacagtgagttgtataattatttcattatatattataatgtaataataatagaaataaagtgcacaataaatgtaatgcacttgaatcatcctgaaaccatcctccctgcccctgcccacctggtccgtggaaaaatttttttccatgaaaccagtctctggtgccaaaaaggttggggaccactgttttaaagtgtttaaatacaaagaattacaaaggagacccttcatatcaaaatacagttatcaaaatattttaaagttatatataattatgtgcttctttactaatgtcttaaataatgagatcaaacagcagatcttaaaaactgtcataatatttggagtagtgatgggcataaaagttattctgagatctccgcaggaactgtaatgtgatatgaaaaagtctgtgactcctgttaccaacaaagtctcaagtctcaagtctactactagggtatgttacctacattccctaagtgagggaaatgttatgtttcagttgagggcaaatgatggcaatgatgtaatttttttctctttcaagttcacagacccccccccccaacctccaagaatgactggatctcaggtttagaactcctagtcccttctagaactattgcacatagagaatatttgtgcaaaaaaaaatggccatgattaagcctctatcatctaatgaggctgacactattatcatctccctcttaaagatgagaaaactgaggtttagatagatgagtacatttttcagggtcatccatttaggatgggatggagctggaattcaatccttggccctctgaattctttactacattgctatgcttgagttgagatgatactttgtttctatattgataaagtatttcttgttcaccacacttcacaaatgtgaaaaacaatactatccagttcagctgagaggacgaataaattagcatgcccttatacactgtgggtgggagtgtaaattgctccatcctttatgacagcagtttggtcaacatatattaagaaccttaaatttgttctagtaattttactcctgggaagatatccttaggaaaagatcacagtacaaagatgccatatgcaaagatgttcatctcagtgacacttacagtaaggaaatttcaaaacaaacaaagttaggcaatagaagaatggttaagtatcctatatatatttaccagatggtgtattaggcaggcatttaaaattatggcacttaagactatataattaagcttttgtaatgagtccttattaaaagcacctattatttaattgagtgatgacataggacagtcttttcatggtggtgatatttgtagatggtagtagttctggaaatggcaattgctaggtcaggaactaaaacctttagaggaaaaattcctccgcttcctatccccacgctgtcagagactagtggcttttccttgggcctctgacttcacttactatatcagaatcaccgttttggaaatatttggagagtgtttagaataggactttacattttaatgtggttagcatactggttcaaatacctctttatgtaggaaactaaactgcgtttgttaaatttgttttaatgagctggattcttgagatgtttccacttataaatgtaacaactacaaatagctgatcctagtttgctattgaacatgtgttatggtaatcattgtttttatttttaatttctggtctcttgaccaacaagagtctgaatgtgttccatcacttgaagatgtttaggtttattcttcctctttgtaagaacaaaagtactgtacttaagagcttgtgctttcacttggaagtctattaattcctttttaaaatgtagttgttagtcccaatttctgccaaatttcttaaactttctggaagactttcccaaaggaagtatttttaccttcccaaagtctccggattcctgctgtctcctcagtcctgttcattaaactcactcaactggtttcagagttcatgcatttcttttctttctccttatttttctctaactatggctaaacgtttgctccgtggatcagatcctctgctgactggggggtagacttcatcagtttctgctgctagtgctctgccttcttgaacagtatttctttttcaccaaagaacttgtgatggcatttaccatgtttgtcaaaatccagtttttcacacctcattatttaggatttgatcagaactctggggcaaagtttactcttgtaatatttgggaggactaggtttgctaaaggaataacgtcaaaatttcagcagaaatgtttgttttggagacagttgtaagacatataacaattctttacaaataggttagattcttgtatcttcaatttacctacctgttacagaagctcagggttatttaattgtaataagtatttttgtattatgtcttttaaagaaacagaataaaagagaatgtaggtagggggagagagagagttatattaacctttttatttaccatttctgatacttttcatttgttcctgtggattcaagttaccatttggtgtcatttccttattccaatatagccttgttcctaccaatatccttttgctgttattttcaaatgtattacatttctgtataagccgcaacacatgattataaacatcattttctgcaactgctttttaaaccagttaagagaagaaaagaggaaatttgcaattatactatcttttataattgcatgcataactacctttactggtattctttgttttttatcacgtgaattcaaattactatctggtgtcatttgctttcagcctgaagaaatttctttattattattattattattattattatttttgagacagagtctcgctctatggcccaggctggagtgctgtggcgcgatctcagctcactgcaagctccacctcccaggttcatgccattcttctccctcagcctccggagtagctgggactacaggagcctgccactacgcccggctaatgttttgtatttttttagtagagatggggtttcactgtgttagccaggatggtctcaatctcctggcctcgtgatccacccaccttggcctcccaaagtgctgggattacaggcgtgagccaccgcgcccggcccctttagtatttttgtaagatgggtctgctagcattatctcagcttttgttgatctgaaagtgttcatatttcatcttcatttttgaaagatagttttagtggatataaaattcttggctgactttttttttctttcagcactttgaatatgtcatcccgtggccttcgttgtttctaatgaaaagtcagacattaatcttactggaattctcttgtatatgacaaaacatttttctcttgctgctttcaggattttcactctttatctttcaaagttaactgacacatctgggtgtggacctctttgcctttatcccacttggagttcatttggcttcttggatatgtagatttaattttttaaaaaatgatatctggggccgggcacggtggctcatgcctgtaatcccagcactttgggagaccgaggtgggtggatcacctgaggttgggagttcaagaccagcctgaccaacatggagaaaccctgtctctactaaaaatacaaaattagctggtgtggtggtgcatgccttaatcccagctacacaggaggctgaggcaggagaattactttaacctggtagacggaggttgtggtgatccaagatcgtgccattgcactccaacctgggcaacaagagtgaaactccatctcaaaaaaaaaaaaatcatatttaggaagttttcagcaattatttctttgagtatttttctgctcctttctctcctcttcttctgggactcatattaggtgtcacatatgttggtgcacttaatgctgtcccatgttcctttaagactttgttcattttttctttttctgtcttgttcttcagattgcatatctctatttttctatcttcaagtttgctgattatttcttctgccactcaaattgcctgttgagcctcctgagtgaatttttcattttggctgttgtacttttcaacttcagaattcctaccccccctccttttttttggtaatttttctttatcttctgtgtttgagatactgttataataccttcctttaattctttaagtatggtttcccttagttctttgaacgtatttgtaatatctgctttcaagtcattgtctgctacatttaatatctgggtcctttcaaaggcagttagcattgcctactgtttttcccatatgtggatcacactgtcctgtatttgcatgttttgtattttttgttgacaactggacatttcagataatatattgtagaaactccagatactgatctttctcccttctgcctccggggcatgttgtttttgttgtttacttgtttatttgtttcatgacttgactagttcagtgaagtctatttttctgcaatgggcagcctctgatgtcacttctttttttttttttaatttaagttttagggtacatgtgcacaacgtgcaggtttgttacatatgtatacatttgccatgttggtgtgctgcacctattaactcgtcatttagcattaggtatagcacctaatgctatccctccctgctccccccaccccacaacattctccggtgtgtgatgttccccttcctgtgtccatgtgttctcattgttcatttcccacctaagagtgagaacatgtggtgtttgattttttgtccttgtgatagtttgctgagaatgatggtttccagcttcatccatgtccctacaaaggacatgaactcatccttttttatggctgcatagtattccatggtgtatatgtgccacattttcttagtccagtctatcgttgttggacatttggcttggttccaagtctttgctattgtgaatagtgccgcaataaacatacatgtgcatgtgtctttatagcagcatggtttataatcctttaggtatatacccagtaatgggatggctgggtcaaatggtatttctagttctagatccctgaggaatcgccacactgacttccacaatggttgaactagtttacagtcccaccaccagtgtaaaagtgttcctatttctccacatcctctccagcacctgttgtttcctgactttttaatgatcgccattctaactggtgtgagatggtatctcattgtggttttgatttgcatttctctgatggccagtgatgatgagcgttttttcatgtgtcttttggctgcataaatgtcttcttttgagaagtgtctgttcatatccttcgcccacttgttgatggggttgtttgtttttttcttgtaaatttgtttgagttcattgtagattctggatattagccatttgtcagatgagtagattgcaaaaattttctcccattctgtaggttgcctgttcactctgatggtagtttcttttgctgtgcagaagctctttagtttaattagatcccatttgtcaattttggcttttgttgccattgcttttggtgttttagacatgaagtccttgcccatgcctatgtcctgaaaggtattgcctaggttttcttctagggtttttatggttttaggtctaacatgtaagtctctaatccatcttgaattaatttgtgtataaggtgtaaggaagggatccagtttcagctttctccatatggctagccagttttcccagcaccatttattaaatagggactcctttccccattgcttgtttttgtcaggtttgtcaaagatcagatagttgtagctatgcggcattatttctgagggctctgttctgttccattggtctatatctctgttttggtaccagtaccatgctgttttggttaccgtagccttgtagtatagtttgaagtcaggtagcgtgatgcctccagctttgttcttttggcttagggcattcaattaggaaaaaaggaagtcaaattatccctgtttgcagatgacatgattgtatatctgcaaaaccccatcatctcagcccaaaatctccttaagctgataagcaacttcagcaaagtctcaggatacaaaatcattgtgcaaaaatcacaagcattcttatacgccaataacagacagagagccaaatcatgagtgaactcccattcacaattgcttcaaagagaataaaatacctaggaatccaacttacaagggatgtgaaaggcctcttcaaggagatctacaaaccactgctcagtgaaataaaagaggatacaaacaaatggaagaacattccatgctcatgggtaggaagaatcaatatcgtgaaaatggccatactgcccaaggtaatttatagattcaatgccatccccatcaagctaccaatgactttcttcacagaattggaaaaaactactttaaagttcatatgatgtcacttcttaaagggcacactcttgggcatgcgcacagttattctgactcttgtatcctcacccaggaatgacagtagttgcagctaggctctctttgactgtctgtttccctgatctccctgttaagtttctgactaatcttctgtattggtcttacacaactggtactacactgagttgttagtctccctccttagctgattgttctattgcttttgacaataccttgaggcataattgttccacagtttgatacaattaaagttttgcaggaatagtccttaaaactaatccctaaggcttggtctgacctcaggaaggttcctcctagctgtctctttcccatttctctctgttaaacttctagctggtctaccctttacatattcctatcacagagctaccagccttctcttaattgccagccaccaaaatctccataatgttttgtacagcactcatgagcttaaacttccccatggcacattctgcatgaagtcactctccttgtgaagagctgcagttcttacagcctgcctttctcctggtcagagctctgtaccactgctgtggagatggcagtggaaacagcagtctgtttctcttggggtgacactctgctctgtgagtggggtgctggctgggggcaacagctcgtagtcttctcagcttgcctctcttggcatagaaccttcattctgtgagggagctggggcagggacaatcaagtttcagcattcttggcctgttttttgtttgtttctttgtttttgttttggtttgagacggagcttgctctgttgcccatgttggagtgcagtggtacgatctcggttcactgcaacctctgccttccgggtttaagcaattctcctgcctcaacctcccacgtaggtttcactgcaacctctgcctcccgggtttaagcaattctcctgcctcagcctcccaagtagctgggattacaggcgcctgccaccacacctggctaatttttgtatttttagtagagagggggtttcaccatgttggccaggctggtctctaactcctgtccttgtgatccatccacctcggcctcccaaagtgctgggattacaggtgtgagccactgcgcccagtctcttagcctgttttgcctagggtagagcttctaccctacaggtgtaggctgggtagagcaagggagccctggtcatcttgaccacacttgcctggaatagagcttctacaatatcaggctgcgaggaataagaatgttggtggcctggtcttctaaggagaaacagtgactctggaccagggacaagagggagcccttttgtcttggccacacctacttagagtagaacttcagtcagtctgggctgggtgtgggggcgggggagcagtttatggcccaaatgctgcagaatcttactaacaagatttagattttcttgaataaaatgtttttccatttgctacatgccctcaggacaacttatagagactttaaatcaggggtgttcagtcttttggctttgctgggccacattggaggaagaagaattgtttgggccacatgtaaaatacactaacaatagctgatgagctattaaaaaaaaagtttgtgtgtaaatctcataatgttttaagaaagtttacaaatttgtgttgggccacattcaaagccatcctgggccatatgtggtccatgggccccggttggacaagcttgctttaaatggctgtttaaaaagaattttcatcagttatggttgtctttctggggataggatctgggaagctccttacacttccagtccaactttaactttttgaaaataacaaatgatgtttcttcaaaggtatttttccttctagacctcactgatctacacagtccttttctccctctgtctgaactaggaagtctttgaccataacatcaaccaatttcaggtgtgtattagtccattttcatactgctataaagaactgtccaagactgggtaatttgtaaaggaaacaggtttaattcactcacagttcagcatggctggggaggcctcaggaaacttacaatcatggtggaagggggagccgcaggcaagataccttcttcacaaggyggcaggaaggagaagtgcctagcgaagggggaagagccccttataaaaccatcgggtctcatgagaactcactcactatcaggagaacagcatgggagaaaccgcccctgatgatcaagttacctccacctggtctctaccttgacacatggggattacggggattacaattcaagatgagatttgggtagggacacaaagcctaaccatatcaaggtggaagaaagaaagtttaacttttgaatatgtaaatggcatttaatttagtctaggaacatggctttcttggcatggatgagggagaaatttacctctaacttaccaaaaccttaatgctgagtgatttgagtctctttaagaacttgaaagtattacaaggccaggtgcagtggctcacacctgtaatcccaaccctttgggaggccaaggcaggaggatcgcttgagcccaggagtttgagactgcagtaagctgtgattgtgccaccgcactgcagcctgggtgacagagcaagaccttgtctcaaaaaaagaaaaaagtgccacagggaacagagagtctttgttcctgtggggtaggcaattcctagtggctgtgaagaagtagataggagcctgctaccccacttatcacacacacacacacacacacacacacacacacacacccctacacacctgaatttttaccctttctacttacaacactggtatttgtgggttttggttttgttttgttttgtttttgatgtagtctcgctctgttgcccaggctggagggcagtggtgcgatctaggctcaatgcaacctccgcctcctgggttcaagtgattctcctgcctcagcctcctgagtagctgggactacaggcatgtgctaccacacccggttaattttttttttttttttttttaagtagagatggggtttcaccatgttggccaggctggtctcaaactcctgacctcaaataatccactcgcctctgccttccaaagtgctgggattacaggcgtgcagccgcgcctggccagtatttgtgttttgacagacttaataccaatagctggtacccacaaggatggtctccagctgctgctttgcagcaggatgtaagtattctcagaaaaccaaccctattttcagggataatagaatatcagaagctttgtctaagacaacattgactcgtcacctgtttctgtatgtcctgggagctaagaatggttcttacacttattaatggttggaaaataacaaagtaagatgatgatttcaggacacgtaaaaatacgaaatttaggccagatatggtggctcaagcctgtagtcccagcactttgggaggttgaggtgggcggattgtttgagccctgaagtttgagaccagcctgggcaacatggcaaaacccgcaatctctacaaaataatagaaatattagctgagcatggtggcacgcacctttagtcccagctactagggaggctgaggtgggagggttgtttgagcctgggaggttgaggctgcagtgagccatgttcgcgccactgcacttcagtctaggtgacagagcaagaccctgtctcaaaaagcagaagagatctgagactcattatattaatatatgcttcctacaaaacaatttttattccacaaagtttataatagctcacctatagttaaatgatcaaataatatgcctttttcatctatgctgaaagaaaaaacaatatgccatgttgcaatccttgcttatcaggaggttcatgttccctctggttttgggcacatataatgaaacaatgtgatttctgagatttaaaaccctaaaatttctgccagtgaagttcagagatacatacagatcagttcagtatttgaaaccaaatttttgtcatatatctacgtggtagagcttttgaaatcgagcggtttcctgttttgtgcctaatagatccatagtcgtattgaacgaattgttttcatcctcaagtattttctccatgcctgtcccaccaggcgccacctgcccagagcctacacttccacataagttactttctggaacatctttgtttcttttttccaggcatccagtggaaattattatttcatcccatacatcgtgacaccgtgcrctgattatttttgctgcgagagtgatgcccagagacgagcctccgagtacatgcagcccaactgggacaacatcctgggcccgctgtgcatgcctttggtggacaggttcattagcctccttaaggacatccaygtgacctcatggtaattccyatctgccaccagtaacccctggagactcaccaagatgtccccatttctttcagggaagcggtacaccttcaaatgaacagagttgctggagaacccactattgtcccttactggctcacttagctgggccactgaaatgaaaccaaaagagaatagaactggagttaagaagtcgggattgagcccgtgtctggccctgactccctgtttgatcttgacatgtaacttctcttctctctgattgttctgtctcttctagataagacaacttataggaagttgtcagtgatttttttttttttaacgatctctttcagctctgagatcctgtgtttcaagatgatttctgagcatggctttacactcgcgtggctgttggggctcttcatatatctcagcaaggtcgttctgaccttacgctctcgtgctttaaaagccttcgtgcgttgagtggagctgcagctatcctcaggatgtactgtgctgtgttctctttagatttaggttaggtgaggtgaaatatgcagaagtgaataggtttagattggaatcttggcttagatgattcctacctgtgtagcactgaaatagtcagctcacctattggagcctcagtgctcaagaaaccataccttcagatgttattattgtgaaagtaaaagaaaaattattcttcttaaccaaaggatccagttattttgcttgcagccaatttaaaggatttattcccgtaagttgtgtcacaaggagaaggatttgtccttccaaaacaaatgaaaatcccaaacactggcagagctgacctgaaatgaaatgtagaggacctcctgtcacactgtggctcaaatagtggcaccctgaactgcggagtgttctattgtagtgttggtacaagggagacacttattaatggtctccttttctatcccgtcacctcttccctggatacagaccttcttctacagactttaatggaaaaggagattagaaacctaaacatgtgtgaccacatgccaacacagagagcaaatgggggacattttgtggcacattcctggaaaacctcatgccagtcatgccttgctaactgttgtctgattgcaaaacaaacacttgagtgaagttttatagaaagctctcccaataccatattttcaagtctgacaaggaggtagactggctagatctgccagatgatttaggtctttgcaagacatggattcaagtttgtttctcactcagtgtgtgtatgtatcagtaggcaaacaactcttgtgatttcatttagtttcaaagggcttgaaatacctattggtggattccaccctctgaactggcagtgtctgacaacagttagtaggaggggaagtggtgcttatagtttaaaacatctataacacagatggaaaggaagttttgagctcaagcgccagctctgatagatttataaagtctattttgagtcctgtgctggaatggcttggaagccatttccaagtgctcattgatcagcaacatcttccttggttacaggggcagaaatggctgcatgcttattacatatctgatgtccccaagccatactcaaaccagtgtttaatttacctaaaaggtactgttcttcttaggtttcttagtttattaaaattatttttcagaattacccttgaaaaataaggctgaagtataactttttacttatcgggctaacctaataacactttaatagcttcagtgcctttatagtccaccaaatgtgcaatggctggcatccaacttaatgactcattcaattagtgacagaattttaaacactggcagaatctgctaattttgttcattattgggatgatggcaattaacaaaaaaggaaatagaaaactaaagcaatgcattgatatttttctatcagaacccctgctgtgtgcgtcacttcattctttaaatgttaatggaggtcctcttgtgagcattggaccaggttatgtactgtatgtacacatatttggcattgttttgtaattattgaaagtaggcaccatttgttcttattgtatctcatgttgtttttctctctttgaagactattattaaatttagcttactctctttttaatgaacagcctaattttacactctgcagttagtccatttcagctttgttttgtgtgtgtgtgtgtgtgtgtgtgttttagaccaagtctcactctgtcgcccaggctggagtgcagtcgtgcgatctcagttcactgcaacctctgcctcccgggttcgagcgattctcctgcctcgacctctgaagtagctgggattacaggcacccaccaccaagcccagttagtttttgtatttttagtagagacggggtttcaccacgttggccaggctggtcttgaactcctaagctcgggtgatcctcttgccttggcctccaaaagtgctgagattataggcctgagccactatgcctggccccatttcagcttcttaatgggacgacagtattactgyttggcagtgtcctacctccacttaaaaattcctatggaaaatagacaagatattttaaatcaatctatggttgttgtaactcaacttatgtataccaagttaggtcatttttcaaggttttaaaccaaataccagataatagcattggctcttcaagagactatggtgatattccagcgtgaatttaactgctttaagtgtttttaagcttcctcgtgcttatctagctgctcacctgagggaagttttgtgttttccattagaaaactattcttgggtccaggcatggtggctcacgcctgtaatcccagcactttggaaggctgaggcaggtggatcacttgagtccaggagtttgagaccagcctggccaacatggtgaaaccccgttctggctgggtgcagtggctcacgcctgtaatcccagcactttgggaggccgaggcgggtggatcacgaggtcaggagatcgagaccatcctggctaacatggtgaaacctcatctctactaaaaatacaaaaatttaactgggcatggtggcgggcgcctatggtcccagctactcaggaggctgaggcaagagaatggcatgaacccaggaggcggagcttgcagtgagccgagattgtgccactgcactccagcctgggcgaaagtgcgagactctgtcttaagaaaaagaaaaaaaaaaaaggaaagaaaccctgtctctaatagcaatacaaaaattagccaggtgtagtggcacatgcctatagtcccagctacttgggaggctgaggcaggagaatcgcttgaaccagggaggcggaggttgcagtgagctgagattgcaccactgcactccagcctgggcaacagagggagactccgtctcaaaaaaataaataaaaataaaaaaaaaaaaacaaaaaaacaaaaaaacagaacattctggccattcaatatggtgaggagagcaaggctgtctgtaagtttccaggcatgacctctgtgtgtcccatcttgtattgctcagggactcaacaccagtttccagccctcacctcaattggggaaagcttcatgactactaatgagagacacctgatagagaaattcattttcaagtcattctcatgtatgtttcaggggttttggagctccgtttggctttgttactagtggcgaaaataaatacacaaggaaggtaacttctcaccctctatatgtttgaaaatgccggagacagtgggtttggttggctgcaagttctgtgtgttgtccaagtacagatgggagtcacctttgaaagtatcttcaaggttgaatgaactgatttttacttgtcattcattggtctataaaatgtgaataagtagaaagcatcttctgtttgctggtgcagggaggctcaggtctgggccgaggtccctatgtgttagcctaagtcaggtcaatgagaaccatttttgggcrcaakacagtcctgggtgcgtgcagatgtgactggaggwttttgtgtttttctttctatagtgtttattacaaagaaaccttgttaaatgacatccggaaagccagagagaaataccaaggtgaggaactggcgaaggagctagctcggatcaagctccgcatggataatactgaggttctgacctcagacatcatcattaacttactcctgtcctaccgtgatatccaggtatgaaatccacctagccgaggctcacgtatgctacgttcttccttggcttgaggaacktcttgtgaagtatttgtatactcagtatgtggtgaagtggctgggttttgttcttcttttttgttttcttttttgagatggagttttgctcttgttgcccaggctggagtgcaatggtgcgatctcggctcactgcaacctcagcctcccgggttcaagctgttctcctgcctcagcctcctgagtagctgtgattacaggcatgcgccaccatgcccagataactttatatttttagtagagacagggttttcaccatgttggtcaggctggtcttaaactcctgacctcaggtgatccacccgcctcggcctcccaaagtgctgggattgcaggcatgagccactgtgcccggccagaggtggccgttttatagacaaatggtatgtggctaggtcataggtcatccagcttatctgttgtggtggaaattttggagaaggttttgtcacatcggggctggtgtgaccactccgacaagaagagatgtcataaacaggactgtttggcagaaggagccaagaatttaagtttatatgaactttacactaggcattgttccaagccctttgacaaacctgaattcatttaatcctcttaacaaccctatgtgggatatgtgtactctgattatccacattttacacatgaggaaactgaggcacagagcggttaagtaacttgcccgaggtcacacagcagttggttaggtcaggattcagactgagactgatgctccgttgtccttgttcctaacccctctgctgtgcaacttcctttaggcttttgtcacttcctcctttgtttaccaccatacatcagtgacagggagaacaggagtagcagaaacacattcaggacccagngaatgtagatgtttattctgagacaagcatcagaagctactggagagttctgagactggtcttttggtctgtggttccgtgaaggaaattgagcgtttcctctctccaagttgaatgccattgagccatctctaaggatgtcttggcttcctttcctttggaggaacacaggatcacgtaccttactcatagaattccacaaagccatgttgagagttgttggctagaagtctttaaattgaagtgatggaggcgtccacttatgacctggaccaaaacagagtcaaccagtaaggaactcctgcccctggtgataaacagatgcagctagctgattttatttctgtttttcaaatttttatttatttatttatttattgagacacagtcttgctctgttacccaggctggagtgcagtggtgtgatctcagctcactgcaacctccgactcccaggttcaagcagttctcctgcctcagccttcccagtagctggaattacaggtgcctgccaccttgcctggctaacttttttaatttttagtagggatggggtttcaccatgttgggcaggctgatctcaaactcctgacctcaggtgatccatctgccttggcctcccagagtgctgggattacaggcgtgagccaccgtgcctggccagctagctgattttaatagcagttgctactagggatgataatgattaggtcttgtctcccaggacaagaacatgggaatgrcttttcttgaagcctttcttccctcgagctgctgctttttgtccttcccttcatgtatcccttcttttcataaccttccattcatgctcaaaggtgggccaagaggttcttggaataccctgccttctccctcctggggcagcagcatcaaggcgcagagccacaggacaggcatggcatttcagtgggaagccctgttctgctgaccatggctggctgtcagcaagttggccagttccaacgattctaagcctggctgaaagagtaacaggcggcactgctaagaggggacttggctgagacaagcatggtcgcaatttttctccaggtaattatgcagagtttagagcagtggttctcaacccaaggacttttttggcagtgtctggagacattttcagttgtaaaaactaagtgcgtgtgtggggcatgaggtgggtggtgtgctgtggcttccagtgggtcaaggccagcatcctacagtgcccaggacagctcccacaacagagaattatggtccagaaacgtcactagtcccaaggttgagaaacactagtttagattaatgtatttgattctggcaaaataggaaagactggaatctatgtgctttgactggaagtttgcttgtgtgtatttgtccagctcactttaacacacatctctgctgatactgtttttttattttgtttttgattttgagacagacggagtcttgctctgttgcccagcctggaatgcagtggcacaatcttggctcactgcaacctccgcctctcaggttcaatcaattctcctgcctcagcctctcgagtagctgggattccaggcgcccgccaccatgcccagctatattttgtatttttagtagagacagggtttcaccatgttggccaggctagtctcgaactcctgacttcaagtgatccacccacctccgcctctcaaagtgctgagattacaggtgtgagccaccacgcccagcctctgctgatgttgttaactctcctacactcagctgtttcctggctgctggcctcatttacttttgttgcctttggatgcytcatgccctttgatagcagggattccttctctgttcttctctctctcatccatcttattttctggtctttttccctcctattaaaggctacaagtaacttcactaaatgccctttgtaaggaagggcctgtctttaagtgcggaggctgtctcctgtttataacaattcagaaaaatcagtgaagagctgtgtttcctctcttgctcactttgggacctcttgccaacaggactatgatgcgatggtgaagctggtggaaacactggagatgctgcctacgtgtgatttggccgatcagcataacattaaattccactaygcgtttgcactgaataggtaagaacgataatgtacgtacaggttttgaaacatgccacccattgaattgtgcttccttctttcattcaacatcgggtatgagccaggtcacgtgctaaatgccaaggttatgaagatggacaaggtccagtctttgtcctcagggactttgtatttggcatacacattctagctgtgagattgaacacatcaatccatcctaatagcttatgacggcatcaaaacaggcacccccggcttcacatatcttgtaacacatacgaggtcacatctcttttttaaatcggtaaaatttgcagtcagtgaaatgcacagatcttaagtatatgatttgtgtttgataattggctatacacatggaaacaacactcccatcaaaaaagaaaacatttccatcaccccagaagttcccttgtgctcctttgcaggcaatccttaacccctccataggtgaccactgttacagcctctgtctccatagatgagtttggcttgtccttgacttcacataaacggaatcacacagtgtgtactcttttgtgtcattcatcgtcgtgttcgcgagattcatctatgcggttgtgtgtattagtggtttgttcgttctcattgccgtcgcgtagtccttggtataggtatgccacaatcatctgttttactgctgatgggcctctaggttgtttgcggtttggggatactgagaacagcgctgctatggacattgctgtacatgctttttctacacatatggatacatttctcgggtatatagcatgtgcttgtagtagacatcggcaaacagtggtaggattctgattcctttttgggagaaagcttcatggtctctgtggaaatgcacctgctctctccccagcagcctttaaacccagcatcccaaggatgcattgttgtgaatgacggccagtcttcattaagcctgataaagtcttgtaactttgttcccccgacatagtaagctccattcttatttatatttacctgtgcttgattaataaccattaaatgagccatcacgcctgaggttcttgggagagtgcctggcacactgtaagtgctgtaaaaaattggtttgttaaataaaaactataagggccttttaagttactcatcactaagtctttttcccagacatagtagaggtaaccgttgtcagacagagaatgaaataatagattgccattttctcaaaataacaaaagagtaaaacaagatttgaaatggaaaattggggccggccgcagtggctcatgcttgtaatcccagcactttgggaggccgaggcgggcagatcacttgagctcaggagttcaagaccagcctgggcaacatggcaaaaccccgtctctacaaaaaaaaaaaaaaaaaaaaaaaaaaattagccaggcatgatggcttgtgcttgtagtctctcagctactcaggaggctaaggtaggcggcttgcttgatcctgggaagttgatgctgtagtgagccatgattgcaccattgcactccagcctgggtggcagaatggagaccctgtttcaaaaaaaaaaaaaagaaaaaagaaaaaaagacatagaaaattggtatttaggagaaacaggtatagcaggatgaggtgatcctgagatgaatacgtttcccgtttggaagcagaatggctgggattgcacaccagatagccacctttctctttgatgggtcttttccttctagtctgattatctcctgttagacagtggctctgtttaatagggccagacggggtctccaacactgagaacctcattttctccaacaaactaaggattttctatgggattgcaatacttgcttcatttacacatgtaatctgatcctgaatttcacatttttgctttaggcttaagttggccagccgtcaacatagtaggagtttgcattacacattgagcatctctaatctgaaaatctgaattgaaaagtgctcctaaatccaaaactttttgagcgccaacatgatgctcaaaggaaatgctcattggagcattttgtatttcaaattagggatgcttaactcgtaagtataatgtaaacattccaaaatctgaaatactgcaaatccaaagcacttctggtcccgagcattttggataagagatacctaactggtatatatagttttgagcgagtttatggcattactttgtatctgtaaaggggaaaatagtgatggacaagaaatgagttttcctgcatgaaggttgacctttagctctcaggaagtggagcaaatcatggccagaaatgagttactgaaggttggcagtaatggatgactttcgaccctcagatgtcaagggctccctgttagtgggaaagctggctcgagccggtcagctttccctgataccttccactccactgcgttcagaagcccattcaaagctacttcaagtttccactgagcagttaaactgcttgctgcttgatggcatggaatattttatgagtgatttgtatttgctgttgcttttacaaatggggctttattagatatatgaatgtagtcagaatattctgaccagggatccagccagtgagctggatggtctagaagaagaaaatcagaatcaaagtcccaggttcaaaacaaaatagaacttgccagtcgcaaaatagaaggcatgtgctcatattctacttccagcatctttggatcgagactaccaactctggcaaaatttacctctttgaattactcagcaagtggcagggcagttggatgtgtgacgcactgactggaatgtctaatatgtcgttctgtaaataaggggagtgctagatgagaatgctctgcagaccctagaaatgtgtgcaggggacatgagatgaacgtgactgaatccagcccacaccagaggggctgcatgcttgttccagaacctactgtattcacctgagccttagtctctgagcttcccagccgagagggcagagtgagctcgtcatctctacagtagccacgagcctccttttgtctcttctgttgatgttcgctgtttgatttcgctgtcttaatttccatgtggatataagtagcattctttatgacatgtttgtcaaatgtagaaaaatgatgacatcttcccacttttctaatgcattgtctccaggctcctaaaagcatcttgtgaaagaaggatacatacttgttgcttttctagtgaagagaaccacaaaatctgccaacttaaaaggaatcatttagtccaaatcctttgttttggagaggagaaagaaacaaacaaagaaaaaggcaagggcccaaaatgtaacacttggtcaataagagatctggaaccagaactccctccctaatgttaccacagcacactgcatatactacttttttttttttttttggcctgagacgctcactctgtcgcccaggctggagtgcaatggcgtaatcttggctcactgcaaccttcgcctcccgggttcaagcgattctgctgccttagccccctgagtagctgggattacaggtgcgcatcaccacgcctggctaatatttgtattttagtagagacgaggtttcaccgtgttggccaggctggtctcaaactcctgacctcaagtaatccacccgcctcagcctcccaaagtgctgggattacagacatgagccactgtgcccggccttggtttggtgtttattgtagcaaaaaaatacatataaaatttaccatcttaaccacttttaagcatatagttcagtactgttaaatatgttcacatatggtgaaacggggctctagaagttttcattttgtaaatctgaaactatgcacacattcattaaacagctgcccgttgctcccttccccagtccctagcaaccaccattcttctgtttctgtgactgtgactatcccaggtacctcatataagtgaaatcgtacagcactactgtccaatcttttggcttccctgggccacattggaagaagaattgtcttggaccatacataaaatacactaaccattgctgatgagctaaaaaaaaaaaaattgcaagaaaacctcataatgttttaagaaagtttacgcattggtattgggctgcattcaaagccatcatggaccatatgggccgctggttgaacaaccttgtacagggtttgtctttctctgactgctttatttcacttagtgtaatgtcctcaaggttcattcatggttgtagcatgtgtcagaacttccttttcaagggtgaataatccattgtatgtacagaccacattttgtttatccattcatctgtcgatggacatttaggttacctcttgagtattgtggatagtgctactattaacatagtgtgcaaatatttcttctagaccctgcttccaattcttttggatatatgcccagaagtaaaattgttggatcatatggtagtcctatttttaatttttttctttttctttttctttcttcttttcttttcttttcttttcttttcttttctcttttcttttctctcttctcttctcttctcttctctttctctcctcttctcttctcttctcttcactccactccgccccgcccgctcacnnnnnnnnnnnnnnnnnnnnggagggagagggcaaagctcaaactgaaccgcctgcgaccaacacctagcccagaacacagagcctggaccgtgcccaatcagagctcttcacctagtcgaaaatgcactactcctgctcttctcataatcatcaccttctcaacacttcgccactcaatctctgctctactcttctctgctcttctcttctctcatcctctctactcttctcttctcttctcttcctcttctcgtctcttctcttctcttctcttctcttctcctctcttctcttctcttctcttctcttctcttctcttctcttctcttctcttctcttctcttctcttctcttctcttctcttctcttctcttctcttctcttctcttctcttctcttctcttctcttctcttctcttctcttctcttctcttctcttctcttctcttctcttctcttctcttctctgacagaatcctgctctgtcacccaggctggagtgcagtggcatgatcttggctcactgcaacctccacctcccaggttcaagtgattctcctgcttcagccacctgagtagctgggactacaggtgcacaccaccacacctggcgaatgttttttggtagagatgggattttgccatgtttcctaggctggtctagaacccctgacctcaagtgatccacctatctcaacctcccaaagtgctgagattacaggcatgaaccaccatgcctggcatatttttaattttttgaggaatctgtaaattgttttccatcgtgcctgccccatttacatctcaccagcggtgtacagtttctccaatccttgccaacacttattttctgttttcctttttttttttattagctgccctaatgcgtataagatgatagcctattgtagtttcaatggacgtttctctgattagtgacactgagcatcttttcatctgcttgttggccatttgtatattatctttggagaaatgtctattcaagttctttgcccaattttttaaaaggttatttgatttttgttgttgttgagttgtaggagggtttttttttttatatatatatattctggctattgactcccgatcaaatatacaatttgtaactgttttcctatattgtataggttgacttttcactctgttgattgtatcctttgatgcccaaaagtttttaagtttgatgtctcatttatctgatcttctttttttttttttttttttggaaactgactctgttgcccaggctggagtgcagtggtgtgacttccgctcaaggcaacctccacctcccgggttcaagcaattctcctgcctcagcctcccgagtagctgggattaccggcacccaccaccacgccagctaatttttgtatttttagtagagatggggtttcgccctgttggcaaggctggtctcgaactcctgacctcaagtaatccacctgcctcggcttcccaaagtgccagggttacaggcgtgagccactgcacccggccggatgtctcatttatctaatcctgctttgttgcctgtgctttcaatgtcatacccatgaaatccttgccacatgtatactttttataacaaaaagccagttgtatttttttttttgataaatgaaccatcttatcttctgagcagtggccttgccaataatacatgttatcttttaaaaaaatatttgcttaaagggctctgtcttcattgctcctcactggcctccttgagcccgtgatatcttccttttctgtttccttcttcagttccctcctttttgtccttcctcctttatttactaacttatttatgtgtcagtagaagggctgtatgtaaaggaagagggttcatgaggggtgactgaagttaacaggtgattttttaaaaaatcacgttttcaagtccaacagagcttaaaggtaaaataaaaataaaaaattacacgtgtatatttctctctcacacacacctgaacttatacaaacaagtgaatttgtttgattcaaatgaatttcactgcagtgttctgcattgattttggcaatgctgcctttattcagaatattatggcatcagtcagagaggaatttttttctttggaattgccagctttctttatttttttcgtctcctctcccttttctcctgtcctcttctcctcctctcctctgttgtccaggctagagtgcagtggtgtgatgatggctcattgcaaccttgactttctgggctcaagtgatcctcccacctcagcctcctaagtaggcacatgccaccatgcccagctaatttggaattgctagctttcaaggcacataggaaatcaatatcattccaatgggttctgaagacagatttgggttccagttcctgcttctgtactttattgttatggccgtggtcaagtaatttaacctcctcaaacgttggtgtccccatttataaaatgtgatactgacatctaccatgtagtatcacttggagtactcctggcacgaagcaggtgcttggctattgctcttactattactgtgtagcttgatcacccatattttttctaccaggtttgagggataacttttgaccatttccaaataccaaaactactagcaaaatacagagattgccaccacagacaatatttaaaataacatacctttggctctgaaaaaaaattcttaagagaaatttatagaagtgcttttagcaccagaacatcgttctaataagtctctggccctctgagatgactattttgcgtgggacagggttgatctgaatataggtatttgcagaaaaaagcgatcgtttggtaaattcaaagtttattgatttagagtgggtttcttcaccttggcactattgatatttggagctggataactctctgtcatgggggctgtcctatgtatagtaagatgtttagcaacatccctcgtctttacccactagatgccaataccactccccccrcacctcacccaatgtaacaaccaaaaatgtctctagacatwgataaatgtcccataggggacaaaaatcccttctggttgagaccactgatttacagggaggcatttgaggtatagaaaaagtgcacgctttgacatttgcatcaccaacaatatgatgttgtcaagctaattaaactccttcagcctgaatttgttcatctgtaaaccaggatggtgatgcctaaataagatatgccatatgcaaatgactgcacggcccctggcagctagaaggcagttcataaaagtttgatagctcctccatttatccctcatttacacttcttaattctaatcgggagataacctagtgttacataaaaagattacagagtcaacagggcgagtgccaagtggcttagtctgtaggaattatggttgcttaaagtagacaagaaaaactgcttgtaatgtggccaaaaagtggcccagagnnnnnnnnnnnnnnnnnnnnnnnnnnnnnnnnnnnnnnnnnnnnnnnnnnnnnnnnnnnnnnnnnnnnnnnnnnnnnnnnnnnnnnnnnnnnnnnnnnnnnnnnnnnnnnnnnnnnnnnnnnnnnnnnnnnnnnnnnnnnnnnnnnnnnnnnnnnnnnnnnnnnnnnnnnnnnnnnnnnnnnnnnnnnnnnnnnnnnnnnnnnnnnnnnnnnnnnnnnnnnnnnnnnnnnnnnnnnnnnnnnnnnnnnnnnnnnnnnnnnnnnnnnnnnnnnnnnnnnnnnnnnnnnnnnnnnnnnnnnnnnnnnnnnnnnnnnnnnnnnnnnnnnnnnnnnnnnnnnnnnnnnnnnnnnnnnnnnnnnnnnnnnnnnnnnnnnnnnnnnnnnnnnnnnnnnnnnnnnnnnnnnnnnnnnnnnnnnnnnnnnnnnnnnnnnnnnnnnnnnnnnnnnnnnnnnnnnnnnnnnnnnnnnnnnnnnnnnnnnnnnnnnnnnnnnnnnnnnnnnnnnnnnnnnnnnnnnnnnnnnnnnnnnnnnnnnnnnnnnnnnnnnnnnnnnnnnnnnnnnnnnnnnnnnnnnnnnnnnnnnnnnnnnnnnnnnnnnnnnnnnnnnnnnnnnnnnnnnnnnnnnnnnnnnnnnnnnnnnnnnnnnnnnnnnnnnnnnnnnnnnnnnnnnnnnnnnnnnnnnnnnnnnnnnnnnnnnnnnnnnnnnnnnnnnnnnnnnnnnnnnnnnnnnnnnnnnnnnnnnnnnnnnnnnnnnnnnnnnnnnnnnnnnnnnnnnnnnnnnnnnnnnnnnnnnnnnnnnnnnnnnnnnnnnnnnnnnnnnnnnnnnnnnnnnnnnnnnnnnnnnnnnnnnnnnnnnnnnnnnnnnnnnnnnnnnnnnnnnnnnnnnnnnnnnnnnnnnnnnnnnnnnnnnnnnnnnnnnnnnnnnnnnnnnnnnnnnnnnnnnnnnnnnnnnnnnnnnnnnnnnnnnnnnnnnnnnnnnnnnnnnnnnnnnnnnnnnnnnnnnnnnnnnnnnnnnnnnnnnnnnnnnnnnnnnnnnnnnnnnnnnnnnnnnnnnnnnnnnnnnnnnnnnnnnnnnnnnnnnnnnnnnnnnnnnnnnnnnnnnnnnnnnnnnnnnnnnnnnnnnnnnnnnnnnnnnnnnnnnnnnnnnnnnnnnnnnnnnnnnnnnnnnnnnnnnnnnnnnnnnnnnnnnnnnnnnnnnnnnnnnnnnnnnnnnnnnnnnnnnnnnnnnnnnnnnnnnnnnnnnnnnnnnnnnnnnnnnnnnnnnnnnnnnnnnnnnnnnnnnnnctcgtgatccgcctgcctcggcctcccaaagtgctgggattacaggcgtgagccaccgcgcccggcctcgtgggtgagtttctaaagagacagaagggccactaaatcaaccctatataacccccttctaaattcaggatggcaattcacattttactttagatgaaatattatcagtaagtgagtttggataatgcttcacttaagattcagaacagttgtgtttcagtgtgtttgaacactttgtagtatatcacagctcttatttcagcaatgtagggaggatacgtttatgcctgtgttgaaggacttgtaaagaaaggactttgtgttgtaggaaaagtgttggtttgagatttaggcagcctgtattctatcccagttctcctcctaactagctgggtatctgtgggcaagtcactttacttcccaggaattagtagaagtggacatacaraagacaagaaataaaaagggccaagcacagtggcttgcacctgtaatcccagcaactcctgaggtcaggagtctgagaccagcctgagcaacatagcaagaccccgtctctacaaaacaaaatttaaaaattagccggtgtggtggtgtacaactatagtcccagctactcaggagactgaggcaggagtagcgcatgagcccaggaggtcaaggctgcagtgagctatgattgtaccactgcgttccagcctgggccacagagccaggccctgtctcaatcaataaatcattaagtttaaaaaataaattacctaattaatttttaaaatatataaataaataatttttttaaaaaaaggaagggaaggctgtaggctgggtaccagttccagttgaggttgtctctttagttgtactccaggtgccagattacaagttcacccgatgccaccccgtgtatttcagtggttgatgtttgataagaccggaggttaagatgggctctgactacagtgaacagtccagtttagcctgactgaagggtttatttaggtgatagggagaaatagatggctgaggagggaggttggccccaggggttaaggaccttgactgataagctaaggaatttgaattttgttctgtagtccctagggagtaattactgaaggttttgtaaactggactgacatgagccaggttacgactccaccactatctgcatggccttagssaggtcaccaaactttcctagacctagaccttatagtcatcttttttaaagagagagagagagagtgatttggaccagatgattttgaatattgctctcctttcaaaagttctgagtctataacttgaagcatcattttattagttgaatgattagagacagatcctttaagaccttgctttatgatggattctttatcctatcagcgatctatctcagtcctatttgttgttgtaaactcaattacgtcaccgttcccagggagaggaaaacctactctgtgtgctttctcactttgcttcctagtaacacgttataataacggagtttttccttaaacaataaaagattttgttagaacgcaggttaagtgaactaaaaggcacacatacagtttatttcacggccaaatgccaaattttcctcaaattatttgcccactacctcagctagtctctgtctagttttgttgctgttgctggctgattaatatttatttatttatttatttattkattkattkatttatttatttttgagatggagtttcgctcttgtcgcccaggctgcagtacaatggcatgatctcagctcactgcaatctctgcctcccgggttcgagcagttctcctgcttcagcctcccgagtagctgggactacaggcacctgacaccacgcctggctaatttttgtatttttagtagatattggctttcgctatgttggccgggctggtctcgaactcctgacctcatgaggktgatccacccgcctcagcctcccaaagtgcttggattacaggcgtgagccgctacacctggcctttggctgattaattttaaaagcaattttagtttgatatttccatcactaattttttttttttttttttttgagacagagtctcactctgtcgcccaggttggagtgcagtggtgtgatctcagctcactgcaacctctgcctcctcggttcaagcgattctcctgcctcagccccccgagtagctgaaattacagacgtccgtcaccacactggctaatttttctacttttagtagtgacgaggtttcactatgttggccaggctggtcttgaactcctggcttcaagtgatccacccacstcagcctcccaaagtgctgggattacaggcatgagccaccatgcctggcycctaatttttcttaataaaaacttttaatacatgtctagagtcataatctaggtctccccccaccccaaaacagcccctgagatacgaatttgggggcagatagtttatttgggagatgagcctaggaagtttcagaagggagacagggaaatgagatagggaaaagaagaaaggcagtagagggtatattaatgagcagatgaccactgtgtgggaaactgaggctgtatagtgttgaggagtttggggaggctttatagaacattctctatagaacaacatatagagttgtctcatccagtggacgaggaagctggggacctatccactaactctcagccatcactggttgagggctgccctgggggtgggacactcccaggggtagtggggagagggagaatggcagtggcactgggacccatcaagcctacaggtgagtggcagtgggatgctatcaggccattgtgtgtctttcgcacctactgcccttgtgggagttgatgttgttttaaatctctaatgccttctttttctgatcaactgtttttcttgaaatatcaatttctgaggagcttctgagtcttcctgtgttctgttttgtacagaattctggggagaatttaattttagtttcttgtagtttgttctgctctgcagaagatgccaggaatgatctaaaatatgtacacttcgagatctgttaccagaggtattgatgccatagttgcctggctactgtattgaagatttttccttgagatatttctttattcaaaagtggttctatttttttaatgcgtgattgagcggccaacgaatatcgttctgagcaggtagaaaagttttagtggcgtatctctggattttgcacacgtagatttggcttctcctcacagcagctcaggagaatcactgtagagagaaaactctcctgtgatccctccctttaagaacagatggcgatcttggctctgccatcaagccaaaggaaacatcagtgataaccatcagaggacctgtatgagatgagaaaattcctatgaaaaatgacctagacgcttactcttagcagcacactagaataggtctcgtggtgatcttaggtgacatgcactaaatattattttaacaacaatgccacttttcttgaggttttaaagaatagttgctcagcaagtcagatgaaaggaagttctcaccagcagccagcccttgggggattattcatggatggcaggaatgtgcagaaaaggattcaggagacatgaaggaactatccatgtgctagttttcctgtgcagctgggggtgtgaggatggcccggtaagtggagcacatttatggaaaaatggctattacttgggtatttgggggaaggcttcttgggaggagctagaatctggaaagccatttggagtgacatatgaaacctggagaatagctcctgagtcctttggagtaggaagttccttgattaggcagagcctttgagaaacttggcataagaggaatagaaatgactccatgtggcctggcccgtccctcccggtttgctcctctctagctgccctcatccgccttcagtcttagggcagcaggctgttctcagctgtggatgttagcatatgctgtgcccccgcccagaatactcgttccctcattgcttacctgactgaagctgatgatccttcagggtctagtttcagtgtctctttctgagaaaagctgatgttgcaaagaataccaagtctggaaaggatgttcctattgttactcattctcatagcgcttgctatttccctttatagcactccatttctgtgtttacttgcttaatacctatcatccctcctgctgtactataagcctgagggggcaggggccatggtgtatactaggccgtgatatagccagtgcctagtaacattgtgccacccacagagtaggcactcagtaaagatttgttgaatggggttgggcgcagtggctcatgcctgtcatcccagcactttgggaggtcgaggcaggcagatcacttgaggtcaggagtttgagaccagcctggtctacatggtaaaaccccgtttctactaaaaatacaaaaatgagccaggcatggtggcacatacctgtaatcccagctactcagaaggctgaggcatgagaatcacttgaacccgggaggcggaagttgcagtgagctgagattgtgccactgcagtccagtctgggcgacagagcgagactccatctcaaaaaaaaaaaaaaaaaaaaaaaaaaaagccgggcatggtggctcatgcctgtcatcccagcactttgggaggtcgaggcaggtggatcacttgaggtcaggagtttgagaccagcctggccaacatggtgaaaccccgtctctactaaaaatataaaaaattacccaggtgtggtggtgcgcacctgtaatcccaggtactcgggaggctgaggcaggagaatcaactgaacccgggaagtggagattgcagtgagccgagattgtgtcactgcactccagcctgggcaacagagtcagagtccatctcaaaataataataataataataatgataataataataataataataaaataaaagccaggcatggtaatacatgcctgtagtcccagctacttgggaggctgaggcaggagaatcacttgaacccaggaggcagaggttgcagtgagtcgagatcgcaccactgtactccaatctgggcgacagagtgagactctgcctcaaaaaaaaaaaaaaaattgttgaatgggtaagtgaatgaagaagtgactaatgatcaactgtggtatagtattagaagagagccacataatgagtgtctgggtgctacagttaatttaaagtttggtagtagaaagtaaacgtattgtattttctttatttatatgtgagtctgtgcttaaaaacaaaaacatccaagtcagacatactcattgtatacagaaaaatataaaaacataattaccgttgataccactacccaaagataaccattgaagtagggtgtggcccaaagcagggaatgcagaaaagtagaggagtccacatgggctaggtcagggtcagtggtgatggaagtcttcctagcgtgagaatccctggtgtctgctaaaaaagggatttgataaaaactcagaggggaacagatcttcctgaccgagggaacccctgccgcctcggtggtgttgacttgtgtattaggctagtgtaactgttgtaacagacagccccacaatttcagtgacttcacatgatggaagtttcttttcactcatgcactattccaatgtggatgtatcctggctgggcagtctcttcttcaggtgatttcttggtgaactcagtctccttacatcttgaggctctgccctctcctggatcctcagatctcctttcagccagatgataggaaaagagcatggtgacttgttagagaggttttgtatctgagtttggaacagctttgctgagatgtaattctcataccatacaattaacccattttggctggatgcattggctcacacctgtaatcccagcactttgcggggccaaggcaggcggatggcttgagttcaggagttcgagactagcttgggcaacatggcaaaaccctgtctttacaaaaaaatacaaaaaaattaaccaggcattatggtgcatgcctatattcccagctactcgggatggcttgagccctggagtcggaggatgcagtgagatcgtgccactgcactccagcctggacgacggacccaaaccctgtctcaaagacccaaaaaacaacccatttaaagtgtacaagtcggtgggtttttttagcatattcggagttgtacaaccatcactacgatcagttttagaatgttttcatcatcctccccccgccaccaaaagcccatacccattaccacttaaccccacttcccagcttccctcaattcttccccccctattcctaagcaatcactgatccattttggcaacctgttaatgggtaccccctcttcttccgcctcactctctagcctgaggaaaacactagtctcttttctgtctctatggctttgcctgttctggccatttcatataaatggaatcatacaatatgtgttttgtgtgtgtctggcttccttagcatactgtcttcaaggttcatccatgtggtatcatgtgtcaggacttcattcctttttttggcttaatattccattgtacagataggccacattttattaattcatcagttgatgggcatttgagttgtttgcacttttgactgtactagagagggttgtaggagcctgctcaggaagtgatgttcattacttctttccatgtttcatcggccacaagtcagtctcgtgtcctaatctcacttcaagggaacttgggaaatgtggtctggctgagtgcccaggaaaaaaagaaatggggcttggtgatgctgctacaacttgcaaataaggagtagagtttaactggatctatcagcgtggagattcctggtgacatgtcacagagcaggacagagagttcaggcaaggccactcttcagctcctgctgcctttgtgtgaatgggaaagccagcctgggaaatgcccagccccatcagagggcctatcagcccactgtagaccctggccttcacaggtggtgctttgccatcccaggagactgggaaaggttgggatgatggcagctagggtggatgatttcatggtgattgtgcctgatacataactgggtcctatttgtagagtagaaaaacaactattcgggtctgtacgtttatttgactctgaacattgttcacactaagacacaggtcgcttctagttgttcccttccatgtatgtaaatacgaggcatctggccagagcagggcacctgctttcttgtggtaggtgtgtatttgtcagggtccaatcgggaaacaaagaccactctaagtatttaaaatagaagaaacttaatgtaggaaattggttacacaggtgatagaagagctgacaaaccaatcggaaatgatgaggcagccctgaagttagcatcagcaggaagctgctgtcacccgcttggctggagggacccagggaagaggtgatgttaccagagcccaggtgccaggatcacctggaacaatcgtgagccagcctggtgggagctgggtctaacaaagagatgtggctattgctggagtggccatgcacaccaagaaaaagtgggagaagaaactgcgctggcttcttccatcccatcctccagggcctcaccctctgcccccagtgcctcccaccggttgctgtcagctgagcacagcagcctagaggagtcagctcccctgtaacacaaagcagggctgcagaaaggccaagaatgcatttgagggcagaccccagtgattgccccagtaggacactattcagaattactgctcagtttctagtatttttaaagtcagctttaataaggtgtaacttacataccataggccgggcactgtgactcatgcctgtaatcctagtactttggcaggccgaggtgggaggatcacttgaggccaggagtttgagaccagcctggacaacacagtgagactctgtctataaaataaaaatgaaaaaattatcttgccttggtggtgtacgcctatagtcccagctactcaggaggctgagatgggaggattgcttgaggctgggagttgaaggctgtggttgagctatgaccatgccacagtattccaacctgggtgacagtgagatcctgtctcaaaaaaccaccatacaataaactaaaattttaagtgcacgatttgatgagtttggccaaataaacacacccatgaaactaccaccacaatcaagatatagaatattatatccctgtgttaggccgttctcatattgctataaagaaataccagagactgggtgatttataaagaaaacaggtttaattggctcacagttctgcagactgtacaagcatggcattggtgtctgctcagcttctggggaggtctcaggcaggttttattcatggcagaaggtgaaggcggagcaggcagctcatatggtgagagggagagtgagggccggtggcacgacctctactcactgcaaccttcaccttctgggtttgagcaattctcctgcctcagactcccgactggctaggattacaggcacctaccaccacacctggctaatttttgtatttttgtagagacagggtttcaccatgttggccagactggtctcaaactcctgacctcaagtgatctgcccgtctcggcctcccaaagtgctgggattacaggcatgagccactgtgcccggactcagtgtgatttttacatttgttggggtttttattgtcactacaggagtgaagacctttcacattcttctacatcttaattggaagcagaagtctcttgtaaggtttttgacaggtgacccaacacaaagtttattctagaaaggacactggtctaatgagaccttttgtgtgttaaagctcagggctggcttagaaggaggatttattgggattctatttgtctcttgccctatgaatttcctcttacagacacacagtatagaaaagagggccagggagacaggatggttgatggcaagtcagtgctctggcacacccatagctcatggcaatgctttgaggtaagcaaagtcagacacttcaggtgaaggactgaggcacagaagggctaagtgccctcctcaaaattcaattgggtaataaatggtgtgaaaatagccaggatctagctctatatgattcccaatccagtgttgtgtttttattctgtgcattttttacataagtaatagatgtgttggctcatgcctgcagtctcagcactttgggaggccaaggcgagaggatcacttgagcctaggagtttgagatcagcctgggccacatagtgagaccccatctctaccaaataaataaataaaaataaaagctaggtgtggtcatgcgtgcctgtattcccagcactctgaggcaggagtttcacttgagcccaggagcttgagcctacagtgagccgtgatcacaccactcagtgcattccacttgggcaacagagcaagaccctgcctcaaaaaaacaaaagtgataatagatgaatatgtttgtatattactgtgaaaaactgaaaaacaatccatttaaagcagttatccctctaaactctaatctcttgtcccgtccatattccggaagtaacctgtcttgtcagtttggtgtaatatccttggagacaattttctatgtactttacatactgtgaaaatatgtcatactgcagagtttttaaactataggaccacacaggaggtatactgttgtttttttcacatagtaatcgatgcttagagatctctccatgtcactacaataactgctcagttagtcattcatttaacagacacttattgatcacctactttgtgccagatccagttctaagtacagtagttaacaaatcagacccaaaaagtctccaccctctcggagcttgcattctaaaatggggagatagaataaaaaaaacctaaatgtattaaaacagtttagggtgatagggtagccagtaagtaggatgggaagattgtaattttaagttgagtgctcagagaagaccacacctrttagaaagtgacatggagcaaagatcagaaagaggcaagggaacataccatgtggtatgtgggggaagatcatttcaggtagagggatcagcatgtggaacagcaaggaagcttgtgtagctggagcatagtaggtgatcggggcacaggagtggtaagagatgaggttggagaaataactaggaccacatcttgtagatccttacaggccattggaagaaaattggtgtttgctctaagatgggagccactggtgagttttgagtcgaaggatgacatgacctgccttacagcgcagaggatcactatgacttctgtgttgagactagatagtagagaggtaagtgtggaagcaggaaatgacatggcttggaccagagtggtaagggtgggctttatgaggagtgggtcaatttcagatgtagtttgaaataaaagccagtggaatctcctggtccaataaatggtgttagaggaaccaaacatgactgcaaagtttttggcctgagtaagaggaagaatggattggccatttaacaagaagaggaagactgtagaagaacaggtttgatgggacaatcaagagtttgatttggggccagccatggtggtgcacacttgtaatcccagcacttgaggaggccaaggtgggcagatcacttgaggccaggagttcaagaccaccctggtcatcatggctaaacgctgtttctactaaaaatgcaaaaattagctgggcctggtggtgcacgcctgtaatcccagctacttgggaggctgaggcatgagagtcgcttcagcctgtgagttagaggttgcagtgagctgagaatgcatcacaccattccagcctggatgacagagttgagactctgtctgagggggacaaaaaaaagtttgatttgggacacgttaagtttgaggtatcaacatgcaaatgagttgctgagagggcagttggatatgtgagtctggattttaggggagaggcctaggctggagatagaaatttggaagtcatcaaaatatggatggtttgaaaagtcatggcaatggatgatcaagggatctagggtagttaccaagaaagatgaaatgtccaagggtactgccaagggacactccaatgtgaaaagatcagagagatggactaaagtaggagaaaatcgggcgagtgtggtgtcctgcaaatcagatgataaaagtagtccaaggaggaaggggtgcacggttgtcaaatgcacatgtatgtgaaataggacaaggagtgagaagggagtggtggattcagcaatgatgccaacccactgacgcagaaagtccagcatgagaagcactgatgtctgggtctccagagattcagatttaagctcctaggtgattgaattttttttttctttctttcttttttttttttttgacatggcgtttccctcttgttgcccagactggaggacaatggtgcgatctcggttcactgcaacctccgcctcctgggttcaagtgattctcctatctcagcctcccgagtagctgggactgcaggcacctgccaccatgccctgctaatttttgtatttttagtggagacagggtttcaccatgttggccaggctggtctcgaactcctgacctcaggtaatctgcccgccttggcctcccaaagtgctgggattacaggcgtgagccaccacgcccagcctcccaggtgattctaatatgcagccaagattcagacccactgtcaaagtttccttctcttaattgtgaaatggccttaattgccagaaacagatgttgctggctgattcaacataggagtttttatctgtaggcttgttcttggataccttgggatctggaaatgataagcagatccaaaagctgattattaaccactaaagggattagctatttaacacctgtcttaaagtggcttttaagctgaaaatctctttgcttttaattttttcaaatgtttgatttttgttttgtttatactcaaaagactttttgttttgagtaacaagggtaaatttcaagttaatgagaaaattcaagggaaatcttgatgtaactggtccaaaaaactaaaatccaaacaaacctgagctcatatcactaattaggcattagcttgggcaacatggtgaaaccccgtctctacaaaaactacacaaattagccaggtgtggtagtacgtgcctgtagtcacagctacttgggaggctggggtgggtggatcgcttgagcctgggaggttgaggctgtagtgaaccgagatcgtaccactgcactccagcctgggcgaccctgtctcaaagagaaaaaaaaaaaaaaagcattcaagtgagtttattgagtttagtacattcttttcagaatcatgaatatttcacacctcaaaagttggctaattacagatgtagaaatgttgtgcctcataaaagtttcaatctttttcatattcttgccacagacattagaaattatttaaatgctctagtaaatttgagttggtatctgttggctcttaaaaattaaagaatattatacaatggctgtgcaacaagagatccagtttgcaggttagttcaattagattctatatgacaaaaagaggaaagataaaatatgttagaacaggatcaaggtagaaaatggaaaaagtccgagtcaaaatacaggcttaattattacaggtttccagaaggtcgccaagtgtctagattagccctttccaacccaggttgggttccacaagagaattaagtcctaatgcccgctggcatctattgtatgaagtgattgaatttctcttctgcatccggaatgaggctggctacgtaccatccttgggagcactgaaaaaatagtcactcaaataatcaaataattttttccagggattaattctgtcatggaaccccggttgagaaagtctggccattttagatactaatttgacatctgggatgatgcagtagtttttgaggtgcatgtcctcaggaaagaaaacataaaagagcctattgtggccgggcgcagtggctcacgcctgtaatcccagcactttgggaggccgaggcgggtggatcacctgagatcatgagttcaagaccagcctggccaacatggttaaaccccatttctccttaaaaaaaaaaaaaaaaattaaaaaattagctgggtgtggtggtgcacacctgtaatcctagctacttgggaggctgaggtggaagaatcgcttgaacctgagaggcagagttgcagtgagctgagattgtgccaccacactccaggctgggtgacagagtgagactccatctcaaaaaaaaaacaaaaaaaacctattaccaagaaattaaaaagaataatttattcacttattagaatggttattaataaaatatacccaggaccaccttgtataaatcccagcaatgattttctgaacattttaatatgtatccttacagacttttgtctatgtacattaacatgtgaatgtgtttatttcaaagaatggggtcatgcttttcatttagttcaggttttttccatgagatgttactgttacggatgttcctctgggtaattacacgtggatctgtccctttataatgattacgttattctgtagtctggttgttgcaaaatatattttgctgttcttccgttaatggacatctgagtcatctccagttcattactattacaagcagtgccataacaaacatctttgttcaaaaaattcttgaaaaaagatgtacatattacagattctagaagtggaatcgttgggtcaggatgggtacctgttttgtttttgtttttgtttttatcatgtaaaatcacaaatatatttaaaagtagggaatagtgtaattatcttaggcagggttctccagaggaacaaaccaataggatgtatagagatctagaggaagagatggattatgagaattgcctcaggtgattctagaggctggcaagtcccatgcaagctggagaaccaggaatgcttgtggtgtgatttggtctgagtccaaaggcctgagaaccagggatgctgttggggtaagtcctgaagccagaaggtccaagatccaggaactctgatgtctaagggcaggagatgatgaatttcccagttcaaaaaaagaaaattcactcttccttggcctttttgttctcttggtaccctcaatggattgcgtgatgccacctgcattggtgagggtggtcttctttactcagactcttgattcagatgctaatcttatccagaaacaccctcatagacatacccagaaataacgttttactagctttctggtcttccttagcccagtcaagctgacacataaaattaaccatcacaataataaacccccatctaccccatatccactttgataattatcattgcatggccaattttgttcccctttgcccccacccannnnnnnnnnnnnnnnnnnngggtcgttctttggggatctaccgttgaggtgtttgggctcttatccgactcttgtgtcgtggctactatagtcgttcctttagattgggtcagtttttgcgggtttactttattatccgcgagaaattttgcagtttgtctgtgcttgctcaaattttcctcaattgtctttccttatctttcttgcttttaatataatttgatgtgcagagtctcactctgtcacccaggctggaggcagtggcacaatctcgctcactgccacctctgcctcctgggttcaagtgattctcctgcctcagcctcccaagtagctgggactacaggtgcctgccaccacacctggctaatttttgtagaggcagggtttcaccatgttagccaggctggtctcgaattcctgaccttaagtgatccacccgccttggcctcccaaagtgctgggattacaggtgtgagccactgtacccagcctcatatgttttatagtggatttgtttgaatcacagtccagactatgtatgttgcatttagttgatatgactcttaagtcttttttattatataggtttcctcttcacttattttttcatttccttatgatttacttgttgagatagaatcaagtagggactgagtgtaattgtataaggtttactggtgtggatcttaagcagtggctacattggaaaatgaaaactattatttagaaataatttttctgttaaagtacagcatccttgcacctgtctttcagcatgatgaatgcgtatatgtatttcactgtctttttaaaaaaaaaaaaaaaaaaaaaagcagggtctcactctgtcgcccagactggagtacagtggcatgatcttggttcactgcaacctctgcctcccagtttcaagtgattctcctgcctcatactcccaagtagctgggattacaggcgtgggccactaccacccggctacttgtatttttagtagagacaggttttcaccatgttggccaggctggtgttgaactcctgacctcaaatgatcyacccgcttcggcctcccaaagtgctgggattacaggtgggagccactgcacctggcctctactccattgtcttgattgattcatttgtgaccttataacatctatctttcaggagaaacagcacaggtgaccgtgagaaggctctgcagatcatgctccaggttctgcagagctgtgatcacccgggccccgacatgttctgcctgtgtgggaggatctacaaggacatcttcttggattcagactgcaaagatgacaccagccgcgacagcgccattgagtggtaaaccctcagcccgagttatsagcacttgcatctcttcaagraacagaatcgcataggctaaggatgtgcatctcttccttatgtatatgtctgtctgttggcagggagcaaacatttgtagtaaatgtggtctgggaattttcagattccctttttgagagaaaaccatgagaaacagggttttctactggtcacactcttcccacaggtacacttgtttatgggccaagaaggaggcccagcacactccttccgagctcccacttccagagccttgtccaccaccaccagggcatcatcttcccagtgatctgttcattcattcacttattcattcatttatttaacaatgttcagtgatggcttactgtgtgccagaaacttttctaggtggtggggatacagacacaacggacgtgaatcctgcccttgggggccttgcattgctggtgagggaagttaaagaaagtgacacattaggatgtcatctgagggctatggggaaaggttaagcagggaaggggataaaggagggctcggaggggtggtctgcaattttaaatagggtagtcagtgaaggtgcctaaagatagaaaagtgataagggagtgaacttcacagataactggagaaagtgttcttggtggaggaaacagcaagggcagagactctgaggatgaagcatggcaggcacactccaggatggtcagcactaagcaaggggtgagtggagagcaacatgaaacaggaagagggtaagaccttcttgctctgagtgagaaggaacatcaaatggagggtttgagcagaggagtgacaagattggacatgcattttaacaagagtactcactgttatgcaaagaatatattttagggagtgtatcagctatcacttgctgcgtaacaaccccaaaacttagcagcttcgaacagcaatgattatgatttttcatgattctgtggctttgccaggcacttcttctgctggcttcacctgggctggcttctaaaactgaagtcagctgtagggtcaggtgtggctggaagatccaaatgaccccgtacacatttggcagctggtgttggctactgatactgtaccttagctctccaccatgtggttctaatcctggtagaccagctttcttacctggtatgcagaactctaagagagtgaacaagggagcagcaaagcctctagaggcttaggttcgggaactcacacgtggttacttctgccacatgctattggtcaaagcaaatcacaaggtccgcccacattcaaaagggtggaggaatgtgctccacctctggctaggaggaatagcaaagttgcattgcaaaggtgcatgcatattgcgatgggaggaatttgtggccattaaacagtctatcacagggacaaggacagaagcagggaacaggagaatatagcagtaattcaggggagagctggtggtggcttgagccagggtggtggggacaaaaatgttgagaaagttggatgcaggatatattccgaaggtggaaccaacaggcccacatcattcatttccatcataagagctcttgacattgctgttctgctttcattcaattctaactgcttcctctctctctctctctctctctctctctctctctctctctctctctctctctctctctctcttcctttcatacacacaggaggctctgtcctccccaccttctctccatccacacttacttctctgacaatcccagccactctcacacctagggacccttagctggagctctccaacccaacatcctaagtgatggccttacacctccccccctttgtccacctgttctacctcaagatgatgttgatatttcagactcaacattttgaaggctgaagtcatttactcttctccacaaggtatggcttccaatgtcttactttcttactactattctctaccctcctaggtctaaactttcagtcagtgttggattcattttgctcacttacctccccgtccagtcaggccccatttgcagcccttctgcgagccttctttcactgcttgccagtcctttcccatcaccactgcccccagtcactgccattttctttttaactttcttgccaggaatgttctaacagtacccaagtagactccctgcttgctgtctgctcagtctatccttcacagatttatagcttattcttcctaaagctcaagaacccaccatggctccctgctccctgctatataaaaattcagactctcagatcaccattctaggtgtcctgaacactttctccaacctacctctagccttgtttcccactacctggtgtgtgtccaactaaactgtagttcctaaggagttttccaaactcctgtctctgttcctgttttctatgctgagggctccctttccaaatcactgctgtttcatttctcttgccctttttttttctttttttgagactgagtctcactctgtcacccaggctggagtgcagtggtgtgatctcggctcactgcaacctccacctccctggttcaagcaattcccctgcctcagcctcctgaatagctgggattacaggcacatgccaccatgcccggctaatttttttgtatttttaatagagatggggtttcaccatgttggccagactggtctcaaactcctgacctcaggcaatccacctacctcggcctctcgaagtgctggtattacaggcgtgagccaccacacccggcctcatttctctttatttttatgccatatctcaagtatctaggtgagatagccctatatgtcttctgtgagttcctccagacttgaatttgtgtgattttaagatgccatattcttgcttacattgtcactaattatgtgtagatcttattcccttccaccatagtgtaagtccttggaacataatgacctcattttctttttttaaatttccagtagttcctaatgcaccatgtggtggagaggagtcactcagggtatcgaagggaagttaatgtttggtaaagccaaaacagaaaactgtgttcccactatggtggtggggaattcagtccccaggtcagaaaatcactgcctttggttccttcaagaaagtcctaggagtttttctccagcggcttcagaaggtggtggcggtaggtgcagaagcaaatgaagcttcgtcttctgctcagggcgtggtggctgtggataagatctatcttggatatcatctaacccacactctccagtgcagacacggagcatatggctcagggaggtagggagctggtccaagaccacagggctggttagtggtgaatctggaactatggtcctgcctggagttcagatcttctctgcccctaagttgggcctgcttgacttctggaggagcaaccctttctgccctcttctcagtatgacttttcatagtagaagaaaataaaacagtcacatctagaaggatgtagaatttaaaattcccaaaacacacaggaaaaaaagggttgaattttgttgactaaggtaggaaggactttctcggtgtcctctgatctgagggtatttgtattatgcctcagaattgataatgccatattttaactgacttcaatgataacttctcctttcaagaattaatattttgttgttgaattctctggccatcacataagtgacaaaattactactagcaagtctttggtataaatggtgccacttaaagacatttgtgtcattacttcattgagttctttttttcctgcctataattttcatactcgttcatagaacagaaatgaacttttcatgtatagaaaaagatgagagtgaaaatgtcactgttaacctttggtgtaaaaataggattcccaattttgtatcctgttgcttatcctgatatagtagatccctgtccctggcctcactttgccactgctcctatagttatttgggatccaggattttggcaatacggcttcctgcatgaaaaaacaactccatattgttaaaagcaaacaaacagcttgcagagaaatggcctaccattgatgccatttcgatgtaataaaaaatactcaatgcataattggaatccaactttagaaacaaggtttaggtgggcagggtggctcatgtctgtaatcccagctacttgggaggctgaggtgggaggatcgcttgagcccaggggttcaaggctgcagctatgattgtgccattgcactccagcctgggtgacagagtgagaccctgtgttttaaaaaatgaaaaaaaaaatgcataggtgtgtgcatgatggcacaaacctgtggtcctagctgcttgggaggctgaggtggaaggattgcttagatgcaggagtttcaggctgcagtgaactatgattacaccactgtactccagacatcaaatcgtggtgatcttttgggagtaggattagaattgattttaaatttcttttgtgtacttcatgatgatttccctattttatatagtccctgaggcttttataataaaaatcctatgagcaaaaaaaaattaaaactccctagtgtaagttactgtgttgctattatgactttttttttttttttttttttttttggagacagattctcgctctgtcacccaggctggagtgcagtggcacgatcttggctcactgcaggttccacctcccgggttcaagctaattctcctgcctcagcctcccgagtagctgggattacaggcacacaccaccacacccagctaatttttgtagtttttttgcagagatggggtttcaccgttttggccaggctggccttaaactcctggcctcaagtggtccacgtgcctcggcctcccaaagtgctgggattacaggcatgagccacggtgcctggcctattaagacatttttaaagttactagagagctgcatgtggctgttggtaaaggtggtggtgggaggcgaggggaatgggcaacaacaaatttagagaaagaaaacttttcatgagaaagttgstttataccattatttaaacattttttgttgtaatataataatactttggtggttctgtaattataggtatcgcaaagggtttgaactccagtcatccctctattcgggaattaatcttgcagttttgctgattgttgctggacaacaatttgaaacttccttggaactaaggaaaataggtaaagctgcttattattgcagatgttgttgctttgattatacaagtttggcattaaaagttatgttgaaataactagcattatatcattatatttctattctttttttgagacagagtcttgctcggttgcccaggctggagtgtagtggtgtgatcttggctcactgcaacctccgcctcccgagttcaagcaattctcctgcctcagcctcctgagtagctgggattacaggtgcccaccaccacgcccagctaattttttttgtatttttagtagagatggggtttcaccatggtggacaggctggtctcgaactcttgacctcaagtgatccgcctacctcagcctcccaaagtgctgggattacaggcgtgagccaccgtgcccgtactactagaattatatttcaaaaggaacaatcagttacttttcctatagcacacctgagacagcagccaaaataaaatacctgcttatcctcagtatgacagaaactaaaaaagattattctgactatcaaaaattcaaattcttaaggtgtccggctgaacagtttgttgggaagaaaagggagcttggagaaaatgaacaattactgggatgtgggtcagttcttcagcgtcrgcatgctggcccatgatgtcgggaaagccgtccaggcagcagagaggttgttcaaactgaaacctccagtctggtgagttgtgtctgtgtgttgtcatcacccatctcaatacatgatcttgttctgaaatgtcttccttataatcactatgtttctccttctgacttttcattaaagcaaagttagcacagacacaactgctctgagaattcccttgcttttatgtgaagggagggaaagacagatccacacagaatatatccctgcctgctccacccctgagattaggccttctattctattaatttctgcaggttgtctaggtcctcaagagaaaaacactcttggctactagtatgtattatgcatttgtgagaaagcatataataaaatgaaaaaagcacaccaagaaaatgtttatcacaaatgaaaactggaactaaaagaacaataatagggtatggtaaataaaacggtggcacagcaacagccttacacggccatttaaatgtgcaggaaagaatgtttggagatgtggaagtgtgttcgtggtttgttgtagagtaagaaaagccagtccccgggtaagtttttctgtatcagtggttctcaaattctgttgtgtgtcagaatcaacctatgttgattaaaacacagactgggtgtagtgacttatacctgtaatcctggcactctcggaggccgaggtgggaggattgcttgagcccagtagcttgagaccagactgggtaatagagtgagacccagtgtctacaaaaaaaaaaaaaaatagccaggcatggtggtgcacgcctgtggtcccagctactcgggaaggcagaggtagaaggatcgcttgagcctgggaggtcaaggctgcagcgagctgtgattgcacaactgcaatccagcctgggtgacagagtgagaccctgtctcaaaaataaataggtaaaataaagaaagaaaacacagattgctgggcccactctcagaatttctggcccagtaggtctggggtggacgcctgagaatttgcacttacaaattacaagctgctgctgctgctctggtgaccacactttgagaaccactgttctatatgatcttgttttaattaaaaatatgtgtttggcatgtgacttgtagggaaaggcccaggaggggtggacagtattggatttccccatagacatgaagctccgttagaattgtggtaacaaacctgcatgttgcacacatttaccctagaacttaaagcataaaaaaatatatatatatatgtatatatatgtgtgtatatatatgtgtatatatatgtgtgtatatatgtgtgtatatatatgtgtatatatatgtatatatatgtgtgtacatatatgtgtgtatatatgtgtgtgtgtgtgtgtatatatacatgatttgctggaaggactcacagaactcagaaaagctgttacactcttagttatggtttattacaatgaaaggatacagattaaaatcagcaaaggcagaaaggtacatagggtagagtccaggagagaccacgtgcaagcttccagttgtcctttcccagtggagtcatgtgaatagtgcttaattctcccagcaaaaatgtgtgacaacatgcatgaaatcttgccaaccagtaaagctcattgagccttaatgtccagggtttttattggggatgggtcatgtgggcatggagtcttcatgcagctgatattaatacctcagctccaacctctctagaggtcgaactgatacagtgtggcccagggccccgamgatgaatcatatcgttagcatagactatctgggatggcccaaggtcccagataaacagagatgctcttagctggcagtatatcccaagggcttagaggtgatctcccaatagccagtccagggccagatctttcttttgaatgtgtggagttgggacaacacaggcctgctgagtgcccaagcaagtcggttggagtctagctggcctatcttcccaggatagctccagcttttatccttaaagagcaaaataatactatgatgctttcagttgaaccattccgtttagtaccaaagaggttgtgaccaccactgcctggcaactatattccaaaaagttcagtttgcctgaaaagagcaaaggtgtggtcagagtcaagatgtcataacatcaaaatctacctagtcagattctaatatttcaaaaaataaaagacagtgagtttgactagtgattgccagaagtaagggagggggtgggatgggagggaggtaggcgtgatggtgggaaggcaacacaaggggtccctgtggggatggaaatttctctaacttgccttgtatcagtgacaacatcccggttgtgatacagtactatagttctttttttttcttttttttctttttttcttattatactttaagttttagggtacatgtgcacaacgtgcaggttacttacatatctatacatgtgccatgttggtgtgctgcacccattaactcatcatttaacattagatatatctcctaatgctaaccctcccccgcccccaccccataacaggccccggtgtgtggtgttccccttcctgtgtccatgtgttctcattgttcaattcccacctatgagtgagaacatgtggtgtttggttttttgtccttgtgatagtttgctgagaatgatggtttccagcttcatccatgtccctacaaaggacatgaactcgtccttttttatggctgtatagtattccatggtgtatatgtgccacattttcttaattcagtctatcgttgttggacatttggcttggttccaagtgtttgctattgtgaatagtgccactataaacatacctgtgcatgagtctttatagcagcatgatttataatcctttgggtatatacccagtaatgggatggctgggtcaaatggtattactagttctagatgtctgaggaattgccacactgacttctacaatggttgaattagtttacagtcccaccaacagtgtaaaagtgttcctatttctccacatcctctccagcacctgttgtttcctgactttttaatgatcgccattctaactggtgtgagatggtatctcattgtagttttggtttgcatttttctgatggccagtgatgatcattttttcatgtgtcttttggctgcataaatgtctttttttgagaagtgtctgttcatattctttgcccactttttgatgggattgtttgtttttttcttgtaaatttgttggagtttattgtagattctggatattagccatttgtcagatgagtagattgcaaaaattttctcccattctgtaggttgcatgttcactctgatggtagtttcttttgctgtgcagaagctctttagtttaattagatcccatttgtcaattttggcttttgttgccattgcttttggtgttttagacatgaagtccttgcccatgcctatgtcctgaatggtattgcctaggttttcttctagggtttttatggttttaggtctaacatgtaagtctttaatccatcttgaattaatttttgcataaggtgtaaggaagggatccagtttcagctttctccatatggctagccagttttcccagcaccatttattaaatagggactcctttccccattgcttgtttttgtcaggtttgtcacagatcagatagttgtagctatgcggcattatttctgagggctctgttctgttccattggtctatatctctgttttggtaccagtagcatgctgttttggttaccgtagccttgtagtatagtttgaagtcaggtagtgtgatgcctccagctttgttcttttggcttaggattgtcttggcaatgcaggctcttttttggttccatatgaactttaaagtagttttttccaattccatgaagaaagtcattggtagcttgatggggatggcattgaatctataaattaccttgggcagtatggccattttcacgatattgattcttcctacccaggagcatggaaagttcttccgtttccttgtatcctcttttatttcgttgagcagtggtttgtagttctccttgaagaggtccttcacatcccttgtaagttggattcctaggtattttattctctttgaagcaattgtgaatgggagttcactcatgatttggctctctgtttgtctgttagtggtgtataagaatgcttgtgatttttgcacattgattttgtatcctgagactttgctgaagttgcttatcagcttgagattttgggcgagacgatggggttttctagatatccaatcatgtcatctgcaaacagggacaatttgacttcctcttttcctaattgaataccctttatttccttctcctgcctgattaccctggccagaacttccaacactatgttgaataggagcggtgagagagggcatccctgtcttgtgccagttttcaaagggaatgcttccagtttttgcccattcagtatgatattggctgtgggtttgtcatagatacctcttattattttgagatacgtcccatcaatacctaatgtattgagagtttttagcatgaagcgttgttgaattttgtcaaaggccttttctgcatctattgagataatcatgtggtttttctctttggttctgtttatatgctggattacatttattgatttgcatgtgttgaaccagccttgcatcccagggatgaagcccacttgatcatggtggataagcttttgatatgctgctggattccgtttgccagtactttattgaggatttttgcattgatgttcatcaaggatattggtctaaaattctcttttttggttgtgtctctgccaggctttggtatcaggatgatgctggcctcataaaatgagttagggaggattccctctttttctattgattggaatagtttcagaaggaatggtaccagctcctcattgtacctctggtagaattcggctgtgaattcatctggtcctggactttttttggttggtaagctattattgcctcaatttcagagcctgttattggtctattcagagattcaacttcttcctggtttagtcttgggagggtgtatgtgtcgaggaatttatccatttcttctagattttctagtttatttgcgtagaggtgtttgtagtattctctgatggtagtttgtatttctgtgggatcagtggtgatatcccctttatcattttttattgcatctgtttgattcttctctcttttctttattagtcttgctagcagtctatcaattttgttgatcttttcaaaaaaccagctcctggattcattgatttttttgaagggttttttgtgtctctatttccttcagttctgctctgatcttagttatttcttgccttctgctagcttttgaatgtgtttgctcttgcttctctagttcttgtaattgtgatgttagggtgtcaattttggatcttcctgctttctcttgtgggcatttagtgctataaatttccctctacacactactttgaatgtgtcccagagattctggtatgttgtgtcttttttctcattggtttcaaagaacatctttatttctgccttcatttcgttatgtacccagtagtcattcaggagtaggttgttcagtttccatgtagttgagcggttttgagtgagtttcttaatcatgagtactagtttgattgcactgtggtctgagagagagtttgttataatttctgttctttcacatttgctaaggagtgctttacttccaactatgtggtcaattttgaaataagtgcagtgtggtgctgagaagaatgtatattctgttgatttggggtggagagttctgtagatgtctattaggtctgcttggtgcagagctgagttcaattcctggatatccttgttaactttctgtctcgtggatctgtctaatgttgacagtggggtgttaaagtctcccattattattgtgtgggagtctaagtctctttgtaggtctctaaggacttgctttatgaatgtgggtgttcctgtattgggtgcatatatatttaggatagttagctcttcttgttgaattgatccctttaccattatgtaatggccttctttgtctcttttgatctttgttggtttaaagtctgttttatcagagactaggattgcaacccctgcctttttttgttttccatttgcttggtagatcttcctccatccgtttattttgagcctatgtgtgtctctgcacgtgagatgggtttcctgaatacagcacactgatgggtcttgactctttatccaatttgccagtctgtgtcttttaattggggcatttagcccatttatatttaaggttaaaattgttatgtgtgaatttgattctgtcattatgatgttagctggttattttgctcattagttgatgcagtttcttcctagccttgatggtctttacaatttggcatgtttttgcagtggctggtactggttgttcctttccatgtttagtgcttccttcaggagctcttttagggcaggcctggtggtgagaaaatgtctcagcatttgcttgtctgtaaaggattttatttctccttcacttatgaagcttagtttggctggatatgaaattctgggttgaaaattcttttctttaagaatgttgaatattggcccccactctcttctggcttgtagagtttctgcagagagatcagctgttagtctgatgggcttccctttgtgggtaacctgacctctctctctggcttcccttaacattttttccttcatttcaactttggtgaatctgacaattatgtgtcttggagttgctcttctcgaggagtatctttgtggtgttctctgtatttcctgaatttgaatgttggcctgccttgctagtttggggaagttctcctagatactgtcctgcagagtgttttccagcttggttccattctctctgtcactttcaggtacaccaatcagatgtagatttggtcttttcacatagtcccatatttcttggtggctttgttcgtttatttttattctttttttctctaaacttctcacttcatttcattcatttgatcttccatcactgataccctttcttccagttgatcgaatcggctaccgaggcttgtgcattcatcacatagttcttgtgccttggttttcagctccatcaggtcctttaaggacttctctgcattggttattctagttagccgtttgtctaattttttttcaaggtttttaacttctttgccatgggttcgaacttcctcctttagctcggagtagtttgattgtctgaagtcttcttctcttaactcgtcaaagtcattctccgtccagctttgttccattgctggtgaggagctgcgttcctttggaggaggagaggtgctctgatttttagagtttccagtttttctgctctgtttcttccccatctttgtggttttatctacctttggtctttgatgaaggtgacgtacagatggggttttggtgtggatgtcctttctgtttgttagttttccttctaacactcaggaccctcagctgcaggtctgttggagtttgctggaggtccactccagaccctgtttgcctgggtatcagcagcagaggctgcagaacagcggatattggtgaacagcagatgttgttgcctgatcattcctctggaagttttgtctcagaggagtacccagccgtgtgaggtgtcagtctgcccctactggggggtgcctcccagttaggctacttgggggtcagggacccacttgaggaggcagtctgtccattctcagatctcgagctgcgtgctgggagaaccactactctcttcaaagctgtcagaccgggacatttaagtctgcagaggattctgatgccttttgtctggctgtgccctgcccccagaggtggagtctagagaggcaggcaggcctccttgagctgaggtgggctccacccagttcgagcttcccggaggctttgtttacctactcaagcctcggcagtggtgggcgcccctcccccagcctcactgccgccttgcagtttgatctcagactgctgtgctagcaatgagtgaggctctgggcgtaggaccctctgagccaggcgcgggatataatctcctggtgtgccatttgctaagaccattggaaaagcgcagtattagggtgggagcgacccgattttccaggtgccgtctgtcaccccttgctttgactaggaaagggaattccctgaccccttgtgcttcccgggtgaggcagtgcctcgccctgctttagctcacgcttggtgcgctgcaccccctgtcctgcacccactttccaacactccccagtgagatgtacctggtacctcagttggaaatgcagaaatcacccgtcttctgcatcgctcatgctgggggctgtcgactggagttgttcgtattcagccatcttggctctaccaaaaactgtactatagttttgtaagatgctaccattggagtaaacctggtcaaagatatatgggttctctctgtattggttcttagcacttcatgtaaatctaaaattacctcaaaataacatgtttaattaaaaagaaaatgagtttgaaattttgtcattttgtaattgctttgaactttgaactacagctgacccttgaacaatgtgggagttaggggctcagttgaaaattcaccaaaaacttaactacgaatagcctactgttgactggaagccttaccaataacataaacaatattttgtattttatattttgcaaaaagtgcaggattttcgcaaccactgacaactgcagtgacggcttcatgaatttccttttctgtttctcctacgatttttaggctggcttcatttatcttgaaatggcagcagccgtaactgcagaactcaatctgcaatacatatcaagcaattcaactttttctggtaatgtcatgacttttctcggcttcttgggagcatttccagtatcactagtggcactctctatgggtcccatggtgttattcattgtttatggtgtcacactaaatacaatgaagaatgcacgagaaccgtgagtgatcactttttactatgatctgcaatttactggagagacgaacttctcatgcaaaaatgatcagtctcacacggtggaagttttttttttttggttgtttgtttttgagacagagtctcgctctgttgcccaggctggagtgcagtggcacaatctcagctcactgcaacctccgtctctcagcttcaagcattccttctgcctcagcctcccaagtagttgggactatagacgcctgccaccgcatcctgctaatttttgtatttttagtagagacaggatttcaccatgttggccaggctggtcttggactcctgacctcaggtcatctgcccacctaggcctcccaaagtgctgggattacaggtgtgagccaccgcacctggccacatggtggagttttaagcagatacttacaacaggagctcaccacaatagcaacaggaggtggctatgaaattcttacagtagtgcagtatgcactacagttaattttatgcagttttgatataataccacatctttacatttgtttatatttttcttgactgggaatggtgccatatacagtctgtaagtgtgtgtgtaagttttggtacattttaactttttgtaagagatttgtatatatgttgggtagtaaatgataaaatggaccagtacctacatatattttatgtgttcatggcatacctagctttttctaatttttttttttatatttctaggcttcacagtttatctgcaaagtttttcaaattgtcgcacgtctccagaacattttccaatgtatctattgggaaaaaaaatccatgtataagtggagctgcgcagttcatacctgtgttgttcaagagtcagctgtgcctgcccttgttatttaaaacagttaccacatgctttccaatctccacattttaggcagtaggtactaaaattggggttagcacaatgttggtaaaaagccacgttgtgttattttgttggatggacttactttgcctactgctcgtgttttcttaattagttttgtggctgctgagcagtcgtttatgaagcactcatgacataatatgaatttaagtgaataaaagcttttggaaagcttcttttaaagggacttgaattgaattcagtttctttaggaatccaatatattgctgtttgtgatttttccaggtacctgcgatcattagttcagaacttgttactaattcggcgcttcaagaaaaccattattgaacactcrcccaggcaagagcggctgaacttctggttagatataatttttgaggcaacaaatgaagtcactaatggactcagatttccagtaagatatgctaaatccatttttttttaagattaggaaaaaaactagggattggtgctatttaactrttgaatactctgaactgaagaaaactgtagagtaattttaaatgttgggataaacatcaatcttatgtgaaatcagtaagtgatagatcagctcactcatagatcattggccatatcctctatagtagtcattctcaattggaagcaactttgtccccctaaggtacatctggtaatgtccggagacatttttggtggtcatgacttggggagaaggtggcactactggcatctgctggatagagaccagggatgctgttgaacatcccacaatgcacaggacagccccctccaataaagaattatccagcccaaaatgtcactagtgccaaagtggacaaactttcctctaaaacaatgtagcaccacgagtggaaacttggaattcagcgtggtttcctgttaagctttggtttgcctctaaggccactaattgatatttaaaagttaccaaaaaggcaaaattgcttttagcttttccttgagtttttgttttaatgttatgaccgtcttagagtcatgagtgaaatatgtgaatgtcttggaaattgaacttcagataattgtgttccatatttatgcgttgagaatttgtgaacatgccatttccaagaatttcattaagcatctaataaaatattgtttgaaatgattatgataattattttgttgccggttaataatacattttaaaatctttttttagttatgaaatatttcaaacctactgaaaggtacaaaaaaataatggagcagacaaccgcgtaatctctaaccaggtttagtgatcttaaacatgttgttttatttgttttggagatttattccctctctccctcctcatctcacccctcctctttctcttcccctcctcttttttttttttttttctttttttgagacggagtctcgtgcagtggtgcaacctcggctcactgcaacctccgcctcctgggttcaagtgattctcctgcctcagcctcctgagtagctgggattacaggtgtataccaccacacccatctaatttttgtatttttagtagagacagggcttcaccacgttggccaggctggtctcgaactcctgacctcaagtgatccgcctgctttggcctcccaaagtgccctcctccttctctcccgattttcttcctttggcctccttcttctctccttttccccttttctctttttcgtccccttctgttctttctccccaccttttctctccccactctcctcctcctcaccctcttctccctctctcccctcccctcctctcttttaacaaagtaacaccttactgatgggctatcacctctttttttatctcctttcatcttccccacccccccccccaagagatggcatctcaatatgttgtccttgaactcctgggctcaagtgatcctccgacctcaacctcccaaagtgctgggattacaggcgtgagccactgtgcctggccctcagtgaggatatattgagtacggacctccccgcctcctcgctgggcagggtgcgctatgttttctacccatgtacgttaacaggcatctgttcttgtttcaggttctggtcatagagccaaccaaagtgtaccagccttcttatgtttccataaacaatgaagccgaggagagaacagtttctttatggcatgtctcacccacagaaatggtaaggaggaaaaatcacaagcaatttaatcagttttcaaataggagagtctagatggtagtatttgaaggaaaasgcacccatgtttaacttctgaattatgagaatatatgagagagtatcatcacagatgagagacagtaggtttttccattttgtgtgtgtgtgggcatgtgtgtgtgtrggcatgtggtgaggtgtgggggtgggrgagtgtgtgtgtgtgtgtgtgtgtgtgtgtgtataaaaacattaaaacaaatacaggttggtttgtttttttatagttaaaccttagggaagtgggtagaggatacaggctggtgtgttgtttcacagctgtagtcccaacacttttggaggccaaggcaggcgggttgcttgagcccaggagttcaagaccagcctgggtgacacatcaaaaccccgtctctataaaaaataaatttaaaaaattagccgggtgtggtggtgcacacctgtagtcccaactacttgggaggctgaagtgggaggatcgcttgaacctgggaggtcgaggccacagtgagctatcattgcaccactgcactcgagcctgggcaacagtgagaccctgtctctagaaaaataaaatagtaatatatttttagaagcacttatactggctttcttgatattcctcaactattactggatcctgtggctttccagataaaactcagactcttttactaagtgttcaagtccctccctatataatcctgccccctcccttcctctttctcttcagccctcagtgccagtcaggctgtcctcttactcgcccctgagctgtccctgcgggagctcctgtctaccctttcatttccatccttgttccttttgggatttccttcttccgattatccaagtcctagcttttgcaaagtcatctttaaccactccttcattccttccgctgagtgtctgtaggctaccaattgcctgtatcatgcacagaagaacatcctaagaatgcccatacatgacttgtatgtttgtagctgtaggagctatggaacagttacccactcctgaacaaatgcctgttgattattacataaaatgtgttgtttacttaactagtaaatgttcctcccaaatcaagaagttctctaaagccaccgtggaatagacctgccattggggaagtctttggaaactcatgtggctaagctttctgtatatgtgcagcctcctgcaggtggctgtgggttagacaagactcttgagtctgccctggctcccatttctgtgcctgaatccaaaggccgactcctgctgtctgccactatcctctctgcatgactttggactcatgtctcctctgaagtacacttagcctttctatgcagttggatgtgatttgctggctttcatattctcctaccctcttatgagaagcctccagtggcttcctgtctcacgcagagtcaaagctgacatcccgagggtggcctagaagtcctgcatgatttgcccatgagctctccaacctcctcttctactcccatcccgctcactccactgtagccatatttgcctctttgttggtccccgaacgtgccaggcacacccctcctcagggcctttgcacttgctgttccctctgcctggaactcttcccccaggcatccacgtggcttccttcttcccccactttagctttctgttcagaagtcatcagcgacgcctaccctgaacatcctgttgaacaacgtgaccccctgccctatcttaatgcccttccctactttatttgtcttcataacacttttcaccgccccccatggtatgattttactatttaatctattgtccatctctcttcactcacatgcaaggcccatgagggcaggaactttgtggttctctgctgtgtcttcagtattagtactttgcctagcacatacatagtaggtgcttgatcaacacgtatgactaaaacttctcccatcggaaaccatcttcccagtctgttcctgttgtcattgctccaggatggcaagaaactagtcatgtgcctattcatggcagttctcttgagccaaatgctcagtcacatggttctcatacttttcttccctgggtggcttagttggtcacttgtgacattcctcaggccaaccaaatggaatttttttttttttttgaggcagggtctcattctgtcacctaggctggagtgcagtggagtgattttggctcactggaacctctgcctcccaggttcaactgattgtcccatctcagcctcctgagttgctgggactacaggcgtgtgctaccatgctcagctcatttttgtatttttagtagagacggggtttcagcatgttggccaggctgatctcgaactcctgacctcaagtgatcgcccccacacctcggcctcccagagcgctgggattacaggtgtaagccaccacgcctggcccaaatggattttcctacttaaaattattttctgcaattgtgatgtattgatgttattgcctatggattttccaaaactggagtttcagatgttccttctcaggcttagctttgtgcaaagtgtagtggtagtgaagggaggggaccgagttagtttttgtttgtaagtgcaacttgggtgctgtttgaaatcccagttagtttttttattagtcatggtaggctagcttctaaaacaaacagcccccaaatctcaatatcttaacatgataaaagtttatctatgcctcatgtcatatccaggttgcagagggtggcggtggggggcattccatcttgcagtggatggggaaagaggaaatagagggttgctgtggagtttttgagtcaggcctgcaggtgatgcacagcattcctgctcacatcccattggccaaaactccactgtatatctctctagctgcaagggaggctgggaattgtagttcagctctatgttcagggagaaaaggaagactgatgaatgctgaaaggtgtctgtcgcagtcttgcctctcccaacatttttgcaagtcactcaacttaggtgggctagtcccatgcttgttttagagtttgcctactatgttgacagaagatgaaaagccactcactgtgtgtttattctatgcttattatttctatctgaaacttagattatttcaaatttacatcatttaaactggattagagatacaaatgaatttttataatacataagaaaatgtttctggtgttccatgttatacaaggtgtattgctgtaacccgtaaaaaaatcaccactgcaggtaaaatagcagaaatgattgaccatagaatgaaacaaaaaaaatcatttgctttaaaaaactcaaactattgacttctgkctttgataacttgcagaaacagatgcacgaatggaattttacagcctcttccataaagggaataaggtaagaacataggagaaaatggagttactattttaatgcaaatgatgataatgttttatgcactttaatgtttccacttactcataatatggaatgttcttatttttaatggaatccaaagtggactctctattatgttgtccttcctgagctagttattaatactagtgtactcctagtgagaacttcttgggttattataatagagtagctttgctcatattcagcagactaaactcacttgtgccattttttttaaagaagtgatcrgtaggaagagaagatgtatcttttttgagccaaagatgttcaagtgctcagtgactctgagaactgaagccaggagatgattagtggcaacactcgggttggggtcttgtgaacagagtaatggagctgggagatttttttcagggagggcatgaggtggtgtattctcgggagaggagtagctcttgcattttggttcaggagtgatgacagtttgagcctgagctgtgtggccttacccaagcagggctaaacatctcagctgcacttgtcaccctggcagctcattcgagggtgagactggctgtgaagtagatgtgagttctaatctctctttgctgggtgatgttaggaaagtcactcagcttctctaagtctcagtttcttccctattttcttcaaataaagggcttgtactagaacattcctttctctgactctgaggctacctcagccactgaatgaatccccagttacttctagacatagtgtgatcctgtcctggaaacatcagtattgaaattaggataccatcaacatcacttaaaaggagggaaataatttaagtacaaagtagtgcattgggatgatactgcccaggaaatacaaggcaatttgaaatacactcagcaaagcatacacaaagcagcagaaaagggaataaaatatggtctctgtcctcaaggagtttatagtctcatgaaaaggaaaggtaaggtatttgagaaataatttattgtggtattacaagaatttctagactcggaaaatatcaggacacagtatttgtggccacacgagggaaatggaaataaacacggcactgtagctcaagaaaggcctttctttaaatgttatctggtccatctccacccagtgtgtgtacctgactctacagctcatccagcaagcaatattcagcttgcctgagcatagctagtgacagaaaatctgctagtaaaatatgtatttttattttttaaattattttattttattttatttttttgtcttgctctgtcacccaggctggagtacagtggcacgatctcggctcactgcaacctctgcctcccaggttcaagcgattctcctgcctcagcctccagagtagctgggactacaggtgtgtggcacaatgcctggctgatttttgtattttttgtagagtcagggttttgccatgttggtcaggctggtctcgaactcctgacctcaagtgatccgcccgcgtcagcctcccaaaatgctaggattacaggcatgagccactgtgccttgtgaagattttcaaaaatgtgttacttagtaattaagttgtgttagagcaggtagtcaagatccttctgtttgtgcctcctcatagagatacctctaggtgccatttcagccatcagtggggatttacaaagggcctgagggcgtatcatcctcgccccacccctccccgggacccatgtgacctgaagagtatactttgagcgttccagaggctctccaactaactgtggtggttgctttacagattgattttcaaaacctgctcacttataatctagttctaattctttttgaatctcctctgtactcttggtgttccaacccagtgtttgtcatgcaatctataacataaagaatggtctaggacagtttggatctcagcaagagataacttagaaaggatgagataaagtggcttcagttgtttgaagggacaatgatagaagagaatctagccttcctctccataatacctcctggcatgagggccactgctctctgacatacaatctactagcagatttcctgtcactggctatgtccaggcaagctgaatattgcttgttggatgagctgtagaatcaggtacagaccctgggtggagatggaccagataacaaacatttaaaggcctttcttgagctacagtgccatgtttatttccatttcccttgtgtggccacaaatactgtgtcctgatactttccgaatctagaaattcccttaataccacaataaattatttcacaaataccttgcctttctttttcatgagattataagccccttgaggacagagaaccatattttattcccctttctgttgcccgtatgctttgcttagcactgaattatattaagagtaagttcatattaaggtcagttgataaatacaaactcaaayataagcaagataaatgtctctggtatttaaatttcatagagaaataaaaggcagactcggggggtgtttgtttaaaacattaatgaatctttcaggaattgataaaatagaagaaaagattgtcttgcagatttagagtgggtatcataacttatgtataaacattatgctttgaaattttacagcctatcaaagtttgatgaaaggtgttgttttctttatgtccatgataattctgatgactttcaaatctacttttccaccgaagagcagtgcagtaggtgagttacagccaattcaggtatttgcaatgtaattatggcgaatcatttttaaagggcctttgttctgaaagatatttacttgctattactgtctttcttgaaatgttaacttacatctcaaaaaagctctaaaatttctgtaattcacatagcaggtaattcagccatttaaaatacacaacttggccaggtgcagtagctcacgcctgtaatctcagcactttgggaggctgaggagggtggatcacctgaggttaggagtttgagaccagcctgaccaacatggagaaaccctgcctctactaaaaatacaaaattagccgggtgtggtggcgcatgcctgtaatcccagctacttgagaggctgaggcaggagaatcacttgaacccgggaagtggaggttgcagtgagctgagattgtgccattgcaccccagcctggggaacaagagcgaaactccacttcaaaaaaataaataacataacattcagcattttttagtatagtcatagttttccaaccaacaccataatctagttttagaatattttcgtcacccccacaagaaacacactatccatagagtcattcctcattccctcaacctcgccccatcttggccccagccctaggtaaccattaatctttgtgtctctatggctctgcctattctggccatttcatataagtggaatcatacagtatgtggtctcttgtgactggcttctttcacttagcgtaatttttttaaggtttatccatgtgtaacacgtatcagtacttcatttctttttgtggctgaatgatattcttttgtatggctataccacagtttatctgtttttcagccaataggcatttggattgtttgcactttttgacaattatgaattgtacttccctgaacattcacgtgcaagtatttgtgaggacatgtttttatttctcttggagtcaaattgctgggtcttatggtaactctacgtttaaccttttgaggaactgccagaccattttcccattttatattcccattagcaatgtatgtggcttccaatttctccacgtccttgccaacactagttattatctgtcttttgagtattgtaatcctagtggatgtgaggtgggatctcattgtggttttgattcgcattttcctgacgactaatgatactgagcatcatttcatgtgcttattggccatttatatacctctggagaaatgtctattcaaattcttagtccaattaaaaaaattaaactttttatttttgaaaatatttacagccataggaaagtttcaaaatacaatacaaagaatttccatatacgtttcacacagaatttctcagggtttaccccttaccacattggttttacattctcgctctaygcatatggttattttttctgaactgtttaaaagtaagttgtagacaatgctccattacctgtaaatacttgagtgtatttcgtaaaaacaaggatactgacttgtgtaattacagtacagttatctaatgaggaaattaagatagatatagtactataatctacaacatttatccaaattttacttagtgtcccaatgatgtcttttatagcaaaacaaaaggtttttcctctggtccacgttccaatccaggatcacatgttgcattgagttgtcacgtctgcatagtctcctttcacctgaaagagttcatcatcagtctttgtcttttttgacttaatactttccaagagtacagacagtttattttgggtagtcctttgacttggatttgtttatcgtttcctcatgagtacactgatgttatgtatttggcaggaatatcacagaaatgatgttgtgtccttctcagtgcctcataacaagggacacaatatttctgtgtcatcattggtgatgttaacgtggatcatctggtgaaagtggtgtttgccagctatctccaaactttgcccacttataattgggttatttatcattttattattgattttaagagtgatatatacatatatatgtgatatattttttctctatgtaagttctttatcagatatgatttgcaaatgctttttcccatcctgtaggttgtcttttcactctctcgatggtatcacttgcagcacgaaagtttttaatttggatgaagtacaacttacctatttatttcttttgtcatttgtgcctttggctcttgtcttagaagctttgtctagcctgaggtgttctatggtttttatgttttcttccaagagttttatagttttaacttttatatgtttaggtttttgacccattttgaattcatttttggatgtggtgtaaggtaggggttccaactttattctttaacgtggatatgtggttgtcctagcaccatttgttgaaaagactattcttgaaaagactattctttccctgattgagtggtcttggtactctttttggaaatcagttgaccacaaatgtaggagtttatttctggactctcaattccgttccattgttttgtatgtctattcttaatgcaagcaccatgctttctctattactgtagctttgtagtaagttgtaaaatcaggaaatgtgagccctccaacttcgttcttgtttttcaagattgttttggttattgtggatgcttgcatttccacgtaaatattaggatcagcttatcaatttctgtagaaaaatggcagctaggactttgacagggaatacgttggatatctagatcaatttggagagcattgccatattaaccatcctggcttccaatccatgaacacaagatggatttctatttacttaggttttcttgaatttctttcaatgatagttttgtagtttcagtgtacaaattttgtacttcttttattaagtacatacctaaggattttattattttgatactggagtttttttaatttcacttttggatgttcactgataatgtattagaaatacacttgagttgtaaatgttgattttgtaacttacaaccttgctgaactcatgtattagctctaatgggttttattgaattccttagggttttctatgtgcaatatcatgtcatctgcagatacagttttagtttttcctttccaacctagatgcctttattttccttgcctaattatcctagctagactctccagcacaatgtggaatagaaatagggagagtagacatctttattttgttcctgtttttaagaagaaagaagttagtctttcatcattaagtatgatgttagcagcagatttttcatagataacctttatcagattgaggaagttccctttattcatagttcatttgtatcatgtaatttgagaaagtcttaattcattgtgtctcagacaatcattgtcacaacatatttaaagattaggctaggctgggtgtggtggctgatgcctgtaatcctagcactttgggaggctgaggaaggaggattgcttgagtgggcagttcgagaccagcctgggcgacatggtaaaaccccgtctctgcaaaaagtacaaaaaaaaaaaaaattagctcagcatggtgacatacacctgtagtcccagctactcaggaggcagaagtgggaggatcacctgagcctgggaggttgaggctgtggtgagtggtgatcatgccactgcactccagcctgggcgacagagcaagatcctgtcaaaaaaaaaaaaaaaaaagaatagaataaatagcagactagggaatcattggatcataaccttcaatttacagtagaaaaaatgctgccaaatataaattggtgtaaaagtaattgcagtttttgccattaaaaacctaatattaagcagaacatccttttactactacaaaatgtgcccttttgaccctcattcagtactcagtgcctttttttaaaaatacattttaataatttttttattgatgtgtaacgtataaacaagtttgtaatgtgcacttaagtgtacagcttgataaattttgatacatatatacattcttgtacctgcctcccagatcagcaccccagaagttgctttgtgccccttcacagtcattaaactccctccagtgataactgttttgatttttaccaccaatggttagtttcacctgttcttgacctacaaataaacagaatcatgtagtttgtacccttgtttctcacctctttcccttaaaataatattcatagctgggcacggtggcccacacctgtaatcccagcactttgggaggccaaggcaggaggatcggttgatcccaggagttcaagaccagcctgggcaacacagggagaccctcgtctctacaaaaaataaaaaaattagctgggcgtggtggtgtgcgcctccagtcccagctacttgggaggatgaggtgggaggattgcttgagcctgtgaggtcgagactgcagtgaaccatgatcacgccactgcactccaggctaggtgacagagtgataccccatctcaaaaacaagaaacaaaatgaaatccaactgtgaagtatatatcagttcattctttctctgtgtagcattccgttgtgttccatttatctgttcttctattaatgaagacttggattgtttctgtttgggggttattatgaagaaaatgactatgaacattcttatatatgccttttggtgaacatatatattgatttctattgagtatatatctaggagtggattactggattatagggtaggtttatcttcagctttggttgttgatactgccaagagttttccaaagtggtcatgtcaatttacactcccactagcaatgtatgagagtcccagttgttccgtattcttaagaacagttgatatcatcttttattttttttctgttgagacagagtcttgctcttttgcccagctggagtgcagtggcgcagtcttggctcactgcaacctctgcctcccggtctcaagcaatcttcctacctcagtctcctgagtagctgggactacaggtgtgtgccaccacacctggctaatttaaaaaaaaaaaaaaattgtagaaacggggtttcggccacgttgcccaggttggtctcgaactcctggcctcaagcagtcttcccgcttcagtctcccaaagtgctaagattacaggcatgagccactacacctggctgataccgtcttttaaatcttagttgttctgtgagtgcataccatatgtctcttaagaagcctgacgattgggttatccagctttcaaagattagaagaaaaggtaagatgggttagttagaaaaaagagcattttaatggtttatggaaattatcctgaaatgtacagtattcctccttgacatcttaagagagaattgtgagtaaaaatgttctaatgagtcaagatgacttgtatccaaataaaaactgcacaagtctaggaagtggcccacgtggcccagtagaatttgtgagaaagatttatgggtcaatattaagcttgttctgtgtcagcagaatgatgtggccaccttatgcgtttcctcctcaccattccccttatacaacaccctgtatcttactgagaactagattgtctgtactttgagaggcaatagtccccctatccttagcattgattagatcccctctgaacactggtcttggggccagacttcaagaataatacaagaggctgggtgcgggggctcatgcctcccaacactttcggaggccgtggtgggagaatcatttgagtccaggagtttgagaccaagctgggcaacatagtgagaccccgtctacaaaaaatacaaaaattagccgggcttggtgatgggtgcctgtagtctcagctgcttgagaggctgaggtgggaggattgcttgagctcaggaggctggctgaggctgcattgagctgtgatcacatcactgcactccagcctgggcgacagagcgagaccctgtctttaaaaaaaaaaagaaaaagagtaacacagggacgtcatctgaagaattacctgctagtagagtaactcacacgtcctggggaaaacagtgatgggacagaaaggaaagacttatagggacatggtaaaattatgtgcacttctaatggggtgttaagtagaaaaatggttaattctaagcaaactgtggatggaacccacatgaaagaagtctttggttcagtaaaagggaaatatttctcattaagatcttccaagaatgagctgtctttgggaggtaatgagttctctgttgctggaggtactcaagcatcaattggtcaaccagttggtggagatactatacagaggggattsaggtatcacattggtagttgccctagatttgataaccactaaagtaccacgtcaaatcaaggaggggatcgattgttccatgamttgtaaaagtttggtttatatttaagtacagtttaataaagctaagttaaaaacaaggaatgagagcagttctgagttggcaacgtatttgtgacacttgctgttctagatttttctctttggtcaaagagatgataaccaatacagcaggcagtacggtggagctggagggagagaccgatggagacaccttggaggtgagtcatggacgatctagaatatggaaaacattgattgtgtgttcgatgcttcaagaaaatgtcccatctttctataaaaatcctctgttgagtrtgttttatgaacctgccagccatcactgcatggttcccagagataatgttgaatgtgtctccagagaagaatctcatttctttgggattctctcagttagaatgcttaagaaaaatttggccatggactagactaaaatttccttttgtgaacaacctatgaaagttttctctaggctaattagtaatgtctgtgagactacaagagaattagttggccaactgagagcagacgttttatgcttaaaatgactttagttatagctatgtgcatatactatatgaaatataacaactttaaaatcattttaaaaagtaggctcatcagctctttttaacagcacagttatagtccacagttgctaaaccattgtacaggtgtttaaatcttgcccagttattcagatttgccactcactcaggttcttccagtgattacaatttaatgagattttactgtactttcaggttagactgaaaggaattccttaatgtttctttcagaaaatatcaaagggattcattttaataattgagttaactactagaattcttaggtcaggaccagagtttgttgtagaaatgaactgagcaatggtgctttgagggcagcaggtgtgggaatcggagggaggtgtgaggtaaaagtcttctatggagcaggctgattgccagttacatcagacactgatggagatcctttactaaccatgttttttttttttttttttttttttttggaaacagagtctcacgctgttgctgaggctggagtggagtgcagtggcgcaatctcgccttactgcaacctctgcctcctgggttcaagcgattctcctgcctcagcctcccatgtagctgggactacaggcacccgccaccacgcctggctaatttttgtattttatttatttagagatggagtcttcctctgttacccaggctggagtgcagtggcgtgatcttggctcactgcaacctccacctaccaggtttaagcgattctcctgcctcagcatcctgagtagctgggaccacaggcacgtgccaccacgcctggctaattttttgtatttttagtagaaacgggatttcaccatgttggccaggctggtctcgaattcctgacctcaggtggtctactcgcctcggcctcccaaagtgctgggattacaggcatgagccaccacgcctggcctaatttttgtatttttagtagagatggggtttcgctatgttggccatgctggtctcaggtggtcctcctgcctgggcctcccaaagtgctaggattacaagcatgagccacagtgtccagccaaccctttagtaatcttaattgtcatgaacatccctagaagtagatgggaaaggacacccacatacccgccgactattccgtgtataagctgcacttctgtaagtagaagcagtggagcatgcaaaataacagaaaaaattgattgctgcctctctgctttaaataagtgttgctcagcgtacagtcacatttgttttaatcatcgagaagaatcaaatgcatctgtatgtgacagcttttgatgggaagatgggggaacaaaatagtaatgctaattgtaaatcaagtttttgtactaggtgtttactactagatccgtatgcctgaaagagtggggaagccccagcatatttactttttgtattaagataatgttaattatattgaccttcaattcctttctgggttattgaaagatatttgtttcctgacaacttgataagggattatgcaggaagacacctagttgggttattcaacatgcttagaagcagttttaaattgcagcgttaaaatggggaagaatttccaaaaggtgagccaattatatgcaaaccatatttttaattttcttggattccatttcataaagtcatactatgaacaggtgaacaatggagaattctgcccctttaaagtcatttaatgaaaagggcctaagctaagcactgtgacttgcctgacagtcaaataatgttatttatattttttttagttgctagacaactctgggggccttagagkgcttctccgctacaagttgtatgcttttttgtccttttgtttttccttcttcagtatgagtatgaccatgatgcaaatggtgagagagttgtcttggggaaaggcacgtatgggattgtgtatgctggccgagatctgagcaatcaagtgcgaatagccatcaaagaaatcccggagagagatagcaggcaagtccaggcgggccttccgcatttcgggtgccgtctccacaccccagatcccatacccaccgctcatggtgtggaggagttaagggcaaaagcattgtgttaccacaaaacctgtcattctcttgtaataggggtgatcttttttttttttttttttttgaaacggagtctcgctctattgcccaggctggagtgcagtggcatgatcttggctcactgcaacctctgcctcccaggttcaagcaattctcatggctcaacctgtagctgggattacaccatgcccagctgatttttttgtatttttagtagagacggggtttcaccatgttggtcaggttggtctcgaactcctgacctcaagtgatctgcccgccttggcctcccaaagtgctgggattacaggcatgagccaccgcgcccggccagggtgatgtgcttttgttttgtgtattatagattgagaaaatggaagaactacacttcagaggcacgtggattgcagaggatcatattttaaaagaaaacttttgttgtgtttccacccattggctaggtctaaagttttacattttttgcgtagttgtttgcaaatatatatacatttttgagatgaagtctcactctgtcactcaggcaggagtgcagtggcagatctcggctcactgcagtctccacctcctgggctcaagtgatcttcccacttcagccgcctgaggagctgggactacagacacacgtcaccatgcctgtctaatttttgagtgcaaatataatttttaaatattactgggttattttaaatttacattgtagcagttgaaaatggctatgatttgttcagatgcatcattgtggaaaattacatgcagataaaaaaaatcagatttttgcagtacagaattttttttaacatcctacccttcaccctcacacatggattttggactgtttttctaccatgagtactgcttattcatttctttgactttttttaattttaagaaatgtttgtttctagccgggcattgtagctcaagcctgtaatcccagcactttgggaggctgaggcgggcagctcacttgaggtcaagagttcaagaccagcctggggaacatggtgaaacctcgtctctgttaaaaatacaaaacttaggtgggtgggcatggtggcgcacacctgtagtcccagctactctggaggctgaggcacgagaatcgcttgaaccccggaggcagaggctacagtgagccgagactgtgccactgcactccagcctgggtgacagagtgagaccctgtctcaaaaaaaaaaaaaaaagtttaaatttataccccaacaaaatgagcattgcaatgttgactgcaaagtgtttctgtagagaagctacatacacagttggaattaatcattccgggatccacaggtgtgtcagaccacagctgtaggattgccttcagtgtcgagtgctgaagaataatgtgtaaacacccatgtatctgggtgattgctgatatattggggatgagttttaagggatttctgccagctgtaagacccttcattcatccattcatgtatttgttgattttcagtgggatagcatgttatgatacgtgaattatgagacaggacctgaaatgaactatttccatttcttcatttcaccaataagaaaatcaagactgaggaagattaaatgactttcccaaggatgyttagaaacaagactaggatccgagtctcttgagttcctcatccagcatccagtctcttttctcatgatggataaggtgttgcagttgtatctatttggggaaatttctggcatgtcccatctccttcatttggtagcaatagctgttctagctttttgttgctgatcagtagttcctgggattttaagagctagaagggacctttagagactgttttgttcaactccctaaatttataggctgaacttatgatgataggtactttctctgtgtcagactctgggctggcactggggaccgaaaggtgattaggatagtgtccttttcccagggttctgctggttcggtggcaaatgcagatgctttgcctctgagtgaaagtgccaagtgccatgatagaggagtacacagagtgtttttagaacgcagaagaggaatgaattactctccttagtgagttgtggcaagtttgaaaaaatagatcaactttgagctgcactttgagggatgagtaagaatttgtttagcggaaaaggaggcctatgctgatggaaaaacagagctgttaaaacacaaagtatattcagagaacaacagattgtctgatatgacttgaatgtaggatgcagggcagtgagatgctcttgaaatgaggccaaaaaaaaattttttaaggcttagcctgaactgatctttgaaagtccttgtatgtgacattaaatagcatggtctctatgtggaatttatgtggggaagggatgtggtgaagtgtgtgttttaagaagaggtagtataatggccaaggttggggaatggattaaaaaggccagaggctggggctgggtggcccattaggtggctgctgttgtggtctggggcgactctgtagaataagacgagagggcagctgagggcagaaccttccagaacaccactcttcatgggaggcagaggaagaggggctgttgagagaggtaaagaatggttggtgggttcaggcccgaaaaataacagtagtaacaatagcagtcattcattgaatactcaccacacaccagctactccactaagtgcttaatgaaatggacatgccttggcccctggcagccctgcatggctgtaggcttatcctctattgtacagatgggaagttgartagtttcatggaagccagagaaaagaaagtttccagaaagaagggatgggcagcagtggggcaggtcctggtgaggtgagatgtggktctagagtccctgggatttggcaggtgaccctggctctgtttttcccaataggtattctcagcctctgcacgaggagatagccctgcacaagtaccttaagcaccgcaatatcgttcagtacctgggctctgtttcagagaacggctacattaagatatttatggagcaggtgcctggaggtgagtagtcgctgtcttctggtctcacattctgaaaatcactacgacgtggatgtcatttgttgtcctgccatttacaaaatgacagacccctaagccaggcctgtagggcgcctgtagtcccagttacttgggaggccgagatgggaagatcacttgagcccatgaggtcaaggctgcagtgagccatgatcacagcactgcactccagcctgggcgacagagcaaaacccatcactctttttaaaaaaaaaaaaaaaaaaaaaaaaaaaaaaaaaaaaaaaaaaaaaaggcaccagcccctttagatgtgggaaagtgggatccttcccaaatgtcataaaggcagtctttttcgggtttgtggaggcagtttgtccaccccaaaaattttcattgactgtctagggaaaaaacatagtctttggccttgaggcttcacagtctaggagtttaaaggtgggtttggacaagggtgcagaagagggaacatagatgttaaaagtgacagtgcaaaatagcattttgataatgaaatcaagcatcagtgttttatccacaaaaatccctgaatgcaagagatagggcacaggaggggagttcctgggatctggacccagaccatctagtctgagtccgttcctccatccaaaagctgtgtgacttcaggcaaattgttatacctctctgtgccctcagttttctgattgaataaatgaactgtaaaattggagtaataatgactctgataattggagtaataattattggagtaacaattaacgctgtctcagtgggctgttgggtggattctgtctggcagagaacaagagctcagtaagtgctcattgaaataatgaatcaaactctttaattaaataatagttatctgaatacagatgttaaaacttcagttagaaatcttcattcattcattcaactgacagttattaagagtctgctattacaggaagagtcttaagtatatttattaagagccaggcagtcagccaggcacagtggtcacgcctgtaatcccagcactttgggaggccaaggcaggtggatcacttgaggccaggaattcgagaccagcctggccaacatggagaaaccccctctctactaaaaatacaaaaaattagccaggtgtggtggcgtgcgcctgtagtcccagctactccggaggctgaggcacaagaatcgcttaaaaccaggaggaggaggttgcagtgagccaagatcataccactccactccattctaggttacacagtgagactccgtcttcaaaaaaaaaaaaaaaaaaaaaaaaaaaaagagccaggcagtgggctagattttcagggttatgttagaataaataaagtagtttgtctttcccttaagttggtcatagtctatcagaaaactcgtccattgctgctttttctttttttttttgagatggagtctctctgtctgttgcccaggctggagtgcagtggtacgatattggctcactgatggcaacctctgcctcctgggttcaagcaattctctctgcctcagcctctcaagtagctaggattacaagtgcgtgccaccacgcctggctaatttttgtatttttagtagagatggggttttgccacgttgaccaggctggtcttgaactcctgacctcaggtgatctgcccgcctcggcctcccaaagtgctgggattacaggcgtgagccaccgtgcccggccccttactcttcacgttagttgataaccccatccccggcgttaggtttaagggtatcaacagaaatagagacagatgtgttcatccccttttatagatggggaaaccaaggtagatcaaggtcccataacactgtgtaagtgggaatctgagaccagccgatgtctgagggcccgttcctgccaatggacaggacatcccgcagttcacatgatgtccttcgagacgtggtcacagtgtccttaagggagcttttcttttggcccaaatgttcagtgtttaatagcgtaattgggggaagtggttgttgatcaagacagtcctgccctgagacttgccactgtggctttctcacattgaggacagagagacccaacttcctccagtcctagtccttgtcaccctaaagggcccctcactgtggacctgtccacctctgattacagacaaggtataaaacgtggctttaacccaagcagaatgactgagacagacctgctgtaaacaagtgtcatgggacctgagttatctacgccagcaggccatgcccctcaagttgagagagcattatttcgctctcctcctaacttcatgtagctgaacagagctaaacccacaattggccccactgaatttcagggggcacaaggggttcatgttcaccctgtgcctctggttaggttcatgtgctcaattgcttccagtccattccctggctgtagctacagaggggaggaaacatgttgcatttagcccagatccgatggtgttggtgtaagcacttaggttaggttagaaacctcacctcactttatttccctgaacttttattgaaactttctcttcctgataagttttttgctgtgactgtctctaggaagcctttctgctcttctgcgatccaaatgggggccgatgaaggaaccgacaatcaagttttacaccaaacagatcctggagggccttaagtatcttcatgaaaaccagatcgtgcacagagacataaaggtacttgcttttttaagctgacgaggttgcctttgctcgtatcagatcatgagagctgtcgatggtgtctgctgagtgactggctgacagaggggtatgatttagcacaaccgtccccaaaatgcaaagtctagttttcctagagacttgtgacggtttcccaaggtccagatctgtttcatatgagttcgtttcagcctgtcttttaagcacttgatgatgttattttccgaagggygataatgttctggtgaacacctacagcggagtggtgaaaatctccgattttggaacctcgaaacgtcttgcgggtgtgaacccctgcacagagacttttactggtaagtggaccaaagcttggcacagggtgcccatcccagagttacgctttctgcacaagctgcggttgttcagccgttacttagtgagcaccttttctgagcagagtgagcaattgatacttgaagtagacagtggattgtccccaacttcaaattgttttaactttgtcatagtgatgcacctagccagctacttgtggcaacaagattgccctactttcttctttgtcatccaaaagttgggtagatggagtgctctgctgaggttctgaggttttcttttcttttttttctttttttctttcttttttttttttttttttttttgagacggggtctcactctgtcgcctaggctggagtgcagtggcacgatctcggctcactgctacctccacctcctgggttcaaatgattctcgtctctcagcctcccaagtagcttggattataggcgcgccccctaccacacctaattttctattttcagtagagacgaggtttcaccatgttgaccaggctggtctcgaactcctgacctcaagtgattcgcccacctcagcctcccaaagtgctgggatagattacagatgtgagccaccgcgcctggcctctgctgaggctttctgaaggtcactcaaccaatcagcaagatggcagcacatctctttaaagttaatagcacattatctgaaatcgtgggtaatgctgaataacagtattcctcagacaactgattaagacattttattggtctgtcataaaaatagcctgttactgtagtgaattctggtaccttgtgttttgatatgattgtgtttccaagagaggctaattcttcctggggaatatggtattctaagtgattttgaggaattggattttcttgtccatgtgtcagtaatggataacttgagcattgagagggactgggttcaaagggtggtatacaattaccagctagtnnnnnnnnnnnnnnnnnnnnnnnnnnnnnnnnnnnnnnnnnnnnnnnnnnnnnnnnnnnnnnnnnnnnnnnnnnnnnnnnnnnnnnnnnnnnnnnnnnnnnnnnnnnnnnnnnnnnnnnnnnnnnnnnnnnnnnnnnnnnnnnnnnnnnnnnnnnnnnnnnnnnnnnnnnnnnnnnnnnnnnnctattggaaattcctgcttaaacctgactaataacaagaactttgatccttggaaagaagtactgatttttgaataagtaaaggtttatagtcccccaaggagtaacgtaaagatcacaaagatcttgcttgatggaattatgaaacagctggggcctggtatagtggctgacacctgtaatcccagcactttaaaaggccaagatgggaggatcacttgaggccagcagtgcaagaccagcgtggtcaacatagtgagaccccatttcttaaaagaaaaaaaaaaaaacagctttcataggctgggcactttgggagattgaggcaggaggatctcacttgagctcaggagttcaagaccagcctgcgcaacatagggagaaccccatctctacaaaaaataaataattattattattacatattatatttatatattatatgttatatataatataatacataatgattatatataatatatgtatataacatatattatatagtaattattagctgggtgtggtggtgtgcgcctatggtcccagctactagtgaggctgaggtgggaggatcgcttgagcccaggaggttgaggctgcagtgagctgtgattgtgccactgcactccagcctgggtggcagagtgagactctgtctcaaaaaaaaaaaaaaaaaaaaaagaaaaaattagctcttaaaataatatagctctgaaataagctataaaagacaggtgactgttctctatctctgcagtcaccaaagctgtagggtggacagcttgggtcttatttttggtaaataatgtgtcagctttgaaagactttttgtcaatgagagagttgtcgcgtgtcagccactggacacccacagtggagacacattcaccatctaaagagaattttaatacatcacaaaatgacttctcacttgtaacacaaggggaggtacatgtgcctgaaaatgggaaaatactataccagggacactatcagaatctcccaaagaaagagtgcattgaattttcattcattgtttctggtataaatatacgtatacatctgtcaatgtgtgtatatgaatatgtgtgtatgactagcacttcattttcttttagcattttactaccctaattgaaaatgacttgtatcctcctctttggaagccaccaattagcttggcaatacatagcaagaggggctctgatatgacaaggagttatttgaagacataaaacccccaacaatttatctcataattagcttccctgaggaggaaacaaactcacaaagaaacacatgtataattcatccttgcatatcacacttcccaagtaattggcttggggaggcacggattttgcattgcaaaagaatgcaggggtgtttgggggataataaggaaggggtctcattttggttaggaaattcccccgcatataattgctctttgcaaaacagagcagttctgtaaggaaatctcagctggttggtgcagaactctgggtctgtggttgctcagcctggcaggagagccagagggtttcagtcaacttcctggcctggagccctccctccctgtgttcctctgaagggtttgccccacacataggaacctgcgagaacaggaggaagggctgttatagccagggtcagccctgccttttttttttttttttttttagcagccttatcgaggtatagctgacatatcatcaaagcacccattagaagtactcaattctttggttttcagtaaatttactgagttgctcagccatcaccacgatccagtgtctggacctagcagaccccgtgccccttggtactcatccccattcccactccagccccagctcatcactcatctgctttgttgtgtttgtgtggctttgcccgttgtggatattcatatgcttggaatgaatacaatatgtggggttttgcatgtagcttcttgcacgttgagtcctgtttttgcagttcctccatgcagtggtgtgtatgggtacttcgttgttgttcatggctgaatggcattccattgtgtggagaaccacattttgttcatccgtttaccagttaacagtcatttgggattgtttctactttttggccactgcgaataatgatgctgtgaacattcacatacaaagcgtgtgtgaacatgtgttttcagccttcttgggtagatacctagagggagaactcgggacaggaagtctgttctcgtctggctgcaaacatcgttggttcaaatcctggcccaaccacttgctagctgtgtgaccttgggcatattacttaacctccatgtgcctcagtttcttcgtaagtaaaatagaaatgctcgttgtacctactcatagggtttttatgagggtaaagtgagttactgatgaagtgctttgactggtccctggcacatagcaagtgcaattgaagtgtttgctaattaaatactcgcttgtacttagaagtcatgggttattagagctggaaggagcctttgagagaactgagtttgtgtgtgtaactaacgtgttgaacccattggactcaaagggtgtaatcacaaaagccactggatttttctctcccacttttcatcctgcctggggcgggagttctttcctttgacttttccagccacccttacataacagagaaagtcataatgacacttgaaggagcgcacacagtctgaattcaggaattaaaaaggactcatcgcttgaagccgggaggcggaggttgcatgagccgattgtgccactgcactccagcctgggtgacagagcaagaccctgtctcaaaaaaaaagattcaggctgatactgatcaacgctctggtcctcattcaaaagtcagacccctctcccgtctccctgcaggcagcgacctgtggtcaggagctgggtgttgtctttttctccctaatcaccagctgcaggaaggagaggacaggggcagggaaagttgtyacttgactagcactgttggaagctggctttgcgtgctgtgggcctggctgatgtttagttatcttccctcgctggctccctctggatgtaactcctgtgtcgtgggcaggggcctgtcctttggctgacagccccctcctcccagttatttaccccttacatcacctcctccttccatctctttctgttgagggattcagatcgtggaggactgcgtttgagcaggaattccttttcttttttctttatttttttattgggcagcccctggaaccagaataggttctgagagagactcccaggattccttttaagaagaccatatgctgggcacgcctgtaatcccagctctctgggaggctgaggtgggaggatcgcttgagcccaggagtttgagaccagcctggccaacatagtgaggccccgtctttaccaaaaatataaaaatcagctgggtgtggtggtgcgcacttgtagtctcagctactcgggaggctgaggtgagagaatcacttgagcccaggagaatgaggctgcagtgagtcataattgtgccactgcactccagcctgggcgacagaatgagaccctgtcaatcagtcaatcaatcaaataaataatacaaataaaagataaaccctaaggcagtatttctgtaatagggtcccccatctggtgtccagagttcaagcagcttcagcccactgttgagagggtgtggcagtatccccacaccttacagccccctgtctgctgctggaagttaacctttgctcacttgggtgccagtccactgtgtaatttacctacaggaacacatacacatggagctgagtcgctcagtgaagcccccttcaaaggctttgggttaggaacaagtggcgccacctttccaccaggcttatcccttggtcaggtcaactagggtagtcccctggactatgggaaaatcgtaccttacttttcttttctgtacttgattaatatgaaatcttgaaatttaggctctaacggtatctccaagggcctgtggaagatgtgatgatcataagttggtattgagtggcttgagttgccctgggcccacgcccttttggggacagtcctgccccaaatcctgtaacttgggagagggtaggcagcccagcatagctctctctaaagaagctgtctcagcaccacccccctaaactactctgtcaactctctcagccccttgatcagattagaaggtccctgggcctcggttataaacttgtgtcttctgctgtgtgtcttctttgctggtaatctgaaaatcctattggacaattctccaggagtccccagtggattttgtgccctaggggggctgagtcagtgcctgtgggtctcttggtcaccttgttctgaactctgcaccactgcactggtgtaggtacctaagagccgtagtgggctgtgaccagtgaccagtgtggtagggcataccttggaggaaatataggttagggagcatatggggccccaagagagccagatttttgtttgtttgtttgttttgttgaaatggagtcttactctgtcgcccaggctggagtgcagtggcgcgttcatggctcagtacaacctccaccacccgggttcaaacgattctcctgcctcagcctcccaagtagctgggaccacaggcacacgccaccatgcccggctaatttttgtatttttagtagagacggggtttcaccatgttggccaggctggtcttgaactcctgacctcaagccatccacctgcttcggcctcccaaagtgctgagattcaggtgtgagccaccgtgcctggcctatgagagccagattgaaggaaacccaattttccaggatttgtgcgtgattcagatgccccacaatgccatcttcacttggttttcttgacagaatccagcctttgggttagctgatgtacacacccaacatgcatcctgccagggagtgttcccttgagtatctgaaatagttgtgtgcatttatctctctctgttagctgttctgagagtggatggttaccttgtgaatacagtagtgaataaaatggagcacccagttttccattagtgccctgtaccttccagttacatggaaagatgctccaatatggctttggaaatccttacacgtgctactcttattcaggcagctttttttttccagcagcgcttcttcttgatgtagtgtatggatgagtgatgtcatggtgtgtagttctgaacttgaaggtagaagatatgggttctagcctaagcgaatcctttagcctctctgaacctcagttgcctcctgtgtaaagtaggaataatggtagatagtgcttcctctgcctaaccttccagagtcgtttgagtcagatggacaaggctatgtggagacaattggtaagccatcaagtgctcaccaggagtcagatttgtggcaggcagcctccaaaatgacccccaatgatccctacctcctgatagtcacacccttgcgtagttccctcccgttgaatgtggactggacttagcaacttgcttctgatgaataggaagaagtgggagtgatggtgtgtgacctggacactaggtcataaaaggcagtgtgccattcctctttctctcggatcagtctctctgagggaagccatgtctcaaaccagtcctatggaggatcccatgtaatgaaaaactgaagccccccactagctctatccttagtgagcttggaaactgatcctccagccccagtccagccttcagatgactgtagccccagctgacatctggactgcaacttcctgggagaccctgagccaggtccacccagctagttagttgctgctggatttcaacccttagaaacgctgtaagacctaactatttgttgtttgagttgatagatttgggggatcatttcttaaacagcagtaaataactaatatgaatgtcattattaaatccttgcctttagaaagagtgctgttcaccatggctccatatttttaaaaatctgcaaatttatttttaacttttgtgggtatatagcaggtatatatatttatggggtatatagactattttgatacaggcacacaatgtgtaataatcacatcagggtaaataaggtatttattacctcaggcatttatcctttgtgttacaaacaatccagttatgctcttttcagttttttaaaatgtacagtttttttttttttttttttttttttttttttcccctgagacaaggtctcactcccatctgcccaggctggagggcagtggcgtgatctcagttcactgcagccccaacttcatgggctcaggtgatcctcccacctcagccttccaagtagctgaractacatgtgcacaccaccaaccctgactaattttttgtacttttttagtagagatggggtttcgctgtgttgcccaggctggtctcaaactcctgggctcaagtgatccacccacctcggcctcccaaagtgctgggattgcaggcatgagccaccatgcccagccaaaatgtattgactatggtcaccctgttgtgctatcaaatactagatcttattcattctttctatttttttttgtacccactaaccatccccaccttcccccagtccccactgcccttcccagcctctggtaaccatccttctactctccatgtccctgagttcaattgttttgatttttagctctcacaaataagtgagagcatgcaatgtttctctttctatgcctgacttatttcgctttatataatgatctccagttccatccatgttgttgcagatgacaggatctcattcttttaatggctgaatggtactccattgtgtatatgtaccacattttctttatccattcatctgttgatggacacttaggttgcctccaaatcttggctattgtgaactgtgcttcaacaaacatgcgggtgcagatatctctttgatatactgatttcctttcttttgggtatatacctaggaatggggttgccggatcctatgataactctatttttaggtttttgaggaacctccaaactgttctccatagtggttgtactaatttacactcccaccaacagtgtatgagggttcccttttctccacatcctcgcccgcatttgttattgcctgtcttttggatatcagccattttaactgcagtgagatgctatctcactgtggttttgatttgcatttttctgatgattagggatgttgagcaccctttcatatgcctgttggccatttacaaatgtcttcttttgagaaatgtctattcagatgttttgcccatttttaaaaatctaattattagatgttttcttatagagttgtgtgagctccttatatattctggtgactaatctcctggcagaggggtattttgcaaatattttctcccattctgtgggttgtctcttcactttgctgactgttgcctttgctgtgcaaaatctccaaatttagaattaagcagactaaataggcttcaattaggaaataattgtaccaggatggacagttatttgaccagagccaattagccattgatgtttggtttagcgtttcttttctactgctggatacatctataaatgtattctcttgctctttgaagaaataaatttagtgattatattagtcagggtccaggcagaaaaacaaaaataaccccagttatttccatggagagaatttaatagaaataactgtttgctggttaccaaaaaccaraaaggcagaaagggaggccctgaggtatcaggaagcctgtacccctggggcttgggggtcaaatgggagggtgagattagaacttgttcggagggagtgtcaccaggctggagcaggtacctctgaggggcaagatgaggctggttctggaagtacggggtgacacacagcgggagactggggccgactgagggtccaacgccaagcttagggccacagcaagcacacagcaggtctccgcttcctcccgcatccttccagggtctctctttagcgccacctggttgcggagcctaatggggagctgcaggcgaagcagagtcccagactcagcatcacagagcagagctgagagagggtagcttcataagcagcacagtatcggatccttcctcaattagggattcgttagaaggcacattccctgccaagacctctccctctgttacagcagcaagagcccataggggatattgtgtcatcggaygttcccttcttggggctctgggatttcctaacagggcatcaagtgtaatgcgctgccatgttgcccaactctgcaactcactgaacatttccccgccagggcatcagctctggagaccaaagccatcatttgttcctcatcgatctgttgtgctcactgatacaacccaattcatatttaagtttatatttaagtcacttgtaattgaatacaattaaaacttaaaaatgcatttcttcagtctcactagctacatttcaagggcccaacagtcaaatatatgaggctagtgactaccatatttaaccacacaggatagaacgttgccatcagcgcaggacattccatccgtcacagctgcccctagagtatttaaagaatgctaataagacataggatcttccagagggggacacaggaggtagtttctccaaactttctttatagccagtgcgccctttgctttcctttttttttttttttttttttttggagactgagtctcgctctgtcgccaaggctggagtgcagtaatgcgatctcagctcactgcgagccaggttcaagggattctcctgcctcagcctcccgagtagctgggattacaggcacccaccaccatgtctggctaatttttgcatttttatatttttagtagagacggggtttcgccatgttggccaggctggtctcgaacttctgacctcaggtgatccgcctgcctcggcctcccaaagtgctgggattacaggcgttagccaccatgcccggccctgctttcattgattaaacctttagttgtgtaatcctcagataggcctttgaatttctctgggtttcagtgttctattcatgcgtggccaaggtcagagctctgactttgctgtctttttctaaatttctttgccagcccccaggagctgctgtcactttcacacacgtcccctttgcacaggctgagtttcaaggaaaacgaaggatgttattcgcagagcccttgactgacctccccgtgtgctgtctcccacaagagcacgtccaaagccagagccctgggcccaccctgcttgccactgggcctgtgcccttgccattgcctccttaactattcccacaccctgccccgtgtcagacatcgcttgttccccggaccgctgtctatctcacacccatgatcccctttgtccagccctccagccttcgcagcaggaccctgcttccctgacagccccggctaccaacccagcaaagttacactttacccaggctgctccccaccaaggcctgagcctggcaggggtgctagaacccaggtgggactcctccagtggatgacttggggctgcagactccccagcagcctggctgaagccctctccgggctgctctcccatcccagattcttcctgattctgccttcctctccgctcccaggtgttgcacctgccatgtggtccgcagccggccctgcccaccctgctccctcccgctttgtccttcagagaccttctccccaataaatctctcatatgtctcatctcgtcttggcattttactcctcagaggcccaaatggacacagccatagtgtttcctgacccgaaccaggcagagagtcaaaccctattttattaatgctcttgcagccttctgtgtatttctctgtcctagcacctaccacattttgccattactgccaccgctgccagcattctgtctttgtctcctccactaggcacctccctaccatcaggctgtgtttctcacgttctggcttccctgtatttggcatgtactaatatgtgctgactgaattgcgccatttgtcctttgatgggccaggcagtcctctctccacgtggttagtattaaaggaaggcatgttgcatgcctctgctcaaagaaatatgcagtcaggccaggagcagtggctcacgcctataatcccagcactttgggaagctgaggcaggcacatcacctgaggtcagagagaccagcctggcccacatggtaaaacctcgtctctactaaaaatacaaaaattagccgggcatggtggtgtgtgcctctaatcccaactacttgggtggctatggcgtgagaatcgcttgaacccgggaggcggagttcgcggtgagccgagatcacgccactgcactccagcctgggcgacagagcaagactctgtctcaaaaaaaaaaaagaagcaaccatattatttatgcatgggacaagactccatctgccatttgtgaagccattcatttcacagttagtggtgggttttttgttttgttttgtttttgagacaaggtcttgttacattgtccaggctggtctccaacacctgggctcaggtgatcctcctgcctcagcctccygagtagctgggactacaggccacttagtttctgagcaatatggtacccacagcctgtttgtttgttttccaaataggcaccctgcagtacatggcacctgagataattgaccaagggcctcgcggatatggtgccccagccgatatctggtccctgrgctgcaccatcattgagatggccaccagcaagcctccgttccatgagcttggtgagccgcaggcagccatgttcaaagtaagtcatgcttcgtgattgaggttgggcgtggttgggaagtagaattaaaaacaaagtctcctcccaatccagaaaacctctccacaaaggtaggagagaaggaaacagttttattattggataagcattaaaccagaatgcgaggtgcatcacaggcaatccactgagactgcaaagatggaaagcaatctcactgtttcatagagccgagcagacacaacccgtgacatctgtgttctcaagagaaaccgtaactagtcctcaagtaagacaacttggtggtgccatttgtcacaaggagctcatcttagattcacctggtgattggggggaccattggtgttcactgtttggcttcatccaaaggaaaatataggccgggcgcggtggctcacgcctgtaatcccagcaatttgggaggccgagatgggtggatcacctgaggtcaggagttagacaccatcctgggcaacatggcaaaacctcgtctctgatacaaaaatcagctggacgtggtggcgcatgcctgtaatcccagctactcgggagactgaaacaggagaatcgcttgaatccaggaggcagaggttgcagtgagccgagattgcaccactgcagtcccgcctgggtgacagcaagacactacctcaaaaaaaaaaaaaaaaaaaaaaaaaaggaaaaacactaaacttctcatatctttaagacagtaggtagttttggagtgaagccaccatcaaagttagaaacctaccttcctatttctgggagagcagagttatgaaaacattaataaaagatgacaggtttaaaaaaaaaaaagaaaaaggaaactaggagatagaggccctatcttctttgatgattacatttcagagagatggcttccaggtccttgcaaaagacatttctggcaagagtcttatttagccgtttaaaagattcacgtatatctcagagacagagaaagaaccttaaagttataagttctctcaagtcaaggctctaagaaagctgggcagggtgggggagggtcctttccctttattttcaacagggagaatccagccccttagtttcccttcatgtttgctcttacagtgggtaaggctcaaaggccatgtgggatctgtgcctttgggggacaggtttctgactggcttctggagaggtgggagttgggctatcaggtaaatatatcccttatcattccaacaaccctccccgagctaacaggaagggcagcccatgtactggggccaacatagtgcagattgagcattgcgggtgggggttttaccgccgagcagccaagattgtggaaagggatgtccttccttgtgacctcacgggaagctgatgccaggacaccccggtgtacccaaggttgggtgtgcagcttctggcctcatgtatgcttagaaacatgtaaggggcttgatgtggtttggccatgtccccacccaaatctcatcttgaattgtagttcccataatccccacgtgttgtgggagggacccggtggggataattgaatcatgggggtgatttcccccatccagttcttctgatagtgagttctcacgagatctgatggttttataaggggcttccgcctttgctggttctcattctctctcctgccgccctgtgaagaggtgccttctgccatggatgtaaatgtcctgaggcctccccagccgcgtggaactgtgaatcaattaaacctctttataaattacccagtctcaggtatttcttcatagcagcatgagaacagactaatgcagagctctagccctaggatgccattaccagcactgaccttccatggggcactgccttgagacagcagggtcacaaaaggccaaatggccattgcttatggatgatgaggccgcagtgtgtggacacggccctgatagaacgcgattccagaggcgtcttcctggcttctctgccaaacacggtgccttcatggcctgtgtctgtgccaggctctctgcttccctcttgggcagaaggaacttggaggtgtgagtgcaggtttctgccggttgaggtgagggcagcatgttcaatgggtcccgagtgctgcctgcttgggtgccttggctgctctctccagcccggcgaggcccctgcagaagggtctcagagcttctcacctcctatcagctgcttgggttcagagcccaggccaagacctcaagtcgacaagagtcttctgatacctgcaatcccaagaggaccctcagctcctgggctggaagacagcaatgaccgtcctcagcactttgaccgtgtgcggtggaccctgttggggccgttgtagatctaacctgcagcttccatggcagcgttggaataaacagcagctggtgacgaggaaaacatgaggcccacctgagagccatggctggctgctttttgacctgctgctgacttccgggaaaccagggagagagctgaaggctgtgactggctcgattcctccgcagggcatgcctggctccccgcctcctcttgtttttgtttagcgaattcactgtacaaagtctctctttttttttttgacagagtctcactctgtcgcccagactggagtacagtggcacaatcttggctcactgcagcctctgcctcccgggttcaagcgattctcctgcctcagcctcccaagtagctgggattgtaggcatgggccaccatgcctggctattttgtatttttagtagagatggggtttcaccatgttggccagactggtctcaaactccagtgatccacctgcctccgcgtcccaaagtgctgggataacaggcgagagccaccgtgccccgcctgtatgaagggtttgaaaatgtactgacttttttggatggcatatgaagtcacttttcattgccaatgagaaagttattattaaataagtaatggcccctgtgttatttctgggatccttcattcctttagaaaactttcaagaaacttctgggcagtgtctgaaacaaaggacactctctttcccctgaagggactgttacagatttaactgtgtcacccaaaaatgatatatggaagtcctaacccccagtacctcagaatgtgaccttctttggaaatagggtctttacaaagaaaatcaaatgaaaatgggttctggaatgtgggccctaatccagtatgactggtgttttggactttttttttttcttttttaaatctttctttttattttttttaactagtcaagtgaaacagtgggagtggggaaggaacaaagaaatctctaactggttgtcatcaactagctgcaaacaccactgcactcggaccagcctggtgtcttttaaaaaggggggatatttgagccaggtgcattggctcacccctataatcccagcactttgggaggccgacgcaggaggatcacttgaggccaggagttcaagatcccccggggcaacatagcaagaccccgtgtctacaaaagatgaaaaaattagcccatgtggtggtgcacacctgtggtcccagctactcaggaacctgaagcaggaggatcccttgggcccaggagttggaggctgcagtgagctatgatcatgctactgtattccagcctgggtgaccaagtgagaccctgtctcaaaaagttggggggtgggggtggagatttggacacacatgctcagaagacaaagtacgattcccaggggaatgcctcggggaggcagaggagagaggggggtgcatctaggagccaaggagcgccagagaccgcccgcagaccacgagaagctagaagaggcaaaggcggggattccctgcatgtttcaggagtccctggccctaccaacgcttggatcttggacttccagcctccaggactgtgagacaataagcacctgttgtttcagccacccagtttgtggtattttgttacagtggccctaggagaccaatacaaggagcttttgggtcacggcaaagcacccttaaagaggacatcccagccgggtgtcattgtgctgcccacatttgctgttttcagagagccgggcagaggccaccctttccttttcatgttcttgcctgaatgttggtctttgtacccctagtgcctgtgaacagtgccagcttaacctccctaccgctcaggtgagaggagccacctgtgaggcaccctgcattgcagacctggcggtgggtgggatttcacccagcatttagtgttcttcgaatccgtaactcctgagctgggcagcctggccaggaggagcgctgtgttggaaacagcacrtggccgtgactgccaggtcaagggccttggggacaggaagtggggaggcctggccctctacactctgcagcaccctgagctcactcggcggggattgtggaggctgagccagcccccaggagctctgaggagctgggaatgggcatgggtctggaggacagaacagcttccacgcctggattgttgggtgggcttggaaaagacacagggtggactgtgaaactgaaggtgacaactcctaaaaagatgagagggccaccctactgggaacagttatgaaggagggggctatataacatgtcacggaagcatgtccgtgtcacagcgagatgtggcagctcagaaccaactcttacttccctacaggtcacagggacagagagccattagttacctgtctatacattggcagcctcaaggttttgtctgcttgtggttttgagctggaggctgggaatctgggctgtggatgcagagggattgagaggtgttaaaggcatctcttggggaccctgtgcgtcagggaacaggtaacagatgcctttgagtatccttagaggacatgccgccctaggctgtggcccaagtcccatctcagttctctactgctatgtaccaaaccaccccaaaatttcagaagcttaaaacgatgactttttctcatgcctctttgagctgactgttggctcttctgtgggttttgcctgggctcactcacatggttgcagccaagtggtggtttgggggagcagggtggcctgagaggcccctccctcatggcagttccagctgggatggctggggcgtcctctccacggggtcgtacctcctgggcttcctctctgcatggtggtctcggggctttaagggtgactagcggagccacaagacctcttaaggcccgggccctgaaactctcaccatgtcacttctgtcactatctgttggtcaaagtcaagtcacaagatgccagtgagggggaaatggactccaccttggggtgggaggaacaagaacgtgacgttgcaagggggcatggattatgcctgtcctgggatgtcaggtgtacaggagctttggactgagacatggatacctgaattcacccaaggcctcactgacacatcggttacctctcccttaaatgcaggtgggcatgtttaagatccaccctgagattccagaagccctttcagctgaagcccgagccttcattttatcctgtttcgagcctgacccccacaaacgtgccaccactgctgagctactgagagagggtttcttaaggcaggtgaacaagggcaagaagaaccgaattgccttcaagccctcaggtgaggcctccctggacagctggggcagcaccctggccacaagaatgctgggcgctgggcttctctgctgctcaggagggagagttctggctatccagagccctgggctgctcacgtcattcccatttttgtgaagagtgacggggcctgtgcagtaggtttggaggttgtcaaaatccaactaatacatgcacctcgatctcctgacagaggcccagggagtctctgggtgactgggctgccgtctgctggaagttgttccttcgggattgggaagagagtggggaggcaagaggtaccccagctggggttctgcgtcttcaccatgtgccagagcctggggcttcagttttggagcctggcttgtcatcgtgtgccaaccctgaccttgattaaaggatttgtcagggaggtttgcctgatgtggctgtcctgcaggccaccgaagtccagtgacaccttctggggcagtaagtcctaactggcaatgatgtaagagtggcccctgaaaaggaagcagtttgtcctcttttccctggtaccgatcggggtcagaagctgccagagtgagtggctcagcaacttgctccatgagggacccccaactgcatgcatctgagtagaaatacagcacctgtggcccgtcccccgcccaacccacatttctacaggatcctgggtgcctgggcggttcacctgggcttgaggggctgccagggactcagctccaccccgtccctctctgagtctccccattcrgtgtctggctgtccccctacagaaggtccccgcggtgtcgtcctggccctgcccacacagggagagcccatggccaccagcagcagygagcacggctctgtctccccagactccgacgcccagcctgacgcactctttgagaggacccgggcgcccaggcaccaccttggccacctcctcaggtacacccgtattctgtctgtctgccgcgggcccgaaagggtgctggtagtcctccgccacagggcacctccctggtcccaaccagatggccactgaggggttttacttcccttctgcagggcagtagggcagctgagccgccccatcccggcaaggagggtgcttcgttcacttgctgtcccttcccctccctccctgtcctttcattccccacatgtgccctcccccacctctcctcttcccttctctctcccctctccttcgacacttcccctctctcctcttccccctctctctccccctcacccttgccccctctgtccctgcatcttccggccccctcctcctcctggcccctcctcctcccttcctccttttccttcctctctcttcctccttcccctgtccccctcaccttccctccctcacctctccttctgtgcttgcccccttccctccctccctccctcctccctgtctcctgggaggctcctttaccccgcctccccctccttctgctctccctcctgctgtgggggttgacagaacactgcatgtctgtccttcctccggcaatttcatcttcttgagcacagggactgcatcgcagttacctctcagcccttctccagggcrtcctaacatgacacactccsagggacagtgccccrgcacgcacagagattgtcacacgtgtttgtccacagtgttccagacgagagctcagccttggaagaccggggcttggcctygtccccggaggacagggaccagggcctcttcctgctacgcaaggacagtgagcgccgtgccatcctgtacaaaatcctctgggaggagcagaaccaggtggcttccaacctgcaggagtgtgtggcccaggtatttgcccgagggagggcaccgactcttcccgctccctctgyccaggtcccagtccccagacaggtccaatcaggacctcagttcctgccgccctggaacatctgcatagttacggtgatcactgtaaatgtttccctaacgtccttcccttccccaacaaaacaaaagaaaatacaaagaaaaaaagctctgccgaaacatgaatttgcagataccgcagtgattccaggcactggtggggcggtgctgccccctggtgaaaaccagccagattgtagcagaaagcccgaagcaccttctctggcctctcatgatccggttttgagtcctggagttaatccccagctgtaggacacgctagagctgccctcagaagctgggagaacagccaccttggggagggtggttatgggtgaaaataactgattttgaactagggcacaggactggcaaaccgattcccctccattatttcagtttatttattattgttttttaatcttttttttttttttttagacagtctcactctgtcgcccaggctggagtgcagcggtgtgatcttggctcactgcaacctccgcctcctaggttcaagtgattctcccgcctcagcctttccagtagctgggattacacagcgcctgccaccacacccagctaatttctgtatttttagtagagatggggtttcgccttgttggccaggctggtcttgaactcctgacctcaggtgatctgcctgcctaggcttcccaaagtgctgggattacaggtgtgagccaccgtgcccggcccccctcccttatttcagatggaaaagggccttttaggaagaggccgctgctccgctctgaactatgtctatggccttgatgggggctcttacaaggggttaaacaggaagccattcacagaggggcttagctgtacacccaccagggagaaggggccaggaccctgacaggaaggttatggagggaacaaacagagaccccttctcacctgggagttccacaagtttcttagcaaatggaccatcttgtttcccccagtgtgttctgaactctcgctctctcaatctgactcaatgaaaatgatttgtgtgtgttttcagagttccgaagagttgcatctctcagttggacacatcaagcaaatcattgggatcctgagggacttcatccgctccccagagcaccgggtgatggcgaccacaatatcaaagctcaaggtggacctggactttgacagctcgtccatcagtcagattcacctggtgctgttcggatttcaggatgccgtaagtgctccatctggccctagggaacacaccagatcttggaattcagttaccacctcctcccatagcccccatctcttcttaactgtatacacctgaatcccaagcttcagcagctcctcctaaacaatgaagtccaggaaatggcatctgggtgaactggctgattgcatgcggcccccaagaggatgagtgtaggttgccgtgattctccgtgcaatgcactggaaatctggatttttgtgattttagtttattttattattttttttttttttaggtaaataaaattttgaggaaccacttaattaggccccactggatgttcgcgatggacaacatcatccgccgagcggtgcwggccgcggtcaccattctcatcccaggtgagcgccccctttgtggtcaaggtcagctttaggccgtgaaaagataagaaatatcctcttcattcaacagttgttgcttttctcttttccatcttggttatctacttccttggaattaaatgcatgttgtcatagacttcttccggggctgattctgtagttctgagagcatctcgtggtgctgtatttacgtgtccctgaagcatgatgaaggtgactacacataaactataactcacaatctcaaaagggagcatggggccggacgcggtggctcatgcctgtaatcccagcactttgggaggacgaggtgggcagatcagctgaggtcaggagttcaagaccaggctggccaacatagtgaaaccccgtctctactaaaaatacaaaaaattagccaggcttggtggcacgtgcctgtaatcccagctactcgggaggctgaggcaggaaaatcgcttgaacccgggtggtggaggttgcagtgagccgagatcacgccactgcactccagcctgggcaacagagtgagattccgtctcaataaaaataaacaaatacataaataatattaaattaaaagggagcatggggccagaggggaagaatcctcagtcctctggtatcccttcatcgtgcactcagaaatgtttcttnnnnnnnnnnnnnnnnnnnngtattggtaactgacaatacagtggctcagattcctctctctgaatcatcatgtaatttttacagaagtttttggtttttgtcaatttcctttttgaaatgttaccaaagttgattctccttctctggtgacttcttcctgctaagggaggctttacagcccattctgtcgccatcatggtttccccctttccttcagctccttgctgtttggctccagcccaccctcccgaatgcactgtgtagcccaggctcagctgcaggagaggcttgggaaaccccagtgcttaattcctctcccactccaagcagacaccttctgtagtaaaacggcacaggcttgggtggcagcctggctctacttatttctttcttttctttttttttttttctgagacagagtcttgctctgtcacccaggctggagtgcaatgatgcgatctcgcctcactgcaacctccatctcccaggttcaagcaattctcctgcctcagcctccggagtagctggggctacaggtgcgcgccaccacacccagctaattttttttagtagagacggggtttcaccatgttggccaggatggtcttgatctcttgaccttgtgatctgcccgcctcagcctcccaaagtgatgggattacaggcgtgagccactgcgcctggacctggctaatttttgtatatattttttagtagagatggggtttcaccatgttggccgggctggtttcaaactcctgacctcaagtgatctgcctgcctcagcctcccaaagtgcttggattacaggtgtaagccattgctcctggcctggttgtaccttttgaacgctggccttggttcacttcatatccttaagcctcaatttcttcctgtggaaactggcgtgatcaactttacgctgcagagaaccaaatggaacagtctcttctccatttgtaaagtcagcagtcccctaatggagcatggcacgggctgggccagcttctgaacagcccsgtttgctgacctgggtgtctgcgaccccaggccccactggcctggtttgctcaccattgtcatgtcttgtgtgatttgcagagctccgagcccactttgagcctacctgtgagactgaaggggtagataaggacatggatgaagcggaagagggctatcccccagccaccggacctggccaggaggcccagccccaccagcagcacctgagcctccagctgggtgagctcagacaggagaccaacaggtgaggagcttctgggccctcctctgggagcaggcgctgggacagtggcctgagccaccaagatgctgattaattggctttattgttgaccatctcacccaggtcttaggaaaaagcagcttcatcatccacgaactaggcaagggcgcatattctcagcctcaattgagggactagaggaatgccttcctttaaaaaaaaaaaaaaaaaaactcagaatcagagaggtatatatagtaccttgccccagaccacacagaaattactcatactaaaggcagcagcatctgtgaattctttctctcttttcaccaagacggggcccctggcatggtgtgtgggtctcgcaggctcagcagcctgcccctgcagaagtagcagggtttgggggttggttagcacttcatcagtggatgtacatcccataatcccgaccccgaggaagtttgtcctgttgtcatttcttccatgtgatttgtcatgatccctagacgggcattagtggactagcttcccaaccagggaaccctggcatcaccatcatattcctccaatgcactggtctgttttgttcacttcctggcacatagtaggtgcttaatatttgtgaagtggatgggcgtggtggctcacgcctgtaatcccaacactttgagaggccgaggtgagtggatcacttaaggtcaagagtttgagacagcctggccaacatggtgaaaccccatctcttctaaaactacaaaattagccaggtatggtggcgcacgcctgtaatcttagctgcttgggaagctgaggcaggagaatcgattgaatccgggaggtgggggttgcagtgagctgagatcgtgccattgcactctagcctgggcaatgagagaaactccatctgaaaaaaagaaaaaaaggggaagaaatatttgtgaaatgaataaaattattcctgtttgctctgggaagtcacattatcagctgcgtgatttggtttttaaaagtaatccatagttgaccgggcacagtggctcacacctgtaatcccagcactttgggaggccaagatgggtggatcataaggttaggggttcgagaccagcctggccaatatggtgaaaccccgtttctactaaaaatacaaaaattagctgggggtggtggaacttgcctgtaatcccagctactcaggaggctgaggcaaaagaattgcttgaacccgggaggcggaggttgcagtgagccgagatcgtgccactgcactccagcctgggcgacagcatgagactttgtttcaaaaaaaaaaaaaaaaaaaaaaaaaaaaaaaaaaaaaaaaaaatccatagttatagcaaatgagttggtactcattccaaatgacactttgttgctgtgggatcattgctgaggaatgctaatgactatttaaccgggagacaaggggccagttacgtattttggatgaaaggttgtgtatgctgtcagggatctctcaagttcaatcttagatcatctaatcatttctttttttaaaagacccagagctttagttaaatggtagtggtggcaacattttgaaagtttttttttttttttaagttcaagagtacaagtgcaggttttttacacaggtaaacttgtgtcatgggggtttattgtacagattgtttcatcacccaggcattaagcctagtatccattagttgcttttcctgatcctcctcccagcctccaccctctggtaggccccagtgtgtgttgttcccctctatgtgtccatatgttctcatcatttagctcccacggcacgtggtatttggttttttgttcctgcatttgtttgctaaggataatggcctccggctccattcatgtccctgcaaaggacatgatctcgttctttttttatggctgcataatattccatggtgtatatgtaccacattttctttagtctatcatcaatggacatttaggatgattccatgtctttgctattgtgaatagtgctgcaatgaacatatatgtgcatgtatctttataatagaaccatttatattcctctgggcatatacccagtaatgaggttgctgggtcacccaataagatttataatcaccaaattcataaaatgattatatatgggtttgaaggttatttctctccactgtcgatagtcattgtgttattttccagtctcagtggaatgaggaattggttaggcagcagccagtctgtgaatggcattgacgtaaactgtacattcctgcataaggtgcttgtccttgtgtgtattagtccattttcacgctgctgatacataccagaaactgggcaatttataagagtaagaggtttaatggacttacagttccacgaggctggggaggcctcacaatcatggcagaaggtaaaaggcacgtcttacatggcagcagacaagaaagaatgaaagaaccaggcggaaggggttttcccttataaagccatcagatctcatgagacttattcagtaccatgagaacagtatgggggaaaccacccccatgattcaattatctcccactgggtccctcccacaacacaagggaattatgggagctacagttcaagatgagatttgggtggggacacagccaaaccatatcactgtagtatgaagtgccttggctatgtggcagttgggcagagccaaaggaagatgacacctcttagacaggatgatgtgtctgtcctgatgaagtcctgagagtccttcccactggatacaggcacaagcttgagttgtctccttcactaacgtaaaaggaggactactagagagaccaggatgaaggcaggcagttgggcagggctgggagaggacttctaatttgctgagtgccaatatttcctctgctgttgtgctggggcagaagtgttctcctctccccaccccactttgccaccaaataatccaggagttcctgtgttctcatctctctactgttgcagtgacttctcatggcaacttcaataattaccttcagtctttttttttttttttttttttttttgagatggaggctcgctctatcatccaggctggagtgcagtggcacattcttggctcactgcaaccttcacctcccgggttcaagcgattctcctgcctcagcctcccgagtacctgggaccacaggtgcacaccaccacacccagctaatttttgtatttttagtagagatggggtttcaccatattggccaggccggtctcaaactcctgacctcaggtgatccacctgccttggcctcccaaagttctgggatgacaggtgtgagccaccacccccagcagccttcagtaatttcaataaagcttagttctgtattcccaagttcaccagcatggatcatataaatgaattaaaggaacacacagttaagaaacaaatcccatgtactaggtatgtaagcaaacaataaaagtgtgggggccaaggcccttggcccctggaggtttgctgaaaatcacctgcatgaggctgattaatgagagaaaaggcatgcaaatgtatttaacatgtatttaacttcagcatgaagacccaaagatccaggggaaattgtccatttttatgcttaggcttaacaaagtatggagagctgtggagaaacagggataaaaagggcctgatcgaatgctgatagactgagtggggaaacccagcaaggcctgtctgtctagatccttcttggcctctctgagtagcattcctttctcctgggtgtggggcaggaccctctggaatcgggggtcttatgaactacagtcaaacaaagtaggtcgaagaactttttttttttttttttgagatggagtttgactctgttgcccaggctagagtgcagtggtgcaatctctgctcactgcaacctctgcctcctgggttcgaactattcttctgcctcagtctcccctcccgagtagctgggattacaggcgcacgccaccacaactggctgatttttgtatttttagtagagacggggtttcaccatattggccaggctggtcttgaactcctgacctcaggtgatcctcccgccttgacctcccaaagtgctgggattataggcttgagccactgcgcccagcccaaagaatttttttttttttttttttttgagacagagtttcgctcttgttgcccaggctggagtacaatggtgccatcttggctcaccgcaacctctgcctcccaggttaaagcgattctcctgcctcagcctcccaagtaactcggattacaggcatgtgccaccacgcctggctaattttgtatttttagtagagaggcttctccatgttaggctggtctcaaacttctgacctcaggtgatctgcctacctcagcctcccaaagtgctgggattacaggcttgagctgccgcacccggccaagaatttctttataaccaatttttacacagaaaggcggagggaaagttagagtcgtatttttaggttttgtggctggctttggggaggagttctggtttctgtgccccgctttggggaagagggattctatggtgcctccaggagaatggactgagagagggaggcaggagaaggtcagaggaaaactttttcttctgaggctgctgctgaggccatttgggggcactgttttctgagccccaacaaaagctagacgtggttccaatctgtcagccctttcccccaaggcatgctatgcctgagctggcatgtgggggaagtttgaggcacagttgtgccaagtcatatctgatcccagagagcccatgagcaagactgggtttcaggaggcggtcccttgggaagagcccagcctgtggactctgggcgttacttaactcctctgcctcagttacctcagcttcaaaacaggggtttagaacaaccagtgcttcctagaagtgccgcagggcttcagtgactgaattcatgcagtgtttggcacagtcctggattctgggtaggaagtgcttggtggatgttggcaggagccatcctccccaccggcagagcagcatgtctcactcactgtccctgctctgccccattacaagcaggggcttccagctgggtgcggtggctcacacctgtaatcccagcactttgggaggccgaggcaggtggatcacttgaggtcaggagttcgagaccagcctggccaatatggtgtaaccctgtctctactaaaaatacaaaaattacccatgcatggtggcgcatgcctgtagtcccagatactcgggaggctgaggcaggagaattgcctgaacccaggaggcggaggttgcagtgagccgagattgtgccactgcactccagcctgggccacagagtgagactctgtctccaaaaaaaaaaaaacaaaaacaaaataagaagcaggggcttctgtccccttcgtttagtccctgtgtgaggaggaaagaaacttaccattctattctagtttcagctgccttatctgacttagggagccaggtttaaataatcacatcgtccttctggctgagttctgattaacatcggcatcttttggttcacgatacgtttttgagacaaaactgcctgagtgcgttcaggctactgtaacaaaataaccagagaccaggcagcttataaacaacagaaatgtgtttctcacagttctggagactcgaagtccaagatcgaggtgccagcagattccgtggccagtgagggcctgcttccccattcacagatggccatcttctcgcggtgtgtcctcacatggtggaagggatgagggagcctctggggtctcctttcacaaggacactcctctcacctcacctctcaaagctccgtctcctaacaccatcaccttgtgggttaggatttcaacatatgaacttgggccgggtgaggggcacacattgagtccattgcaaaaatatatccaagctgtgagcactggcctttgttgtcaaggggaggaaaacacaaggaaggttcccctctgcagactgaagtctgagtcacagaacctgaagaaacacatgtgcttccctctctaggctgactcttagacttgtcccattttccattttttttccatctctaatgtatgcacaacagatgcttgagttaaattgaatggtgttgaatgctctctggataatggctttttttttttttttttaaaccagacttttggaacacctagttgaaaaagagagagagtaccagaatcttctgcggcaaactctagaacagaaaactcaagaattgtatcaccttcagttaaaattaaaatcgaattgtaagtcattttccaatgagacagactttaacatctagctaatattctagttagctttgaagaaacatttgaggttatcttctgttaatccaggactccagtagattctagactacttctcaatcataaaaagggactactgatasattcaacaacatggctgcattgtaaatgcagtatgctaagtgaaagagctagattcacagccagcaccgtagctcgtgcctgtaatcccagcactctgggaggctgaggctagcagatcaattgaacccaggagttcaggaccagcctggtcaacatggcaaaaccccatccgtacaaaaaatagaaaaaaaccagctgggcttggtggatgcatgcctgtagtcctagctacttaggaggctgacatgggaggatcacctgagcccaggaggttgaggctgcagtgagccgaggtcatgccactgcactctggcctgagtgacagtgaaaccctgtctcaaaaaaaaaaaaaaaaaaaaagattcaaaaggccacataccatgattccttttcctccagaaaaggcaaaactacagggacagaatcagaatggggaggtgacgggactgattgtaaagggcacatgaggacttttgggagtgacagtcatttctgtatctgtgctgccaccttcatagcacattggacacctaaaaagggtagtttactgcataagtaaataaatatgcctccatcaacctgacattcgttttgggccacttagaaacgagctccagagctacctcttggaatgtggactagataagctctgacctcaacactaaaacctatttccttgtaggatttccagtgcagttagggatgtgattcctaaggaaaggcatttgaaagatgtggggatragcatttaaagtggtagacctaacatgtcaaattccaaactaactgaaggtatcctagatgaggaggctttctagaaagtgaatctcagaattatgaattgtgtaatacgtattagcgtggttcagtgatacagggttaattcatctctttttcacatcacatttacattctggaatcatttattaatccaactggttacttttgaagagttttatggttagactaatatataacaaattgccaatcgttacaggtattacagagaacccagcaggcccctacgggcagagaacagataaagagcttatagactggttgcggctgsaaggagctgatgcaaagacaattgaaaaggtaaatttacaacaaagaaattcttatgctgttgttacacagctgctcagctcttaaggatctgatctttgtttcagattgttgaagagggttatacactttcggatattcttaatgagatcactaaggaagatctaagataccttcgactacggtargagcctcaaaacagtttgtataagagaatacaactttttatgtgtgaatatgcttcaagagcagaaaacaaagggctgggcctccccccaaactctggagttctattaggttcaagctgggaaaaagccaaggtggggcagaaactgaaagccaggcagaagtcagaaataggaatgtgacagagaagagctggccaatctcctgccattaatgcctggctgggagtgggtggaggcacatggcaagcgtgcctgcacgctggacccacccccttctttaaactgcagcctgccttcttgttcccgagtcatttgaaatagccagctctctgcaggtacgtacctctaaggccatgtcctactactgctgggacacgagcgtcacctccatatgtgaggagaatgtttttattttcattaggtttttaaattagggactgcagttttaagctctgttggcttgaagcactgactctgaagacagctgtgtttgtttcccaggggtggtctcctctgcagactctggagtgcggtctcccagtacagaarggctcaggaggcctcagaaaccaaagacaaggcttgataccaatcagctaagctgtggcagagtgtcccaccacgctacatgttttgttaaagcttctgttagtgtatacacgaattccgctgtgtttacatatttaaaaatgccattgttcaattaatagtttaagaacttgttttaaatactgtcctgagtttcttttgaaacctgttatttataaacatagaactgtgtgtattgtgaaaacagtgagccttggttttgacctcccggaatattaggaaattcacttgtagtcccagctatgcaggaggctgaggtgggaggattgcttgagcccaggaggtgtggaggctgcagtgagccatgatcacaccactgcactccagcctgggcaacagagcccgaccctgtctcaaaaaaagtacacccttcagcacttgctggaatggtgaaacaaacaaggggtatttaacaaacatggaagctgggacactgcctcagaactggtatggtacttcaatttgagaaacacaaaactgatacgaatgtgccttgtagttaatgtttgatatgaacagaaaatagcttcatatttatactgaatgtgtaagtagagaaaactaagttatgtggcctttgaaatgattacaaaattggaatgattacaaaagtcttattttaaaatggaactgtcctcttgcctgataataaatattgtatcttgtagagaaatggtcagcgcgaacaggctgcagcaccagcgctgctcggggtgggtgctatggttggtagaattgctgtgatggggccccgccataatggtctcctcccaaaaaggtggctgggggcaggggaaacaggcatacaaggaattgttcttccttttcataattagagtatttgttcaaagtatactattttaagtcaaaaataatctttaagcactcaataattcatcttttaatgcactaatgtacaaactgcatgcaattactacctgctcaatctacacacttaatggaagtttccaagaatttcattgaatttcattgactgggttttcttcctccttaaccaagttgagaacactgtctggtagccccctgaaggtataacctctccttctcctccccttaactgactgacttaaacttgatccactgattggcaccacgaacttcaaaaggtgggtcgctggagtagatgtggtagcccagctcttccaaaggtggctcaggatcggccgtggcaaactgggcagcatcctcaatctccttcctcacttccacatcaatttcctaaaaattaggtaacagtgtaaaaggttttagaatgaacagcagcttaggtaccaactagagttctgctgaggacctgttgctggtgtaactctttaactacaagtacgaacagttgctaattcagaagattttggaatacagatttctagggtgtatctattttatgaattaaaaatccacagtatacttttaggaaaaaagaaccatactactgtgggggctttgccactgtgatggtggttcacagtccaccaaaatctgaaatctgaagagtaatacaattttgaatagaggaaactaaaggaaaagcccccaccccaagggactttggaactatggaactatttatgtcccaggacatcactttctgggcttggaggaacccacacaaactctgtggccacccaggggtggcaacttttaaagccaaccttcaaaccaccatgaacaagtgactgtacctttagttcttccacactggcaagattgctgttcaccatcctgtccttgagaagcataatagggtcactcttacttcttacttcctgaatttcttctcgtgtacggtaactatggggagggaaaagtagtaatcgatcagtaagagcagttccagtagagcaaggacggcgtgatgaaacatgatatggggttggattgtcccaatgaggtgaaatacagaagtgtgtttctgaaacaaaggggcataccaatgcttatgtcactataggcgtggcagagttgttgttatactttcaaaataccagaacgcagcctaacattctgtaataactgcttctgtcttttctagaaaaccgtacactggtgagtcacatggcttccctggcattccgacaacaggggccaagtttttgcttgctgctttgatttagatgtaaggttctaaagaagtgtcacttgtcccacccatttgggctcctgtatactacatgggtggggacagcagagatggtgtgtgtggtgataattagactttgagacatcagagcgccaagcaggaaatccatgtgccttgcctttctcccttaagtccccctaaagaagcacagccagcaaaaccaatgtatcttatgcctatatcatctgaagtaacactaaaaggattctaccattttcaacaatagatttacacaaagtgcatttttccatatactgtgctctctacatgatttttccttagaagtccactctacaaaggcttatttattcaactgtgtcaaaactgggattccagaatcacaggccagagctactaagcaaaaaagtaaaattcatgccttcctagtggaacctagcttttttgattgatgtatttcaacggattgaacacccagttacccttagctctataccagacagaggaacatctccaaattctgatcctcttcaggtagagtatgccaggtgtagacttggggtaatgcctacaaaagctaaatgcccccaagatactacactaccatcagccctgttttatgtaacaatttccctctacaattaaggtatataacactctttctttaaaaattgctgcttgtgctcacacacactatacactgtaggcattttcagaaagctttcttattaggaggcactgctttcagataacttgatgcccaacacaactgcgtacatgaagtgaactggtatctagctccaaaagcaaatactgaaatgtgttgcttttgccatgtaacaccattcaaagcccacccctatggaaaccacactgcccatgagcgtacctgactccagggtcactcatactgtgtccgtggtaacggtaagtctgcagctccatcaggatgggcccctaaaacagaaccggtaggcagttagttagttaggaacgatgactggaagaacaggccggcaatccacggcctcaaacgcaggccctttattaagcgtccagtgtagtcttatcagatcttctgagttgtcacgaatttcttattggttgactgatctgttctcatttctagcaagtattgattgcatatttcatctttctcatttttaataaggcaatctgccaacagcttgttttgaatcaaaaaggctttgaaggccaggcatggtggctcatgcctgtaatcccagcactttgggaagctgaggtgggcagagcacttgcgcccaggagttcgagactagcctggacaacatggcaaaaccccatctctatcaaaaaatacaaaaattagccaggcatggtggcgtgcgcctgtagtcccagctacttgggaggatcacctgattctggaaggtcaagggtgcagtgagctgtgagtgtgccactgcgcgagaccctgtgaaaaaagaaaaaggctctgagcatgttctagagcctcctgctattggctagacagatttccatctcatgctcctttctcatggtgtgttgtggggctggcagccactcctacttcacagaccttgctagtgtgtaacaaagttggcaggcaccaacaacctctgctacccaaaccccaaggctctgctgggagtctggacagttgggctcgctcattctacactagcccacttccaggagacggctctgaacactggggtggagaaacattgaggatccttggttggtttggtgcagcagttaaaatgggcgagtggggagctggctccaagacagagtagctgtgtacctttaactgctctatggctcagtttccttgtctgcaaaatgggcaaaacaataacacctaactcagaattgtgaaggttatctgtttgggaaagtcacacattctacaactacattctacaactccccttgtctccagccagggctggcccccatgtattcttttcaggaattgggagaggtggcgtcaatacccatcactcagggcctggcactcccagccttagggtcctgacatagactgctcagcccattgtacccaagctgtagtcttggtcctgctctagttcattctactcattagctcttatttaatgttactacattcccaccctcacttccctgtctctccactttgtgacatttccatcattgctggccacatctgattcacatcactgcctaaacgtacatggtatggcgctgaagtgccaacttcagaaaccttgtttctgggctgtagaacactgatttagggagaacacccaaacctcctaagcctatactagtgccaaaggaagtgaaacctctttaggccagtctccctcttaccatctccctcactgccatacactgaaaagggaaagatccttaggactgagcaagactaagattacgagcttctaccatactgtttaatttgtataagacacacatattaaatgcctattgtatacatgacattctatgctggacactgtggggatccccaatctgttccttcaagggactcatgattaatggggggtggggaggagggacagaattaacctaaggaaaaggcaaatcagttgtcatgaagacaggccaaagcagaggaagcaccagaacggacttcccccaaatgagagaaacgtaggcttcccagcaggtgagctaccaagaccaagctacccaaaggagccctgctcccttcactctgcttccatctcatgcacctcaattagcaggtacccactaacagcttcagcaggcacatgggaggcagtctttgaacttccagagataaatgtcactagcccagagggctttagagccttaccttcccagatctacaataggcagcagcaaaccttgttgcctctcggacgcacaggatatccattccatccacctggtaataaacaggggaggggcgaagcatgaatccaactgccccaaaccattttactttcacatgacctgctcctgtatgagaatgaaactctccaatgtttctaagatcgtcaagggtctgcacaaggacatacccttggccttggccttggccccggccccaccacaggtgtccttactctcagcccaggaatgaaatcgcctctcttgtagtaatcagtgctggctgccgctctctcaacagacgttcccattccatagcgattattctcacagatgaaaatacaaggtaatttccacaaagctgccatgttgtaagcttcgaatatctggccctggaagtagttacgaaaaggggtttcatttggcttctttctccaggcttcatcatctctaacagctgctgctctgcctggcacagaaagctttcataaagcacagaaagcctcctcttctaaaaccgagctttgggtggtgagggaaagcggggtgggtggtggaggagaagtagcaggcatcatactcttgcaactaaggaaggtgacaaaccaactactacttgtttctttggggccatgctagcagtaaggaacacactggaaaaaagatcaatatgaaatctatcaggcccactggatagccagagtgaaccagcacctaagaatcagcctctagaacagggcttcacagagtgctggccacagactggggattactcggtaacaagagaagcatagaaactgagttaggactcagacgctattatccgaatttgacactgccagcccggacatccaagagaatgggtctgtattgttttgcaataggttgtggggaggtcctttaccacagggcctttgccaagcactgatgtagagcaaaggtgagctccttcacaggaatgtgcccccgtaagtctcttgtgaaacaacgct

SEQ ID NO: 94801 - DNA, 17538 bp, Homo sapiens
tgcgtctgggttcacacgtatgcctgcgtgtttctgtgcgtgtgtttgtgagagtgtgtgtctatgtgtgcccaccaacgcccctgccgacagcagcctaggtgcagccccgccgccctgtgtccggggcgcgctgctccacttcttctttgccttctgagccctctttgctgggcttccagttcctgggcatctttgaactccagcttctctctctggctgcccagctccaccctgactttcctgggtcccaaacccaaaaagctcagagcagccaatgggtgcctgggcacaggaaagggtccagagagctgcccagccccagaaggagctgcgtcctccctccactggccagcctgcggctcctccccaccccagaaagaagggctgatcaggagcacatgtggaggcatttcccagcacctctcacctgattctccagccttctgggactctcatctagggctctgttttggatgatctgagagtcccaggggcttggcatgagtgggagaccaggcccaggcatctctgcagctgctgagtgagcctctggaaccaggttttcttgataacagcagcttcctttgacggatctgcccactccaggctgttctcatggggctgcaaatctcaggacttgtcccaaccacagaagggaatgcataacccaggcctggcccactgtggtacccccgcccccccgcaacgtgatcattggcctaggttggggacatgactgaagtgagactagtgagagtccttccctagacatctgtatatggaggccgagacagggaaaaacctctcttttctctgaggtccctgagatgaggtgacaaatgcctcagcccatttgcgagcctgtgtttctcctgctcttcatgaagaagtccgcagaccttagggaagagctaggggctgggcaactgtccagagagagaggctgtggagggagaggggatcctgttatatgagccaacaaatccctctggctggagccaccttgggtcgggctgctgtctctcacaaccagaggagccctgagcgatccgtgcctggaaccacacagctgggtttccagggagcacctttgcctggccctcgacatgcctcatcgttcctccctggccttctcagatcctgcacagaggctgtggacaccctcttccattcctcaagctctaaacccacttctgcttcctcaactgccacctatttcagtgggaaattttaacttccttaactcgttcctttctggccccaattgcttccattgccgcttccccattctgtcctcctcctgcccaggttcaatgacgcagtggccctcctctggccctggctcaaggcccaccaagagagcagggattggagggctgaaaaccggtggttcccaaacctgcctacactttgagaatcactgggaatctctgggaaattacagtctcctaggcagcatccttgcatgcaggctctggaattggtaagaagcacctcctctgggagggcaaggtgtcttcctggttgttgggcttggctttattgggcaggactgggccatggaagggcacctcagggttccccgcagcaggatgctgcctggcatgctgcttctatgagagccctgcttgcagccttttttttttttttttttttttaagatggagtctctcactctgtcgcccaggctggagtgcagtggcacaatctcggctcactgcaagctccgcctcctgggttcaagtgattctcctgcctcagcctcccaagtagttgggattacaggcacccgccaccacgcccagctaatttttatattttagtagaaacggagtttcaccatgttgatcaggctggtcttgaactcctgacctcaagtgatctgcccgcctcagcctcccaaagtgctgggattacaggcctgagccaccatgcccggccacatgcagcctctttaaacttcttcctgtttcagttcaacgccttgtgatctgggcttctttctggcccagtcttcccttgggcaaggggagttcccagactccagaccacccacaccttgaagacacggtcatctcctcctacctcgctgcttgctccatcctggccttctcctcctcccaccccttcaaaggaagacctgtcccccagggaaatgtgttctcccttttcattttccatccctacttcccttcctgccctagatccacacactgccttggcttcacacaggagccatttctgggagacatcagtttacctgggggcactcccccagtgcttgtctgggtagtgagccccttgactcagcagccttgaggtccctcctgcactgccctgcaggatgggtcaggttctctgcagaggatattggtggccttcaaggaccagaggtagttgagaaagcgtaggtctcaccccacccttccccatcgggtggcatattataatgaaatcaactctcagacccaacggctaccctactggaaacatctgttagcacgaagcacagaaacagacaccctccccctgcccacaagctcagggaagtctcactctgtcctgtcacaacagcttttgtcagggtgaattcaaggacatgctcaccatgactagctaacctccagtcagagcaccacctgcgggggcccagaaccactcagagaaagttctagacccggggcactgccctgctggtggctggacttgcccaggcacaggcagaggggacttgcggtgcctcttcccaggcacacatcttcagcaacactctttttactacagaacaatgatttccgaccctcccgtgttaatgtacagaccctctgctgtgacagtagacaaccacatttgaagtgctggctgtggctgcccctggagtgtagactgctgctcagggtctttcaaaaacaccaactaagtttaactcacacgctcacaaaatcacagcagcactgaggcgattacagccagcatagctgcctgcccgtggcccctgctgggctccgcgctctcgccccacgatggccacctctctgcaaggcacgcaagactcctcaccttctgctttgggggtccctctgacccaagttggcccccaccttgtccagtcaagccactgacccagtgtgttttctggccagtcagatactcccacccttgggtctctgcagccctcgcctctgggcaaaggcctgtgctggggttaccagcagggtcggattccaacctattctggaaggttgaaggggtgggatataaaagaaagtggaggtggaggtagggatgggctgaggggccaaaagatgtactggggaagggggcatttcttggggtcctccaacgtcctggctcacgagcttccccctccaagggagcaacctgaggtgcacagagtggccttgtgacaaggacacagaacccacctccaccttggcttgggactcctgcagcctatgcagccagctcatccgtcacccaccctcttctcctggtatctgccactctggaacttccctctacctctgggctctgccttcagccagggttggggacagcaggtaggcagatcccatcgcagacaggcctgccttcctcagggcctcgcttaaatccacaggaatctgctggggctctgccctctggctggggcaggtggaactggccagattggcggtggggggaccactgtgcttgccatagggactggcccagctgccccacaggggagcacattggagtaacaggggaggctgacccgagcctggcccggctccacactccccacccccaccccaccatcagggactcgcatttaattgtcattcatttcccctctctgaattcaaactaggcacagatcaaatgattccatgatgacaaactgcctgtctcaactgaccagattccactggcaaacactccgctgaccttgggcagctccctctgctcccacctcctctggcccttgtgcttctggggctttgtggagtagctggacatcaatgataacactaacagtagccggcctgccaccaagttctttacataggggatgcctatgtctgtgcttcattggcgtcatctcacaaggccctgagctggcaggaaattgaggtctcaaggggaaaagccacctgcccccagtgacaaccaggaagtgcaagactctgacccaacgcccatgcctgccatccccaaacatgggctcaaaacccccttcccagggacggctgtgtccacccctcagcaggaggaggagaccccacagcaccgggtgagaggtcagtgctgaagccagggaggcagctctcagcagggcacctgtgtggagccagggaagccagggccacacttgcagggtgaagtggggaactcggaaggctgggcagtggagcaaaatgcttggtgccctgcgggaaccggtggccaaggctacactgggatgaagggagccgtggagctgcagaatctgcgggtggccctcagtggcaggcagccaggccaacaggggctttgggctgcaggtcagcccctcccctgctctggaacttttggagggccattacaaaggacatcagccccaagatactcctctgaaattctgcctgaaaggcccttcacattccctaattggcacttacaacattccagaacattctatggtaccttaagtttctcctccccctccaaagggcccttgaaccttaaggatagggcagaaggggctcctcaccctggcctcgagggcttaagatccagctgaggactcctagcctccctgtgtgctgggcaggaaagtagctccatgtcactgctgtccctgggaaaggaaaaaaggttgaggaagggctcagagccagccttcagaccaggcaggaagggttcagagccagccttcaggccatgcaggcctcctggatgtgcttactaactctgggctcgctgttctctgagctggctgggagttcccctctgcacccccgtttcctcccctgtaaggtgggaataatagcgtatgtctctaggattaagtgagccagtcatgcatgggccgagaaccaggtttggcatattgtagctgctcagtggacgttagctgttatgattggaccacaacgtgcttccgtttcaattctgtgggccttttggaggtcctgctggatgctaagcaccgaaacctcaacccggaacaagaccagaacaacctgagcaacaacaggaccagcgatggctctccctgctggaggattctggaagtcacctggctggaccaagccctctccgtgttctctgtcagcccactccccagagccgctaggcctgatgtgcacaagcagactaataaaggcttgaggacaaaaagggttttgagtgataagtgaaaaaagaaaggagatagggctgggccaacaggccttcccttggtggtggggagccctcagaggtgggaggaaccccagaggtgaagagagggacatggtgggggcacaaaaaaagcttccagagccacaggcctgggcgagtcctgacatggagcccagtctcatacggcctctttccctagtggctggctttgctcctggccctaggtagcccaacagctgggcaaggggtccgtctggtcaggggaaaggtgcaggggcagaaggtagcagagggagaaaaggacaccctgtctgcctctggccccaaagacaagtccgaatggggccagagggaaatggctgggccttggggtgccccagggtcttggaggggaccgggtgttcaggtttcgcacaagtacaggagggaccggcgaccgccctccccccgccccgggaggctccgccagggacaggcgtccccgggattggaggtgacccccgtgggttccgaagccccgcctcggccatgcactgtctactaggcgcgcttggggagcctaggggccgtctcggagaaatggggtggtccccgccaggcggcggcggggcgggccctgggcgccgaaggggttaaggcacctgggccaccgcccctgccggcccctcctcccgcggccgggaagaggaaagtcgcggcgggggcgcggcccggtctccgtccccacccgcccgccgtcccgccggcccgagccgtggcgcccagagctgcgagccgctcgcccctccgccgctccggcccgggccgccatgtcgctgtggtgagtggggctgggggccgtcgggggcctgggcgggggcgtgggcccggggctccccctcctccgtggccacagacgggcgccgggactcccgggataggagatgcccccgcgcgcgccgcgccggcctcagtttcccgggggcggatgggcgggcgggcgcggcggcggcggcgggagatgttcgcggtacgcggccccggacccgtgggggacgtcgaggggtctcggggcgccgcgctcagctccccggccccgcggccctggacaccgctccaggaccctggcggctgggaccccaggtcttgccggcagctgggtcccctctcccttccagacccctgagggccccctgcgtccgggccactctcctcctctcggggcttccttccgcgggacctcggaccgccgcccgcccggcccctctccgcccctcccgggctttccctacgaatggagcggacccggcaggtggagcgcccgcagcccagggcctcgccgccttcccggtgcaccccccgacctcccccgtcccggcctcggtgggcggcttccctggaacccctagggctggcagggccggatccggagccctccgtttcctccccggagagctggaccttgggtcacaccccccagcctgcacctaaggtgcccctgtcttcctccaaccacatgccccagcaacctggggaccctatggggaaaatgtcgctctatggggctcagcctgcattcaccctggggcctggacctgcaaccggaccagccctcagggcaacccaggcgtctccacgggctgcctgtctctcctggcaccctgctcctcccccttggaggtcagcgccatctctctgctaggctggccctggaaggccactctgctgtccccagagctctcagcccccaggtctccactggggagggtggggcaggtgtcctggcagcccccggagggtgagatgaagagaggaggtccttcaggacaggggctcaggccccagggcttgggacgaccagcactcctggcagagagctctaatttctgcttccgaaatgggtgtggaccggggttggggtgggggggtctctgggcaagaagggtccctcaagggctggagctgcaaatgtgccccctcccagggagtagagctgtagcctcatgtcttctaatggggtgttatgagctggggatgttaaggtaggggtgaggggcagtgccatgctagaggtgctcactgcatccttgggcctccatcaaccatgagggctgctctttgttgggtgagacagactggagaagggggaggagggccagtcttcctcaggtcccaagctcgagccactctccaatgtgccccacatgtgatggagctcccgggcggcacagaggatcagagggtgccctctcaatgactctggctctgagtcacctaatgataccgatacctactgctgtgggtaggtacaccgcagggaaatgaaaggcattggggttccaggcgtggggaacagggcagaggtttccacctgaggccctcctgttaaggtgacagcattcccctaactgtgcacccgctgcctggtactttatatagcactccaatcctgtgttttagccccatttgggggaagaagaaatcgtggctcagagtggttgtaaaccactcattcagcttgtaagcgtcagggcctgattccacagtgctccttgaggagagggcagggtgggagaaagaaagggcagggtgggagaggaagcgggaccctaccctgacagcttagggactccgggactgagcctgtgcccaggtccacttgcccgtctgggaccacccagcctcccaaggggggcgccaggagagccctgggctcatcttttctctctcctctgtactgtccgctctcccccacaggaagaaaaccgtctaccggagtctgtgcctggccctggccctgctcgtggccgtgacggtgttccaacgcagtctcacccctggtcagtttctgcaggagcctccgccacccaccctggagccacagaaggcccagaagccaaatggacagctggtgaaccccaacaacttctggaagaacccgaaagatgtggctgcgcccacgcccatggcctctcaggggccccaggcctgggacgtgaccaccactaactgctcagccaatatcaacttgacccaccagccctggttccaggtcctggagccgcagttccggcagtttctcttctaccgccactgccgctacttccccatgctgctgaaccacccggagaagtgcaggggcgatgtctacctgctggtggttgtcaagtcggtcatcacgcagcacgaccgccgcgaggccatccgccagacctggggccgcgagcggcagtccgcgggtgggggccgaggcgccgtgcgcaccctcttcctgctgggcacggcctccaagcaggaggagcgcacgcactaccagcagctgctggcctacgaagaccgcctctacggcgacatcctgcagtggggctttctcgacaccttcttcaacctgaccctcaaggagatccacttcctcaagtggctggacatctactgcccccacrtccccttcattttcaaaggcgacgatgacgtcttcgtcaaccccaccaacctgctagaatttctggctgaccggcagccacaggaaaacctgttcgtgggcgatgtcctgcagcacgctcggcccattcgcaggaaagacaacaaatactacatcccgggggccctgtacggcaaggccagctatccgccgtatgcaggcggcggtggcttcctcatggccggcagcctggcccggcgcctgcaccatgcctgcgacaccctggagctctacccgatcgacgacgtctttctgggcatgtgcctggaggtgctgggcgtgcagcccacggcccacgagggcttcaagactttcggcatctcccggaaccgcaacagccgcatgaacaaggagccgtgctttttccgcgccatgctcgtggtgcacaagctgctgccccctgagctgctcgccatgtgggggctggtgcacagcaatctcacctgctcccgcaagctccaggtgctctgaccccagccgggctactaggacaggccagggcacttgctcctgagcccccatggtattggggctggagccacagtgcccaggcctagcctttggtccccaaggggaggtggagggttgaggcctacgtgccactgggtgtggtggggtgcaggtagccagaaagggacctccctgtgtggataattctaggaaactgaggcccaggaacggttggagctgcccagtctggaggccctctctgaggagcgaggcgccaggccctggcagccctcctgacctgggtccgttgctggccccctcagatgtggtgggaggtcctggtgacctctggaggaaygctgtgctcaggtacctgggctaggcctggcctgatgggtctgtggccgcccctcgtcttcacagggaagagtcttctgtgaaatgcctcagtctccccagaggccgggcggccctggcaggagaaactcaaccctgtgcgggctcacaggcaccccccagtccacaccctggtctcctgggagagagggcccagccggctctccgcagccccaggcctgcctggagacgggccgcctctgccacagggcctccactcctggctgtgtcctgtaaggtctggaagggcgaccgctctgactacctcagcgcccctcagaatctccctggggctgcagccctaccccaccccgacacagggcagaagagcagcgctcctggccccccgaagtcccagagctgctgacccccgccccaggcaagtctctcccgcagcccccacacccccaggcctggctccctggctggaaagcagccggtttggccctggaagtggacattcctctattactgtgaagttttatttatgaagaatttggagggagaaggctccaggcttcaggagggggtggtgtcctccctggccctcctcccttccctcccctcattccagctgcctgccctcagcacccccaggcccctcacagcccagccccctccagagccctgccccaccgcaccctgcttctccagggcctagcagaccagcatctgccccggtgaagggatggatcagctgtgggggtgggtgcagaaggttgccacctcctacctcagcgggagtcacctaggaaagatggagggattgacactattttctcaataaaatgggactttttttttttttttttttttttttggtgtgaaacttcctgttcccagctgcatcagagagcctgtctggggccaaggttgccagagatttctgaagacacagcttkttccttgttcttggctggtgggtgcacaaggacttctggaagggatttagacggggctgagtgctaggattaaagtggggatgggagtacggcaacagaaaaacctgggagctagcaatgcacccagcccttgactgtgccctggtggacagccgagctgtggctctagcgtgagccagtgccttcctgtccctgccaagggtgaggccagagttggccccgaggctaatgtttcagtgggtgagattaggtcggccgtacagaggccggtgggctccctgacatcccttccaggcaacctgaaagcactgaaatagcttatggccctgtgccagggaccttggcccaagctgctgacctccagggtggggagggagctacccccaggagaagagtcactcagacagcagtatgagcaagccagccagcagctccgtgcctgcacccagctcaggggaatcccagggggttcagatgcccaggaaggaaaaggggacagcgctactgctatggwatgagaccaccacttctcctgttgtccttcccagyttctccccaacctccccttttccctagtttataagacaggagaaaagggagaaagcaaaaagctggaaagaaacagaagtaagataaatagctagacgaccttggcgccaccacctggccctggtggttaaaatgataataatattaacccctgaccaaaacgactggtgttatcygtaaatyccagacattgtgtgagaaagcaccgtaaaactttttgtcctattagctgatgtgtgtagcccccagtcacgttcctcacgcttacttgatctattatgaccctttyacgtggaccccttagagttgtaagctcttaaaagggctaggartttctttttcggggagctcggctcttaagacgcgagtctgccgacgctcccggccgaataaaaacctcttccttctttaatccggtgtctgaggagttttgtctgggactcatcctgctacatttcttggttccctgaccgggaagcgaggtaattgacggacggtcgaggcggccccttaggcggcttaggcctgccctgtggagcatccctgcgggggactgtggccagcttgagctacgcagatcctgagagcactcccgggtaggcaatgctcttgacgggtggaacacctcgtcagagcagtgtgtggcaggcccccgtggaggatcagcacagtggctgaaggaacgggcacttggagcccggacatctgaaacttggtaagactggtctttggaacttgcccactccatttgagtggaagcatgtcctgatcacccacggtgtgcctgtaccggcactttggtttttgtttttgacttgacttgaattgcttgatactttggttttggttttgacctggcttggatttctggatactctgggtttggttttgattctggtttggtgtaaactgaaaaagtgtgtgtgtgccctttttacccattctttgttctgtggtgtgcgtgcggtgtgagcttggtgttttgtctcaaggaaacacgggtcagacacaaggtaagcctactccgctaggaactatgttgaaaaattttaagaagggatttaacggagactatggggttactatgacaccagggaaacagaattttgtgtgaaatagatcggccaacattagaagtgggttggccatcagaaggaagcctggacaggtcccttatttctaaggtatggcacaaggtaactggtaagtcaggacactcagaccagttcccatacatagacacttggttactacagctggtgcaagaccccccacagtggctaagagggcaggcagcagcagtgctagtagcaaagggacagatagccaaggaaggatcccgctctacccactgggggaaatcaactcctgaagttctgttcgacccaacatcagaagatccattgcaggagatggcaccagtgatcccagtgctgccctccccttaccaggcagagaggctccctacttttgagcccacagtgcttgtgcctccgtaagacaaacatatccctaggccacccagagtagacaagagaggaggtgaagcctcaggagaaacccctcccttggcagcttgtttaagacccaaaactgggatacaaatgcccctgagagagcagcggtatactgggatagaggaggatggtcacatggtggagaagcgtgtttttgtgtaccagcccttcacctctgccaaccttctcaattggaaaaacaataccctgtcctatactgaaaaaccacaagctctaattgatttgctccaaactattatccagacccataaccccacttgagctgattgccaccagttgctcatgttcctctttaacacagatgaaaggcagagagtgctccaagcagcaactaagtgggtacaggaacatgcaccggctgattaccaaaacccccaagagtgtgtaaggacccagttaccaggaactgacccccagtgggatccaaatgaaagagaggatatgcaaaggctaaaccgagacagggaagctgtcttggaaggattaaagaggggagcccagaaggccacaaacgttaacaaggtctctgaggtcattcggggaaaaagaagaaagtccagcacaattctaccagagactgtgtgagggctatcgtatgtatactccctttgatcccgttagccctgaaaatcagcgaatggttaacatggctttagttagtcaaagcgcagaagacattagaagaaaactgcagaaacaggatgggtttgcagggacgaacacatcacagttattagaagtagctaaccaggtgtttgtaaacagggatgcagtaagccgtaaggaaaaccgcagagagaatgaacgtcaggcccggcgaaacgccgagctgttagctgcagcagtcggaggggtctcctcaaagaggcaagggaaggggggacccgggaaagagactcagcctggctgtcagagcttgcagtgtaaccagtgtgcttattgtaaagaaataggatattggaagaacaaatgcccccagctaaaaggaaaacaaggtgacttggagcaggaggttccagacaaggaggaaggggccctgctcaacctggcagaagagttattggactgagggggaccgggctcaagggcccccaaagagcctatggccaggatgacagtcgggggtaaagacattgattttcttgtagatactggtgctgaacattcagtagtaaccgccccggtcgcccccttctccaaaaagactattgacataatcagagccatgggaatttcagcaaaacaagctttctgcttgccccggacttgtactgtaggaggacgtaaagtgattcatcagtttttatatacgcctgactgtcccttgcccttgttgggaagggacttgctttgcaagctgagagccactatctcttttacagagcatggctctttgctgctaaagttacctggaacgggagtcattatgacccttacggtcccctgagaggaggaatggagacttttcttaactgagtcaggccaagagataagaccagctctggctaagcggtggccaagagtgtgggcggaagacaaccctccagggttggcagtcaaccaagcccccatacttatagaagttaagcctggggcccagccagttaggcaaaaacagtacccggtccccagagaagctcttgaaggtattcaggtccctctcaagtgcctaagaacctttggaatgatagttccttgtcagtctccatggaacactcccctcctgcctgttcccgagcctaagaccaaggactactggccgggacaggatttgcgcttggttaagcaggctacagtgactttacatccagcagtacctaacccgtacacattgctggggttgctgccagctgaggacagctgcttcacctgcttggacctgcaagatgctttctttagcatcagattcgcccctgagagccagaagctgtttgcctttcagtgggaagatccggagtcaggtgtcactactcagtacacttggacctggcttcctcaagggttcaagaactcccccaccatcttcggggaggagttggctcgagacctccagaagtgtcccaccagaaacctaggctgcgtgttgctccagtacgttgatgaccttttgctgggacaccccacggcagtcgggtgcgccaagggaacggatgctctactccggcatctggaggactgtgggtataaggtgtccaagaaaaaagctcagatctgccgaccgcaggtacgttacttgggatttactatccgacagggggagcgcagcctgggatcagaaagaaagcaggtcatttgcactctaccggagcctaagagcagaaagcaggtgagaaaattcttaggagctgcggggttttgcagactgtggatcccaaactttgcagtattagccaagcctttgtatgaggtcacaaagtagggggaccgggaacctttcgaatggggatcccaacaacagcaagcctttcgtgagttaaaggaaaaacttatgtcagccccagccctggggctacccaatctgacaaagccttttacattgtatgtgtcagagagagaaaagatggcagttagagttttaacccaaactgtggggccctggccgaggccagtggcctacctctctaaacaactagatggggtttctaaaggatggcccccgtgtttgagggccttggcagcaactgccctgctagtacaagaagcagttaagctgactcttgggcaaaacctgaacataaaggccccccatgctatggtgactttaataaatactaaaggacatcattggctaacaaatgctagactcaccaagtaccaaagtttgctctgtgaaaatccccgtataaccattgaaatttgtaacaccctgaaccccactaccttgcttctggtatcagagggccctgtcgagcatgactgtgtagaagtgttggactcagtctactctagcagacctgacctccaggaccagccttgggcaccagtagactgggaactatacatggatgggggcagcttcatcaacccacaaggagagagaggtgcagggtatgcagtggtaaccctggacactgttgttgaagccaggtcgttgccccaggccacttcacccagaaagctgaactcattgctttcattcgggccttagaactcagtgaaggtgagactgtaaacatttacactgactctcggtatccctttttaacccttcaagtgcatgaagcatcatataaagaaaagggcctattgaactctgggggaaaggacataaaatatcaacaagaaatcttgcaattattagaagccgtatggaaaccccacaaggtggcagttatgcattgcagaggacaccagcgagcttccaccttggtgggcttggggaattcccgtgctgactcagagttccggaaaggtagagcagatgaattggactatcaaaaatagttaagggaaagtatgtcaggaaacaggattaaaatggatacaggctctccctatggtattatttaaaattagatgtaccccttctaaaagaacaggatattccccttatgaaatattataggccccctcccatattgcggggacttccaggcactccccgagagttaggtgaaattgagttacagcgacagctacaggctttaggaaaaattacacaaacaatctcagcctgggtaaatgagagatgccctgttagcttattctccccagttcaccctttctccccaaggactggaacgtagcctctttgtgcccacggtggaaaggaccccagactgtcatcctgaccactcccaccgctgtgaaggtagaaggagtcccagcctggatccaccacagccgtgtaaaacctgcagtgcctgaaacctcagaggtaagaccaagcccagaggacccttgcagagtgaccctgaagaaaacgacaagccctgctccagtcacgcccggaagctgactggtccacgcacggccaaagcatgaggaagctcatcgtgggattcatttttcttacattttggacttacacagtaagggcttcaactgaccttactcaaagtggggactgttcccagtgtattcaccaggtcactgacgtaggacagcaaattaaaacaatctttctgttctatagttattatgaatgtatgggcacgttaaaagaaacttgattgtataatgcaactcagtacaaggtatgtagcccgggaaatgaccaacctgatgtgtgttataacccatctgagccccctgtaaccactgtttttgacagaagattaagcactggccttttcccaggtgatacaagtaaaataataactagaacagaagaaaaaggaatccccaaacaagtaactttaagatttgatgcttatgcagccattaatagtaacaagctaggaacaggatgtggttctcttaactgggaaaggagctacagagtagaaaataaatatgtttgtcatgagtcaggggtttgtgaaaattgtgccttttggccatgtgttatttgggctacttggaaaaagaacaaaaaggacctggttcatcttcagaagggggacgccaacccctcctgtgctgccggtcactgtaacccactagaactaataattaccaatcccctagatccccgttggaaaaagggagaacgtgtaaccctggggatcgatgggacagggataaacccccaagttgccattttagttagaggggaggtccacaagcactctcccaaaccagtgtttcaaaccttttatgaggagctgaatctgccagcaccagaacttccgaaaaagacaaaaaatttgtttctccaattagcagaaaatgtagctctttcccttaatgttacttcctgttatgtatgcag

SEQ ID NO: 94802 - DNA, 54168 bp, Homo sapiens
  misc_feature (1)...(54168): n = A,T,C or G
ggaattggcttgccaatcattaacataatgagccatttgaacagattgatgtaatgccattccagcagtggtggccagtgcagtgactgtaaataggcccatgatcacagcaattaaagtgaaaacaaatctcttggatctttttagaattagctgtaacacttcattaattaaatgtactgagggggaggattcctaaggtctggacaaagttaccagaatccagatttcttcttgagcttaaaccaacattacacttttcctggagtcaaaacaggagttaacacaagtgtataaatgacaattggtgcattggacagtttgattgttcatccaaaatttgatatttcccactaacagcatgtaaggaggcttaacacaactctgtatgggaataatcaggttggaggtaagcaaagcagaatgtctgaatttatgttgatactgagggaaagggacagtagcagggacaacagacagaaaagtttccccttcccatactcacagtctggacatggcaatagccaatttccaaagttctgggtgttctgggctcagaatggggaatatcatatgaggcctcgggcggcggggagggtaatccctttatcttcccattttaagggaaagaatgagctgaacctcctatgcaaagtagaatgttgattctcattctcccaataagaaataaagtaactagcctccagtcattcccttccaccacaggagcaattgttttgtaaatagccctttggtgcccagtctattattaaaccatatgagtcattttttaatattactgcattgtgagttaacacaatcatcccaaattaaagttttagatgggccctcaaaatttttagggcatggttttaatgcaggtttatattgaaagtatggggtatctcccattactcctccccctttcatttgtcttaaaggagaaagggagaggctggagaccaaatgtcccagttcctctgtacctgatctctccagaagataagcagcccagacttgagtttctagatggatacaaccaggtgcatgtctgaagcacagaagggggtatttataacccatagtaacattaaaggcagtgccttcttctcctggttgagcggggcagtggtcatctgtagctccaggcatccacacactatcgttagtatagatttccacaggagcatccatccaggtgagaggtcgaataagtggaggagaaggcacataagcccaataagaataattttgtgtagcaggtaaatcagcgtgaggggaaactggtgagacagaacatataaggaggagaattattaaataaaacctattgtaagcaagatgcagtgctgaaggaggaagagaagaacagagggatgttattttcaggctaatagaaatggtgagatttttaggtttgtgaggagaaaaagaaaggtaattaggagaagtgggattagttagaggggtctctgttgccatcagggaggattgaaccagacccattatgatttggtgtatcagcttctgaggagttggcacagatctcaccacgtctgagggcggtctctgttgtggatgtcttttccctgtgattttcgttgtcagtattcacacgaagtttaagtttcctagtgggcacccagacaagggattgatatctcctggtgaaacacaagcatatcctcttctccacgttatgaatgtttcaagttcccaggtattgatttgggagtttaaggcaaagaattaggtagaatatgttgacttggagcactctaagagttatgtggagtattaatttcagccccccattgtgccagcaaatctctaccccaaagattaatggggattggcatgatatgagactgaattttacccttctgaccatcagggccagtgcaaggcaagataaatgtgctctggtaaacttcatcagcttttccaacacctactagtctatgttagtgggatgtttaagccaggaggaaggccataaattagaggaaataatagaaacatcagccccagtatctacgaggccctcaaacttttttccttgaatgtgtatggtgcaggtgggccattgtttagaaattacattaatccaataagcggctttttcaccaccagagcccatcccagggccatgtgtcttatctcctttgtttaaaaatatattaagtagtaaaaggaattgagcaattgactcaccagccagaatggaaacaggaactttggtggacatgatgagtttaatctcatcaagggaatcagaattaatgagaccagtatgaatgatgattcctttagcagaggtggatgccctacctaacaccaagcccactgaaccttgaggtaaagggccagtgatcccccatggggacaattaaaggcaaagaattcagtagtaaatttagaggaatggtactacagagatcaaccaccctgccccctattgtggaggtgggcaaacattgtactgagacagaagaagaggctgggacccatttgggttggttgtaggtaaatttgtttgtgctgggggctgcgttaggaccacttgaagtggaaactcaatgctggtctgagtctgaggtgtcccatttgatattggggcctgggactggccccacttcccatttccttggttctgtggcacggggtttccatctatatcatacttagagtggcaagtacttgcccaatgtttacctttgtgacaacgtgggcaaacagtagcagcagcatttggccttgtttgttgaactggcttggccacttttaagtttttaacagtgcaattttttcaagtatgaccaagttgactgcaattatagcaggctccaagaaaagaatcagtggagccaatttgattgctgtccttcacggcccgtgcccacagaatagctttgtgggtctctgatccagtgctttcataagctttaatatatgcaggcaacacctcatgatcaggtaaattttgtcattggatggaacacatggccattttacactcatgatttatattctcaaaagctaacataggaaggagaataccttgagcatactcatcagagacagatttttcaacagcatcttgtaatttagctaaaaaatcagggtataattcactgtgatcttgtttaacagtagtaaaagaaacaggaacttggcctggggagtgtaatttatcccaagcgctcatatacacctttgttatttgttccatggtaagagaatcaaagcctaattgggcataagtatcagagaaattatgggagcctgtgagctgagcctgagtaattagaatgacatcagcctgatttagctgagcctccagacaggcctcctctgaccaccaggtatggaattgtaaatgctgagatggggttagaatggcttttgccaaaaggtaccagtctaaaggaagcaaaacgacctcagtacaaaataccaatttaacatatggagaagtaggaccatactgagtacaagcatccttgaattcttttaaaaaggtaagattgagcagtgcatgatgcatttggatgccttgagcattaggaggatctagcgtgactggataagcccacacatctaatccacttgtttctttgttttggcataataagcattgcatggaagtttcaagagtaggcacctgagatggggttggcatagaagtgacaggaaaagcatgtgtagataagggaaactaaggttgaggaggtcgggctggaatgagagcatgagaaaggagcattgggggagcagaagaagcagaagtacactggtgattactggcatccatgtgtgaagaagggtacagagaagtaggctgagtggatggcaaagtgaccagttgagaaaccaaaacaacaggagggtgaggggctgaagcatatgggggagggcctgcagaattataggtaaactttagtttggttccagagccattaggttgctctggagacaaaggctgcaaagttttgaagagggaagaattagcatatatatggtcccaggctgtctgagttggggccacgggagctacaagtaccagctcttcatgaaaaaaaataagatcatcagggagtgaccttaagccaaagtcactggagttagatattgaattctcaacatcatcaggtggggaaggagtaggcaaagggagaggctgatcagataacgaaggccatgcaggagaggaaggctgaggaacagatagagagtcacaagattcagaaaattgtggtaactgcagggggtaatgggataggtatgtcattaggacagcacatgccaaggcccattcaccccacacagggatgagaacataaccccctgtggggatcagttcctggaatgttgcaccaacatgatcccatagttgtacatctaagattcctttttcaggaaaccaaggacagtgttcttccactgccctgaatggagtgaccatattttccatggacacttgaaccccctcctgttttaacaggagtttaatatagcagagataagcataatgtttagactccgtgtgacccatagttaacccagacaatacacagacagactcaccaatcatcacggagccgaacaagtgtttctgtggactgaaccaacgaacgtttctctgcacctaccaaagggaatcgggttcccacatgcacttaggaaaaagaaaaaccatgttggcacactagatatcaggggaaccagcccccagtatttcaatgtaggttctttctattttccctaagtgttggccagtctgagaaataaagagaaagagtacaaagagagaaattttacagctgggcctccggcagcgtcatcacatattggtaggaccatgatggtgaccccaagccacaaaaccagcaagttttcattagggattttaaaaggggagggggtgtacgaacagggagtaagtcacaaagatcacatgcttcaaagggcaataaaggtcacaaggcaaggcaaaattagaattactgatgagggcctatgtcccactgtgcacacattgtcttgataaacatcttaacaagaaacaagattcgagagcagacaaccagtctgactagaatttaccaggctggaattccccaatcctataagcctgagggtactgcaggagaccagggcatatttcagtccttatctcaactgcataaggcagaccctcccagagtggtcgtttatagacctacccccaggaatgcattccttccccagggttatcaattattaatattccttgctgggaaaagaattcagtgatatttctcctactcacatgtccatctataggctctctgcaagaagaaaaatatggctctattctgcccaaccccacaggcagtcagaccttagggctatcttcccttgttccctgaaaatcgccattattctgttctttttcaggatgcactgatttcatattgttcaaacacacatgttgtacaatttgtacagttaacacaatcatcagagggtcctgaggtgatgtacattctcagcttatgaagataacaggattaagaggttaaagacaagcataagaaattataagagtattaattggggaagtgataaatgtccatgaaatcttcacaatttatgttcagagactgcagtaaagacaggcataagaaattataaaagtattaattttgggaactgataaatatccatgaaatctccacaatttatgttcttctgcctcagctccagccagtccctctgttcagggtccctgacttcccgcaacaggtatgagctgtcatgcacatggctcctatctgaaaatctagttcttctggaatctggaactgctgggcaacatctcagcagttttcaccctgcagacttaattagcttcctcttccttatgtaccctctcttaatatggtattttgaaagcccagtgttgcccagggggcatctcctttgggtttatgagagacctgcattctccctggcccagttctctcaggctttccagagctcaggacctctgagaagaatggagccctcctggcttcaggaactcatggctcaccccttcttgctgctgatcctmctctgcatgtctctgctgctgtttcaggtaatcaggttgtaccagaggaggagatggacgatcagagccatgcacctgtttcctgcaccccctgcgcactggttctatggccacaaggaggtaagaggggaaaattagttggggaggttaaggaacagaaagatgaggtattaaaaaaaacagcacatattggtggggcattatgtaatatgcaaaatgctttcacaccaatctcatttgatatttacaaaaattctatgataggggaggaaacatattgttattcctattttacaggtaagaaaactgaagcctaaaatagagatgcaactttcctgtgctacccatctcataaatgacagaaatgaaacttgaaccctggtctcctgcttcaaggccaaggtctttactactttcaggactctgggtgttctacagagaaatagaccaagccaattgttaacaggaaatatgcaaagatgctacagcttctaatgaagctggaaataggaaaacatttgacaaattagaaaggaaagttgaaagatgagcagcaaccacaaaggagtaaaaggcatgtgagaggccaggcatggtggctcacgcctgtaatcccagcactttgggaggctgaaacaggcagatcatgaggtcaggagatcaacaccatcctggctaacatggtgaaaccccgtctctactaaaaatacaaaaaattagtcgggtgtggtggcgggcacctgtagtcccagctactygggaggctgagacaggagaatggtgtgaacccaggaggtggagcttgcagtgagccaagatagcascactgcactccagcctgggagacagagcaagactccacctcaaaaaaaaaaaaaaaaaaaaaaaaaaaggcatgtgagacttcgctgctttggagacagataaagcatgagcgggtatatccagagcaaagatgaggtagggaatcagtggttactaacggtttaccttgtgccaggaattttatgtttataatctcacttaattttcatggcagctttgtgaaatatatttggttttcctaatatatatttctgtgaggaaatcatggccctaatgacgtagataatttaaaagtgtcagaactgggatttgaacttaaatgtccaaagttgacgctggagtgagaagaccaatcgctcagcaacaggtcctgagcacttgccctgggccaggaagattccgtggaggtgccggagtcacatggagaagaaaacttgccgtcagcagatgtgaacctgtctgatggggtggtgtccacagaccctcaatttagcacatggtccatctgagggaaagggatcctcctgggatgacaacctttactaaccagtcatgacttatcttatgacagtcttacccagtaaaagagtttgaggtgtatcctgagctgatggaaaaatacccatgtgccgttcccttgtgggttggaccctttacgatgttcttcaatatccatgacccagactatgtcaagattctcctgaaaagacaaggtaaaaaccaagaggggctcacagtacacagcagcaaaaaagagggtctcagggtgtctgtggcactagggaaggacaggttgaagcatttttaagggaaatccaacatttgataggttgaagggaagattccatgtcctcctcaacatcatagtcaggactctattgagggttgttgtagaggattctctgatccatttccaagcaatcttctctccctacatgacaaattttttctgatgcttccatcacatttacttacctcagacccccaggactaccacttaccaccactgtgaacatacagtgggttgggcatgcagtggtggtttgcttacaattggcttaacgccagtgctgcacagagatgagtgttccccatagatgctttgcctactaatcatgcctgtcctctgggaatggccagtgccaggtggaggctctggcaagtggacaccagttctccatctggtccctagtgtcggaattccgtggaattgcagagctgcttcttggctgtggcaagatgtgtgtaggattcccccactgggctttcctcaactgcctgttggcatataaggctggccttcgcctcactctcccagctacctacatgagttactcagttataaaatgcctccataccactcttggtgcttctgcaaaatttcaagcagcctgtggctctctcatttcacagggcactctgccagaatcaccatctcagctttcttcctggtaacggtgcaagaaatgtctggctatccagtttcaaactttactctgctcccctttatgctctgctctcacctttggacctttgcccaaaagggatgaaagaggaaagtgattgtttctcctttggagttattttctcttctttatctacaaattctctcttcagtgtgttcactcccttgagaagggaggcttagtttctggctgtttttctttttttgtggttggttgtaagggcatctgggcaggccatacagggaaagccatccttcctgttcatattttcttcagtccccattgtcttcaactcacaaccttagctccttcccagagaagccaagaatttctctccctctcttgctttttttctcttactgttttgttttcttttcctttggtttgtattccctgctggtgcctaaaattgtctcctcctcagagaaaaggataattttatgccttgaagtgtgataactgtacagttacatgagaaaagagcagaataatatacagagtatgggatgttaagttatttatctgccacacattagtacttctttttgagtcccactgcagaagcacagtggccaaaaaaggagagctgagaatcctgctcttattatttctggccagacccacccaaatcatcttatccccagctttttattttgaaaattttcaaccctacaagagaaattttgaacacccattgtacccttctctagtgtcattaattgatatcatattcccatatgtgcttttcttttaattacattcattttattgtggtaaaatatacataacctaaaaatttaccattttaaatcacttttaagtatacagtttaatggcattaaatacatttacattgttgtgcaactatcaccgccatccatcttcagaactttttcatcttcccaaactggaactctgtacacattaaactctaactccccattttcccctccccccagcctcaggcaacaaccattctactttctgtctttttaaatttccctattctaggtacctccataagtagaaccatacaatattgtccttttgtaactggcttatttcatgtagcataatgtcctcaaggttcatccatgttgtagtatatatcaaaacgtcctttctttttaaggctgaatttccattgtatgtatgtaccacattttgtttatccattcctctgacaatggacacttggataacttctatcagttggcttttgtgaataatgctgtcatgaacatgcatgtacaaatatctgtttgggtcctttcaattatttcaagttgataccaaaaagtggaattactgagtcacatgataattctatatataattttttgaagaactgtgatagcattttccacagtggctgcaccatttcacatacccaccagcaatgcacaagggttccaatttcttcacgttctcaccaacatttgttattttctggggatttaaaaaataataataatagctacaatggctcacacctgtaatcccagcactttgggaggccaaggcaggcagatcacttgagccctggagtttaagacctgagcaacatgaaaaaatcccatctctatttaaaaaaaaatagaccagatgcagtggctcaagcctataatcctagtactttgggaggccaagtcaggcagattacttgaggtcaggaattcaagaccagcctggccaacatggtgaaaccccgtctctactaaaaaaaatacaaaaattagccaggcgtggtgacacatgcctgtagtcccaactacttgggaggctgagggaggagaattgcttgaacctgagaggcagaggttgcaatgagctgagatagtaccactgcactccagcctgggtgacagagcaagacttcgtctcaagaaaaaaaaataataaaaaatatgttgtattatttaaactaatactaataatagctatcctaatggatgtgaaatggtatcttatggtggtttttatttgcatttctctaatgattaattatgttgaacatcttttcatatgcttactggccacttatatatcaacttcggggaaatgtctattcaagtttgctgcacctttttcaattggttctttggtttcttttgttgttgagttgcagtagttctttatatcttctggatattaatccttatcagatatatgatttgtaaatatcttctcccattctgttggtgtcttttttactctgttgatagtgttctttggtgagcaaaagttttttattttatcaagtccagtttatctattttttctttcactgcctgtgcttttggcatcatatccaaaaaattattgccaactcctatgtcatgaagttttccttatgttttcttctaagagttttaagttgtagctctcacattcagttctttgattcatttagtgttaattttttatatggtataaagtctgcatttgctcatagatggatggatgatagatagatagatagatagccagagccaaacaactttttatgcataagttttatctgagttaatagaggttaaaaaaatagggattttctatttcttctccatttttcagctttccctatctataatgaggaactttcctcctctccccacctccatctgcctttctctcactgtctcactttctgtccctctgtttctctttctgcataccagtaaggattcatggattgttaagaaatcagtgtattgaatttcattatcatcatcttttttgatggccaaattgtcccagatatggagaaggagacaaagcaagagaagaggctggtagacatgggcccagtcattcagaactttgtaggctgagtaatggtgagcatcaaaggagagaagtactgtgaatatctgtgtgttttgaaacatcactcagacagctgtatgatgaatggctggagggaatcaaggctggagaccaggaatccaccttatcctgctgcactgtccaaaggacagatgatggaggcctggacaaaggtagaggggtggaggtggaaataattgtatgaattcaagagatactaatgaatgtaccaatatttttgacatgggggtatcaagctgtcaagcagtccctaagctacttagctggttcactgcacattcataaattcagtcagcaaaaagccagcgggcctgaatggatttagactgtttattactcatggcataataggtatcatgagcttcacattaacatcggccccactatctccctaagtcctataggggcaatgcagaggaactcaggttagtactgtgcacaccagggtctgtgttacatttaaggaattcagacacgacaagatcctgaccatatataggggctattgccaaaaatgctcttcctcacccctagaaataggcattgtcttttatgtgtgtgtggcaaaatacacataaggtttgccatttaaccgttttaaagatccaattcagggacactaagtatattcacagtgctatccacctatcatctctgtctagttccagaatttttcatcagtccagacagaaacctcatacccattttaagcagttattccccattcctcccttgccccagtcactggcaactactaatctgcatttttgtctctatgaatttacttattctggatttttcatataaatggaatcacacaatatgtgaccctttgcattttgcttttttcacttagcataatgttttcaagattcatacattttgtagcattgtttcttttcatgaattatattctactgtatgaatataccacattttgtttatccattcatctgttaatagacctttgaattgtttcaacttttggccattatgcataatgctgatttcataaaaatgaaaagcttttgtgtgtcaagggccactaaaagcaacctgtgcctcctgggttcaagtgattctcctgcctcagtctcccaggtagctgggactacaggcgtgcactaccaaacctgactaattttgtatttttagtagagatggggtttcaccatgttggccaggctggtctcaaactactgacaagtaatccacccgcctcagcctcccaaagtgctgagattacaggcatgagccaacgcaccaggccaagaccaattttattttaatttgcatttccctaatgactgaatatcatcttattgtttgcccattgatgctgaatatcatcttatttgtttgctggcccattgtttatctttggagatgtctattcaagtcctttgcccgtgattaattgggctgtctttttattgttcagttgtaatagtttttaaatatatatagtacacaagtttttttatcagatatatgatttgcaaacattttctattattttgtggtttgtcttttaacccttttagtggcccttgatacacaaaagcttttcatttttatgaaatctaacttatttatttttccttttgtggcctgtgcttttactatcatttttaagaaaccattgcccagtccaaattcatgaagaccctcccctattttttcttctaagagttttatagttttgactcttatacataggtctttagtcctttttttgggtgaaagaagcctaaagtaggggcatttgtttatttatttatttatcttttattttagattaagaggtacatgtgcaggcttcttacctgggtatactgcatgatactgtgaagtttggggtataaatgatgccatcacccaggtgctgagcacagtacccaacaattagtttttcaatccttgccccctttccttcctcccccaccccagtagtccagagtgtctattgttgccatctttatgtccatgagtactgaatgtttaactcctacttaaaagtgagatcatgaagtatctggttttctgttcctacattaattcacttaggataatgtcctgcacctgcatccatgttgctgcaatgatgtgatttcattgtttttttccccctttggtacatttttagttaatttttgtatatagagtgagataaaggtacacttaattattgtgcccacaggtatttagttttcccagcaccatttcttgaagagaccattctccccattgaatggtatttgcatccttgttgaaaatgaattgacaacagatgtatgggtttatttttggactctgatatctacacttaatggcagtaccacattgttttggtgactatagctttgcagtaagtttgaaatcaaggtgtatgagttctccagctttggcaggcttatcatacatcaggtcaaacttgtggtccaggcaagcccaggcctcagcaactgctgtggtgttgctcagcatgcacacaggtctctataccttgaccaggtctccaccaggtacctcactggggggctggtaattaataccaaccttaaagccaatgggatgccaatccacaaactggatggtaggcttggtcttgatggtggtgatggcagcattgacatctttggggaccatgtccccatggtacaacaggcagcaagccatgtatttaccatggcaagagtcacatttcactatctggttggctggctaaaagcaagcactggtgatctctgctacaacaagctgttcgtgataggctttctcagcagagatggtgggggaatatgtggccagagggaagtggatgcagagacagggcaccattttggtctagacttctgtcagattaactttcagggctccatcaaatctgagggaagcaatgatggaggacacaatctggctaataaggcagttaaggctagtataggttgggcattcaatattgaggtttctccacagatgtcatagatggcctcattgtctaccatgaaggcacaatcagagtgctacagggtggtatgggagatgaagatagagctatacaactatagctgtggaaatatggggggttgggtatgcggagaactccaacttggacttcttgccataatcaacagaaagaacattccaccagcagagaagtgaacccagaacaagtcccctcaccaaagcagtaaaaaaccaagaagttctgaagacctgtgcactagtcaaccagcttgcaaattcagtccaagatgaggtcaatataatcccctttcctatgcaaaagtgccctcaagtatagttataggcagcatcttccttgcttgtgatgagctgcccagggtggaagagctggaagtaggtgccagtgtgaactttgtcaatgaccctgggttcaacatctacaaacactgacctagtcacatggttggcagcacctgtctcactgaagaaggtattgaaggagttatttcctcccacactagtcttgtctcttggccttgccatcaggctagaggccatgttccaggcagtagagatcctagcaggaactgccaatctggacatcagcctagccaacatggagatgcactcacctatgacagggacctgtaaggttctgcaaggctgaaggaggtgaagggacagcaacaaggatctcccactaacagaccaccacggagtccaagggagtagtccatagtgtcctcttataatccttttattatctgtaataataagttgatagtaacgttcccactttcacttctgattgtagtaacttgattcttctcacttttcttcatagttcatctaattaaagttttgtcaattttgttaatcttctcaaagaaataactttttgtttgttaatttttttctattgtttttcctgtttttattttatttacctcagctctaatctttatcatttccttccttcagtagctttgggtttcatttgcccttctttttccagttcattaaagtgtacagttaggttattgatttaaggaatttattttttaatgaagacatttaagctataaaaatctcattaagcactgcttttgctgaatcccataacattgggtaagttgttttcattttcatttgcctcaaaatattttctaatgtcttttatgatttattccttgtccctttggttgtttaagaatgtcttgtttaatattcatgttttgtgaattttcccgttttacttctgatattgatttctagttttattctatggagaggtatttttgtatgatttcaatctttttaaatttattgagactctttttgtgacttaccatatgatctatgctaaagaatgacccatgtgtacttgagaagaacatgtaatctgctgttgttaggtggagcttttagaacatgtctgtttggcataattatagtgttgttcaagttctctatttccttattaattttttgtatcattgttctgtccattattgaaagggatgtagtgaattctccaattataattttagaactgtctatttctcccttcaaagctgtcagcttttgcctcatatactgtggggttctattgttaggtatatatttatatattataactgttatatcttcttgatggattgaccccttaacaatatataatgttctttctttgtgtcacaatattttaaagtatagttaactgataatcacccagctctcttttccttactgtttgcatagaataccttttctacccttttacttttaacctctttgtttcttcagatctaaagtgagtctcttgtaagcagcatattaatggatcccatttttttagtccattctgccagtctctgccttttaattgaagtttaatccatttacatttaaaataattactgataaggaaggacttatttctaacatttcactgtttgttttttatatgtctttttttttttttttttttagagacagggtcttgctctgtcacctagggtagggtccagtggtgtcatcatagctcactgcatcctctagctyctgggcccaagtaatcctcccacttcagcctcctgagcagttgtaactataggcctgcaccactatgcctggctaattttttcttttgtatagacaagggtctcactatgttgtccaggctggtctcaaactcctggcttcgaacaatgcttccccctcagtctcccaaagtgctgagactacaggtgtgacccactgtgctcagcctgtcatatatattttatgttcctcacttcctccattactgcctactttggtgtttaattgatttttggtttttggtatggtaacatttttatgttactcttctcatttccttttctgtatattttcagttattttcatagtgattaacatgggattaaaattaataccttaaacctatgggaaatttttaaccattatttcttcaacttagttttctctctttgctcttctgggactccaattatgcatatgttagtatgcttgatggtgtctcacaggtctcttaggaccattcattttttcattctgtttcctatttctgctcctcagattcaagaatctcaattgacctaactccaactttgataattttttctctgcctgctcaaatcaactgttgaaaccttaggaactttttatttcagttactgtatactccagttctagaactttatttgtttctgtttacaacttatatgtctttgttaatattctctatttgttcatacatgagtattttggttttgtttcatctttggccatggtttattgtaggtctttgagcatattgaagacagttgatttaaagttgtctagtaagtccaacgtctatgcttcctcaataacattttcttttcatttctttttcctgtgcataggccatannnnnnnnnnnnnnnnnnnnnnnnnnnnnnnnnnnnnnnnnnnnnnnnnnnnnnnnnnnnnnnnnnnnnnnnnnnnnnnnnnnnnnnnnnnnnnnnnnnnnnnnnnnnnnnnnnnnnnnnnnnnnnnnnnnnnnnnnnnnnnnnnnnnnnnnnnnnnnnnnnnnnnnnnnnnnnnnnnnnnnnnnnnnnnnnnnnnnnnnnnnnnnnnnnnnnnnnnnnnnnnnnnnnnnnnnnnnnnnnnnnnnnnnnnnnnnnnnnnnnnnnnnnnnnnnnnnnnnnnnnnnnnnnnnnnnnnnnnnnnnnnnnnnnnnnnnnnnnnnnnnnnnnnnnnnnnnnnnnnnnnnnnnnnnnnnnnnnnnnnnnnnnnnnnnnnnnnnnnnnnnnnnnnnnnnnnnnnnnnnnnnnnnnnnnnnnnnnnnnnnnnnnnnnnnnnnnnnnnnnnnnnnnnnnnnnnnnnnnnnnnnnnnnnnnnnnnnnnnnnnnnnnnnnnnnnnnnnnnnnnnnnnnnnnnnnnnnnnnnnnnnnnnnnnnnnnnnnnnnnnnnnnnnnnnnnnnnnnnnnnnnnnnnnnnnnnnnnnnnnnnnnnnnnnnnnnnnnnnnnnnnnnnnnnnnnnnnnnnnnnnnnnnnnnnnnnnnnnnnnnnnnnnnnnnnnnnnnnnnnnnnnnnnnnnnnnnnnnnnnnnnnnnnnnnnnnnnnnnnnnnnnnnnnnnnnnnnnnnnnnnnnnnnnnnnnnnnnnnnnnnnnnnnnnnnnnnnnnnnnnnnnnnnnnnnnnnnnnnnnnnnnnnnnnnnnnnnnnnnnnnnnnnnnnnnnnnnnnnnnnnnnnnnnnnnnnnnnnnnnnnnnnnnnnnnnnnnnnnnnnnnnnnnnnnnnnnnnnnnnnnnnnnnnnnnnnnnnnnnnnnnnnnnnnnnnnnnnnnnnnnnnnnnnnnnnnnnnnnnnnnnnnnnnnnnnnnnnnnnnnnnnnnnnnnnnnnnnnnnnnnnnnnnnnnnnnnnnnnnnnnnnnnnnnnnnnnnnnnnnnnnnnnnnnnnnnnnnnnnnnnnnnnnnnnnnnnnnnnnnnnnnnnnnnnnnnnnnnnnnnnnnnnnnnnnnnnnnnnnnnnnnnnnnnnnnnnnnnnnnnnnnnnnnnnnnnnnnnnnnnnnnnnnnnnnnnnnnnnnnnnnnnnnnnnnnnnnnnnnnnnnnnnnnnnnnnnnnnnnnnnnnnnnnnnnnnnnnnnnnnnnnnnnnnnnnnnnnnnnnnnnnnnnnnnnnnnnnnnnnnnnnnnnnnnnnnnnnnnnnnnnnnnnnnnnnnnnnnnnnnnnnnnnnnnnnnnnnnnnnnnnnnnnnnnnnnnnnnnnnnnnnnnnnnnnnnnnnnnnnnnnnnnnnnnnnnnnnnnnnnnnnnnnnnnnnnnnnnnnnnnnnnnnnnnnnnnnnnnnnnnnnnnnnnnnnnnnnnnnnnnnnnnnnnnnnnnnnnnnnnnnnnnnnnnnnnnnnnnnnnnnnnnnnnnnnnnnnnnnnnnnnnnnnnnnnnnnnnnnnnnnnnnnnnnnnnnnnnnnnnnnnnnnnnnnnnnnnnnnnnnnnnnnnnnnnnnnnnnnnnnnnnnnnnnnnnnnnnnnnnnnnnnnnnnnnnnnnnnnnnnnnnnnnnnnnnnnnnnnnnnnnnnnnnnnnnnnnnnnnnnnnnnnnnnnnnnnnnnnnnnnnnnnnnnnnnnnnnnnnnnnnnnnnnnnnnnnnnnnnnnnnnnnnnnnnnnnnnnnnnnnnnnnnnnnnnnnnnnnnnnnnnnnnnnnnnnnnnnnnnnnnnnnnnnnnnnnnnnnnnnnnnnnnnnnnnnnnnnnnnnnnnnnnnnnnnnnnnnnnnnnnnnnnnnnnnnnnnnnnnnnnnnnnnnnnnnnnnnnnnnnnnnnnnnnnnnnnnnnnnnnnnnnnnnnnnnnnnnnnnnnnnnnnnnnnnnnnnnnnnnnnnnnnnnnnnnnnnnnnnnnnnnnnnnnnnnnnnnnnnnnnnnnnnnnnnnnnnnnnnnnnnnnnnnnnnnnnnnnnnnnnnnnnnnnnnnnnnnnnnnnnnnnnnnnnnnnnnnnnnnnnnnnnnnnnnnnnnnnnnnnnnnnnnnnnnnnnnnnnnnnnnnnnnnnnnnnnnnnnnnnnnnnnnnnnnnnnnnnnnnnnnnnnnnnnnnnnnnnnnnnnnnnnnnnnnnnnnnnnnnnnnnnnnnnnnnnnnnnnnnnnnnnnnnnnnnnnnnnnnnnnnnnnnnnnnnnnnnnnnnnnnnnnnnnnnnnnnnnnnnnnnnnnnnnnnnnnnnnnnnnnnnnnnnnnnnnnnnnnnnnnnnnnnnnnnnnnnnnnnnnnnnnnnnnnnnnnnnnnnnnnnnnnnnnnnnnnnnnnnnnnnnnnnnnnnnnnnnnnnnnnnnnnnnnnnnnnnnnnnnnnnnnnnnnnnnnnnnnnnnnnnnnnnnnnnnnnnnnnnnnnnnnnnnnnnnnnnnnnnnnnnnnnnnnnnnnnnnnnnnnnnnnnnnnnnnnnnnnnnnnnnnnnnnnnnnnnnnnnnnnnnnnnnnnnnnnnnnnnnnnnnnnnnnnnnnnnnnnnnnnnnnnnnnnnnnnnnnnnnnnnnnnnnnnnnnnnnnnnnnnnnnnnnnnnnnnnnnnnnnnnnnnnnnnnnnnnnnnnnnnnnnnnnnnnnnnnnnnnnnnnnnnnnnnnnnnnnnnnnnnnnnnnnnnnnnnnnnnnnnnnnnnnnnnnnnnnnnnnnnnnnnnnnnnnnnnnnnnnnnnnnnnnnnnnnnnnnnnnnnnnnnnnnnnnnnnnnnnnnnnnnnnnnnnnnnnnnnnnnnnnnnnnnnnnnnnnnnnnnnnnnnnnnnnnnnnnnnnnnnnnnnnnnnnnnnnnnnnnnnnnnnnnnnnnnnnnnnnnnnnnnnnnnnnnnnnnnnnnnnnnnnnnnnnnnnnnnnnnnnnnnnnnnnnnnnnnnnnnnnnnnnnnnnnnnnnnnnnnnnnnnnnnnnnnnnnnnnnnnnnnnnnnnnnnnnnnnnnnnnnnnnnnnnnnnnnnnnnnnnnnnnnnnnnnnnnnnnnnnnnnnnnnnnnnnnnnnnnnnnnnnnnnnnnnnnnnnnnnnnnnnnnnnnnnnnnnnnnnnnnnnnnnnnnnnnnnnnnnnnnnnnnnnnnnnnnnnnnnnnnnnnnnnnnnnnnnnnnnnnnnnnnnnnnnnnnnnnnnnnnnnnnnnnnnnnnnnnnnnnnnnnnnnnnnnnnnnnnnnnnnnnnnnnnnnnnnnnnnnnnnnnnnnnnnnnnnnnnnnnnnnnnnnnnnnnnnnnnnnnnnnnnnnnnnnnnnnnnnnnnnnnnnnnnnnnnnnnnnnnnnnnnnnnnnnnnnnnnnnnnnnnnnnnnnnnnnnnnnnnnnnnnnnnnnnnnnnnnnnnnnnnnnnnnnnnnnnnnnnnnnnnnnnnnnnnnnnnnnnnnnnnnnnnnnnnnnnnnnnnnnnnnnnnnnnnnnnnnnnnnnnnnnnnnnnnnnnnnnnnnnnnnnnnnnnnnnnnnnnnnnnnnnnnnnnnnnnnnnnnnnnnnnnnnnnnnnnnnnnnnnnnnnnnnnnnnnnnnnnnnnnnnnnnnnnnnnnnnnnnnnnnnnnnnnnnnnnnnnnnnnnnnnnnnnnnnnnnnnnnnnnnnnnnnnnnnnnnnnnnnnnnnnnnnnnnnnnnnnnnnnnnnnnnnnnnnnnnnnnnnnnnnnnnnnnnnnnnnnnnnnnnnnnnnnnnnnnnnnnnnnnnnnnnnnnnnnnnnnnnnnnnnnnnnnnnnnnnnnnnnnnnnnnnnnnnnnnnnnnnnnnnnnnnnnnnnnnnnnnnnnnnnnnnnnnnnnnnnnnnnnnnnnnnnnnnnnnnnnnnnnnnnnnnnnnnnnnnnnnnnnnnnnnnnnnnnnnnnnnnnnnnnnnnnnnnnnnnnnnnnnnnnnnnnnnnnnnnnnnnnnnnnnnnnnnnnnnnnnnnnnnnnnnnnnnnnnnnnnnnnnnnnnnnnnnnnnnnnnnnnnnnnnnnnnnnnnnnnnnnnnnnnnnnnnnnnnnnnnnnnnnnnnnnnnnnnnnnnnnnnnnnnnnnnnnnnnnnnnnnnnnnnnnnnnnnnnnnnnnnnnnnnnnnnnnnnnnnnnnnnnnnnnnnnnnnnnnnnnnnnnnnnnnnnnnnnnnnnnnnnnnnnnnnnnnnnnnnnnnnnnnnnnnnnnnnnnnnnnnnnnnnnnnnnnnnnnnnnnnnnnnnnnnnnnnnnnnnnnnnnnnnnnnnnnnnnnnnnnnnnnnnnnnnnnnnnnnnnnnnnnnnnnnnnnnnnnnnnnnnnnnnnnnnnnnnnnnnnnnnnnnnnnnnnnnnnnnnnnnnnnnnnnnnnnnnnnnnnnnnnnnnnnnnnnnnnnnnnnnnnnnnnnnnnnnnnnnnnnnnnnnnnnnnnnnnnnnnnnnnnnnnnnnnnnnnnnnnnnnnnnnnnnnnnnnnnnnnnnnnnnnnnnnnnnnnnnnnnnnnnnnnnnnnnnnnnnnnnnnnnnnnnnnnnnnnnnnnnnnnnnnnnnnnnnnnnnnnnnnnnnnnnnnnnnnnnnnnnnnnnnnnnnnnnnnnnnnnnnnnnnnnnnnnnnnnnnnnnnnnnnnnnnnnnnnnnnnnnnnnnnnnnnnnnnnnnnnnnnnnnnnnnnnnnnnnnnnnnnnnnnnnnnnnnnnnnnnnnnnnnnnnnnnnnnnnnnnnnnnnnnnnnnnnnnnnnnnnnnnnnnnnnnnnnnnnnnnnnnnnnnnnnnnnnnnnnnnnnnnnnnnnnnnnnnnnnnnnnnnnnnnnnnnnnnnnnnnnnnnnnnnnnnnnnnnnnnnnnnnnnnnnnnnnnnnnnnnnnnnnnnnnnnnnnnnnnnnnnnnnnnnnnnnnnnnnnnnnnnnnnnnnnnnnnnnnnnnnnnnnnnnnnnnnnnnnnnnnnnnnnnnnnnnnnnnnnnnnnnnnnnnnnnnnnnnnnnnnnnnnnnnnnnnnnnnnnnnnnnnnnnnnnnnnnnnnnnnnnnnnnnnnnnnnnnnnnnnnnnnnnnnnnnnnnnnnnnnnnnnnnnnnnnnnnnnnnnnnnnnnnnnnnnnnnnnnnnnnnnnnnnnnnnnnnnnnnnnnnnnnnnnnnnnnnnnnnnnnnnnnnnnnnnnnnnnnnnnnnnnnnnnnnnnnnnnnnnnnnnnnnnnnnnnnnnnnnnnnnnnnnnnnnnnnnnnnnnnnnnnnnnnnnnnnnnnnnnnnnnnnnnnnnnnnnnnnnnnnnnnnnnnnnnnnnnnnnnnnnnnnnnnnnnnnnnnnnnnnnnnnnnnnnnnnnnnnnnnnnnnnnnnnnnnnnnnnnnnnnnnnnnnnnnnnnnnnnnnnnnnnnnnnnnnnnnnnnnnnnnnnnnnnnnnnnnnnnnnnnnnnnnnnnnnnnnnnnnnnnnnnnnnnnnnnnnnnnnnnnnnnnnnnnnnnnnnnnnnnnnnnnnnnnnnnnnnnnnnnnnnnnnnnnnnnnnnnnnnnnnnnnnnnnnnnnnnnnnnnnnnnnnnnnnnnnnnnnnnnnnnnnnnnnnnnnnnnnnnnnnnnnnnnnnnnnnnnnnnnnnnnnnnnnnnnnnnnnnnnnnnnnnnnnnnnnnnnnnnnnnnnnnnnnnnnnnnnnnnnnnnnnnnnnnnnnnnnnnnnnnnnnnnnnnnnnnnnnnnnnnnnnnnnnnnnnnnnnnnnnnnnnnnnnnnnnnnnnnnnnnnnnnnnnnnnnnnnnnnnnnnnnnnnnnnnnnnnnnnnnnnnnnnnnnnnnnnnnnnnnnnnnnnnnnnnnnnnnnnnnnnnnnnnnnnnnnnnnnnnnnnnnnnnnnnnnnnnnnnnnnnnnnnnnnnnnnnnnnnnnnnnnnnnnnnnnnnnnnnnnnnnnnnnnnnnnnnnnnnnnnnnnnnnnnnnnnnnnnnnnnnnnnnnnnnnnnnnnnnnnnnnnnnnnnnnnnnnnnnnnnnnnnnnnnnnnnnnnnnnnnnnnnnnnnnnnnnnnnnnnnnnnnnnnnnnnnnnnnnnnnnnnnnnnnnnnnnnnnnnnnnnnnnnnnnnnnnnnnnnnnnnnnnnnnnnnnnnnnnnnnnnnnnnnnnnnnnnnnnnnnnnnnnnnnnnnnnnnnnnnnnnnnnnnnnnnnnnnnnnnnnnnnnnnnnnnnnnnnnnnnnnnnnnnnnnnnnnnnnnnnnnnnnnnnnnnnnnnnnnnnnnnnnnnnnnnnnnnnnnnnnnnnnnnnnnnnnnnnnnnnnnnnnnnnnnnnnnnnnnnnnnnnnnnnnnnnnnnnnnnnnnnnnnnnnnnnnnnnnnnnnnnnnnnnnnnnnnnnnnnnnnnnnnnnnnnnnnnnnnnnnnnnnnnnnnnnnnnnnnnnnnnnnnnnnnnnnnnnnnnnnnnnnnnnnnnnnnnnnnnnnnnnnnnnnnnnnnnnnnnnnnnnnnnnnnnnnnnnnnnnnnnnnnnnnnnnnnnnnnnnnnnnnnnnnnnnnnnnnnnnnnnnnnnnnnnnnnnnnnnnnnnnnnnnnnnnnnnnnnnnnnnnnnnnnnnnnnnnnnnnnnnnnnnnnnnnnnnnnnnnnnnnnnnnnnnnnnnnnnnnnnnnnnnnnnnnnnnnnnnnnnnnnnnnnnnnnnnnnnnnnnnnnnnnnnnnnnnnnnnnnnnnnnnnnnnnnnnnnnnnnnnnnnnnnnnnnnnnnnnnnnnnnnnnnnnnnnnnnnnnnnnnnnnnnnnnnnnnnnnnnnnnnnnnnnnnnnnnnnnnnnnnnnnnnnnnnnnnnnnnnnnnnnnnnnnnnnnnnnnnnnnnnnnnnnnnnnnnnnnnnnnnnnnnnnnnnnnnnnnnnnnnnnnnnnnnnnnnnnnnnnnnnnnnnnnnnnnnnnnnnnnnnnnnnnnnnnnnnnnnnnnnnnnnnnnnnnnnnnnnnnnnnnnnnnnnnnnnnnnnnnnnnnnnnnnnnnnnnnnnnnnnnnnnnnnnnnnnnnnnnnnnnnnnnnnnnnnnnnnnnnnnnnnnnnnnnnnnnnnnnnnnnnnnnnnnnnnnnnnnnnnnnnnnnnnnnnnnnnnnnnnnnnnnnnnnnnnnnnnnnnnnnnnnnnnnnnnnnnnnnnnnnnnnnnnnnnnnnnnnnnnnnnnnnnnnnnnnnnnnnnnnnnnnnnnnnnnnnnnnnnnnnnnnnnnnnnnnnnnnnnnnnnnnnnnnnnnnnnnnnnnnnnnnnnnnnnnnnnnnnnnnnnnnnnnnnnnnnnnnnnnnnnnnnnnnnnnnnnnnnnnnnnnnnnnnnnnnnnnnnnnnnnnnnnnnnnnnnnnnnnnnnnnnnnnnnnnnnnnnnnnnnnnnnnnnnnnnnnnnnnnnnnnnnnnnnnnnnnnnnnnnnnnnnnnnnnnnnnnnnnnnnnnnnnnnnnnnnnnnnnnnnnnnnnnnnnnnnnnnnnnnnnnnnnnnnnnnnnnnnnnnnnnnnnnnnnnnnnnnnnnnnnnnnnnnnnnnnnnnnnnnnnnnnnnnnnnnnnnnnnnnnnnnnnnnnnnnnnnnnnnnnnnnnnnnnnnnnnnnnnnnnnnnnnnnnnnnnnnnnnnnnnnnnnnnnnnnnnnnnnnnnnnnnnnnnnnnnnnnnnnnnnnnnnnnnnnnnnnnnnnnnnnnnnnnnnnnnnnnnnnnnnnnnnnnnnnnnnnnnnnnnnnnnnnnnnnnnnnnnnnnnnnnnnnnnnnnnnnnnnnnnnnnnnnnnnnnnnnnnnnnnnnnnncacctgttgtttcctgactttttaatgattgccattctaactggtgtgagatggtatctcattgtggttttgatttgcatttctctgatggccagtgatgatgagcattttttcatgtgtctgttggctgcataaatgtcttcttttgagaagtgtctgttcatatccttcacccactgtttgatggggctgtttgtttttttctggtaaatttgtttgagttcattgtagattctggatattagccctttgtcagatgaggagattgcaaaaattttctcccattctgtaggttgtctgktcactctgatggtagtttcttttgctgtgcagaagctctttagtttaataagatcccatttgtcaattttggcttttgttgccattgcttttggtgttttagacatgaagtccttgcccgtgcctatgtcctgaatggtattgcctaggttttcttctagggtttttatggttttatgtctaacatttaagtctttaatccatcttgaattaatttttgtataaggtgtaaggaagggatccagtttcagctttatacatatggctagccagttttyccagcaccatttattaaatagggaatcctttccccatttatttttttgtcaggtttgtcaaatatcagatgggtgtacatgtgtggtattatttctgagggctctgttctgttccattggtctatatctctgttttggtaccagtaccatgctgttttggttactgtagccttgtagtatagtttgaagtcaggtagcgtgatgcttccagctttgttcttttggcttacgattgacttggcaatgagggctcttttttggctcyatatgaactttaaagtagttttttccaattctgtgaagaaagtcattggtagcttgatggggatggcattgaatctataaattaccttgggcagtatggccattttcacgatattgattcttcctacccatgagcatggaatattcttccatttgtttgtgtcctcttatttcattgagcagtggtttatagttcccctttaagaggtccttcacatcccttgtaagttggattcctaggtattttattctctttgaagcaattgtgaatgggagttcactcatgatttgctctctgtttgtctgttattggtgtataagaatgcttgtgatttttgcacattgattttgtatcctgagactttgctgaagttgcttatcagcttaaggagattttgggctgacacaatggggttttctaaatatacaataacgtcgtctgcaaactgggacagtgtgacatcctcttttcctaattgaatgccctttatttctttctcctgcctgattgccctggccagaacttccaacactacattgaataggagtggtgagagagggcatccctgtcttgtgccagttttcaagtggaatgcttccaggttttgcccattcagtatgatattggctgtgggtttgtcataaatagctcttattattctgagatacatcccatcaatacctaatttattgagagtttttagcatgaagggctgttgaattttgtcaaaggccttttctacatctattgagaaaatcatgtggtttttgtctttggttctstttatatgctggattacgttgattgatttgcatatgttgaaccagccttgcatcccagggatgaagcccacttgatcatggtggataagctttttgatgtgctgctggattyggtttgccagtattttattaaggaattttgcatcaatgttcatcaggaatattggtctaaaattctctttttttgttgtgtctctgccaggctttggtatcaggatgatgctggcctcataaaatgagttagggaggattccctctttttctatcgattggaatagtttcagaaggaatggtaccagctcctccttgtccctctggtagaatttggctgtgaatccatctggtcctgtactttttttggttggtaggctattaattattgtctcaatttcagagcctgtcattggtctattcagagattcaacttcttcctggtttagtcttgggagggtgtatgcgtccagtaatttatccatttcttctagatttactagtttatttgcttagaggtgtttatagtattctctgatggtagtttgtatttctgtgggattggtggtgacatccctttatcattttttattcatcgatttgattcttcaaatgtgtctatttgattctccaattttttttgttttttgtttttgttttgttttgagacagggtctcaccttatcacccaggctgcagtgtggtggcactatctcagctcactgcagattcaacctcctgggttcaagtgatcctcctgcctcagccccccaagcagctgggactacaggtgtgtgccaccacacccggctaaattttgtatttttttttactagaggcagggtttcaccattttgtgcaggctggtttcgaactcctgagctcaagcaatttgcctgcgtcagcctcccaaagtgctaggattacaggcgtgagccactgtgctcagccaaggtttatttctcatatgcagcatttatttagattttgcttatgtagtctgaaaatctttgtgctttggttagagcatttaaaccacttatatttaatgtaatcactagaatatttggatttcaacatgccgtgtaactatttgttttctatttaaccgatttttatcccttcttttattaattgctggatcattttatattattattttttctgttttagatcataagtttagttttcatgggtatgctagaaattacaacatgtagtctttatttattagaatctaacatatgtaattacattatacttccctgaaaatgcaaggatcttacaccatttgaacctctatttactacttctcatatttttaaatattgttgtgatgggtttttttaataatttttttttaagttccgaggtatatgtgcaggatgtgcaggatacggataataattaggcaaaatattacagcaattagaattttacaaccagaattccacattgtggaagttattctctaatgacaagtcaagggggaaatgtatgcttttcttaagaaaaatgttacttttatgttaatgtttctggtaatgcacagcgacacctaatggacgcaaaccaatattgcaatccattggtgtaacaggtatcaaactctgttatggcctatagttatccccattaacagtgatactcttaatactcatattctaaccctatattttaaaccttcttgtaaaatttatctcttttcacctagaagcaatcaaactccaaacagtgctgcaggcagaaccacacatgaacaagctatttttttgagaacccttagatcaacctcaggaggaggcccaactgcctttctcccacacaacgccccttttcagcaggcagtagcaagaaagaattgtcgtccaatgccccttcacagcagttaggtttgcttagagaataagttcaggcttaggccatttttataacttgcaatatgattgggagaaatatgatattggatgctaaaacaactttagtgttaatctcacaattcctttcctttaattattaattttttctgactttcatagaccctcttacaacatacttaaaatttctgacatgtcctaaacattcttcctttaaacaaccagtcatcttttttaggacaagtatttaccatacaaaatcctttcttttataaaatcttcttctttataaccttctcttcatagcttaaagtggattatattatgaaccttcagtaaaaagtcctattaaacttaatgatagtaaaattttcatacttgtttcttatccataactattactcctgccataagcaaaacaaccttgactaaatctttcctgcaattattaatcctgttataaggataataattaggcaagatattacagcaattagaattttataaccagagttccacattgtgggtgctacagtgtatacttcttttgcaaatagtagcatgactataacaattcccacaagagtggcatagtaaataatttcctttgaaaagtttacataacatttccctttggggatttacaaagttacaaatgcgattctacgaataattaaaatctccctgcaaatatgcgttaaaaagaggttttagtatctggtgatgatctttgagaggaaaggttagaaatagtgaaaagtatctggtgaggtaggagagggactgagtaagataagtagccgtcactcagttacttatctttcatgattttcagcttaagatcctctgtttcttcacattgatatggagacattcctctgagctgtcaggggttgctccctcagctcttcaggctttgacttgagtgtgatgtatccaggagttgattcctgtaacttttactgctgagggggttgaaagaagaacagtgtagggccttttccagcttgacttagggaaggagaaagagctgagagttttcaccaataccaaatttcctgggttaaataaaggtgtttctatttcttgggattgggttcttgttagttgtgttatcgtctattggaagtgagctagagagtttacatgcttaaccaatttagaggtttcctgcctgaaacaatctctgagcacattgataagtttttgtccttttccaagtgaaaagcttggcaaaggattttaaggactttccattggctggaggctggcaaatagagtttgccatcctgactgtaaccatcctgagaactgaaaagtatgcccttgagaagtggcctattttatttctgcaggggaatactgggatttaatttctcttatgacgccttcctaaattagaaggggcttgaagcatgttgatgccctgaggcttccttgcctttgatttagctgcctgatcagctaacctattttcttcggctatcttatttgttcccttttgatgtcccctacaatgcatccctcctattgctcatggaagaaaaactgaggataataacctgctaattttgtggtgatattttataggaggtccattggcggttttccttttaaatggcagcatgagcatggagagctaagagagcatacttggagtaggtataaatgttagctacctttccttgcttaattcaagtgctcttgtaagagctattagctccgtcaattaagtgcttgtgcctggggagagacattatttagagtgactactgcttatcctgccttatgtacttcttgctttactggctgtttgttaactaagagctccccctacaggacagtgataatgccacatcatgtggagtgtaaacagttaaattatttcctagggttaacctggaggcttttttttgctagtagagctgttatgacgatggtttggaaacacgtgtaaacaataagttctaactgcaactaaggttgagaaaaatattggatcagagtttttcctgatatgccccttccggtcctgctgtgggaagaggggaggcctggagttaaaggggagaaaggagactggctctaatgttcagaaggaggtccgctttccttcctttaatttccagaatcacccagggctcccgtgctgtaatagcagtttgagccactggagtcggcatttgagtctcaggacccatcagtcctgctggaccatctgtgagagtggtcctgaacccagtgacctccacctctgggggcacttccatctccagtgatctgtgccacaggctggacagggtcacgctggctttgtcttgctgcctgggcactccttcttaaaatgccacaccgatagaaactagcggatgcaacttggggatcctggactttgcaagcctgcaaagttggtgctaccgtctctctccttctcctgagctttttctcttcttttgggcctccccctggtccctattataaaagaccaaagtggccacattcaggaggttctctaaggtgctatctggtcctatagcttgcttctgtactttccttctaatattggggttctagtacagcctctctcagcctttctgtaaaggctacggaattcttatctggcttctggtctcttacagacagtttagagtaattgagagggttggtcctggttttccataggccttctaaaatgcatattaaaaagtgcttccttttccatttatcttctgagttattggggttgcaattaggggtctttaccagaattgcctctctcccaattgggaatggtgtttttgctatttcttcactttccctatctgctttcttcccttttggtgtattataggagatatattgctcatctccaacattttctgttgcttgcagagctgcctgatttttagctgctgtgagggtctggtttaggaacagcataacatccctccatggcaggtgaaatacctgagttaaattttggaaagcctctaaatacctatcagggtcattagaaaactggcctaagtctccatttatttgcctaaggtcctataatgagaagggaacttgaaggggccccaaataaggggaatcctcagatggtttccctggaggttacttctctaatttgggggaactattcttttttgggcctgcctgatatgattgttaaaagagttgggttgatcttacgatgtttgcaagggtttagtaaaaatgccatgcacttgtgcaaaagaaaatgagttgcttttctttttgaagtcctgaggttaaagaagttccagtgtttcagagtgcactccagaggggtgcaagctgaagataatctgttacccatctagaaaaagatgtgagagttcttttagtctccttcctttccatatgacccagggtgaaggacaagacaggggagcatccttctggctgttttctctccctggttcttgggtcccagcaccctgttaaatatgccacctatggtcgaaggcgtggtcctccaagctatggaaccagatgaactaagtgatgctttacccacacaaccttagcttatccaccttgtgtcattcctcttttcacttcctaaacctgtgtaatctgcccggctccccaaaatatgagagactgtgtcatttttgggcaagcctcctttaatggaggcaatgtgccaaattgcctgctattatggcccatgctaaagcatttaccttagaaaaatggttccggttaacttccaaacttagaatccccttactaagtaccattttagtaggaaacagattggatgtcttaaaagaacataggaactgaggggctattttcatgctgatgggacaatatggagactaaaatttggctatggaagacattttactcctaactgctaaaggcagaactttcctgttcacagaagtagcttagagcctagtttccagtagaaaaggcacaaaaaggaaacgttggaaagccacaacgtactgcagagaaccaacaatgtgtgttatggagagaatttctgtttccactagtcatttatcagttccaggagccttttggcagagtcttcagggttttccaggcatagaactttgtcatctacaaagagagaaagtttgatttcttattttcctatttggatgctttttatttctttctcttgcctgattgctgtggctagcattcccagtactatgttaaataggagtggtgagagtaggcttccttgtcttgttccagttctcaaggggaatattttcagtattcctctgccactcaatttgagcaccagtctctaccatgagatatgacatctcatctttttctttaaaaccaaagcctaggttgtacaaattaagctcagcgattggtaacagtaccctacatcacaaacaaattttacaacctttgaattaaatttatgtaccaagcacctctaagcatatatgtcaaacacctccaacctttacaacaactcggtgtgatacatttcaacattcttacttgaaggaagagaaattgtggctaaagggtgaagtacctgtaggtcagggatgggaccatttaaaaaaaaaagacagctggtggtactgtcccttaccaactcagaaacatgggggggggtgccagggggtaccgataaagcaccagcttctcagaactacatttggctttgattgactttccagtaaccttgataataacaaagatcataatttttccatctagagaaagtaatccaggaccggaaggagtctcttaaggataagctaaaacaagatactactcagaaaaggcgctaggattttctggacatacttttgagtgccaaagtaagtcttctaaacttctgaacacattcaactcaataattaaataataaagaaataggccgggcacagtgactagcacctgtaatccagcattttgggaggccaaggcgggcagatcacttgaggtcaggagtttgagacaagcctggccaacatagtgaaacctggtctctacaaaaaacacaaaaattagctgggcatggtggtgcatgcttgtagtcccagctacttgggaggctgaggtgggagagtcgtttgaacccaggaggtggtagagcatgactctgtctcaaaaaataaataaataagtaaaattaaaataacaaataaataaattagaaaaacttacttatatgataactgatacatattgaacttcccttgtgaagattttcctgcttgtcctcccagggctttccctcatgcctccagtgtcacattttaattatctgggcacttgtctgtctttttccaagcccacaagctgctgaaaccttcttcctcgacatgtggtctatagaccagcagcattggtaaaacctgggagcttgttagaaatgcagaatcttaggccctacctcagacctagtgggttagaatcttcatttcaacatatccctcggtgtttcatttgcaattaaagtttgaaaaaccccatcctagaagactaggatcatattttattcctgtttccctagtgattagcacagtgcttggtgactgkctcatgaggtgtccatgtgatgttcatgagaaaagtgaaggacttggcaatyracagtcactcaatatatgacaactattgttgcacaccaggctagcaatcctgtaaggataaaattagattatatgtgtaaagatcctgacatgtggtgagaaaaacaatatttttattttattttgtagttattatatattttaatacatatttattcataatttttgcttatgtgccaagcaycttcaacctttattataacaacctgtggggtatttataaatatctttatgtaaggaagagaaattgtggctcaaaaagtgaagtgaactgctcaagatgacatacctaaaactaacaaagccaggatttaagacaattctggttcagtccaaatcccatgccatttccattgtactagatggcactacgtgaacataattttccatcatcatctccaagtgttcaataaatatttgctgaatttaattgtgctgaattatttgagggaagaaaaataaataaatactctgtgagggaccaaaaataaatagatactctgtgagggaccaaaataaataaatactctgtgaactcaactttcattgtgttggctaccttgatcatgtgaaacacgactcttcctaaaccaggactactaagaacagggcactgcaaaatgaggtggatttggaagtgaaatagaattgccaggaactaatgacttgttaaaaacacacacacacacacacatttaattttctgctgagcctggtggctcatacctgtaatccagcgactcaggagacagaggcaggaggatcacttgaggccaggagtttgagacaagcctgggcaacatagtaagaccccatctctacaaaaatttaaaaattatccaggtgtggcagcactgcctgtagccctagctactctggaggctgaggtgggaggatcacttgaacaggaattcaaagctaatcatgccactgcactccagtctgtgtgacaggggatgacatcgactctaaaaataatagtaaaaaataaaataacattttctgattagaaaaatagtactcattgttttcattttgagttaatatcttttttctttttgatttccaactcttaagttcaggggtacatgtgcaggatgtgcaggtttgttacataggtaaacgtgtgccatagtggtttgctgcacagatcatcccatcatctagatattaagcccagcactcattcgctattcttttttttttttgtattttaacagagcctcactctgtcgctgaggctgaagtacagtggtgcaatcttggctcactgcaaactccgccttccgggttcaagcgattctcctgcctcagcctccctagtagcagggactacagacatgtgccaccacgcctggctgattttttctttttttttaatagagacgggttttgccatgttggccaggctggtctagaactcctgatctcaaatgatctgcccacctcagcatcccaaagtgctgggattacaggcgtgagccaccatgcatggcctcattacctattcttgatgctctccctcctcccagcccccatcccccaacaggctccaggtgtgctgttcccgcaccacgtgtccatgtgttctcatcattcagctcccacttgtaagtgagaatatgtggtatttggttttctgttcctgtgttagttttctgaggataatggcttctagctccatccatgtccctgcaaacgacacgatctcattcctttttatgtctgcatagtattccatggtgtatatgtaccacattttctttatcccatctattattgatgggcatttaagttgattccatgtctttgctattgtgaatagtgctgcagtgaacatacgtgtgcatgtatctttataataaaatgatttgtattcctttgggtatatacccagtaatgggatcattggatcaaatggtattcctgcctctaggtctttgaggaatcaccacactgtcttccacaagagttgaactaatttacactcccatcagcagtgtaaaagtgttccttcttctccacaatttccccagcatctgttgttttttgaatttttaatagcagccattctgactggcatgagatggtatctcactgtggtattgatttgcatttctctaatgattactgatgttgagctttttcatgtgtttkttggccacatgtatgtcttcctttgagaaatatttatccatgtcctttgcctcctttttaatggagttgtttttcttgtaaatttaaattccttgtagatgctggatattaggcctttgtcaaatggatagattgcaaaaattttctcctattctgtaggttgtctattcatgctgataatagtttcttttgttgtgcagagaagctctttagtttaattagatcccatttgtcaatttctgcttttgttgcaattgcttttggcgtcttttttttttaatttttttattattatactttaagttttagggtacatgtgcacaacgtgcaggttagttacatatgtatacatgtgccatgttggtgtgctgcacccagtaactcgtcatttaacattaggtatatctcctaatgctatccctccccactccccccacctcacaacaggccccggtgtcctatgtcctgaatggtattgcctagatttttgtctggagttttcatagttttgggttctttaatccatcttgagttgatttttgcacataatgtaaggaagtttccattttttccatatgactacccagttctcccagcatggtttattaaatagggaatcctttttccattgcttgttattgttgacttggctgaagatcagatgattgtaggtgtgcagtcttatttgtgggttccctattctgttccattggtctctgtgtctgttcttgtaccagtaccatgcttttttagttactgtagtcttgtggaataatttgaagaggcctccagctttggtttgtttgtttgtttgttttcttaggattgtcttggctactcaggctctttttgggtccatgtgagtgttttgttttttttttttttttttgagtctgagagtctgactctcactctgtcacccaggctggagtgcagtggtgtgctcctggctcactgcaacctccacctcccgggttcaagcgattctcatgtctcagcctcctgagtagctgggattacagatgccagccatcatgcccagctaatttttgtattttcagtagagatgaggtatcaccatgttggccatgctggtcttgaacccctgaactcaagtgatcctcccaycttggccttccaaagtgttgggattacaggcatgagccactgcacccagccccatatgaattttaaaagttttttctaattctatgaagaatctcaatagtagtttaatgggaacagcattgaatccataaattgctttgagcaacatggccattttcatgatattgattcttcctatccatgagcatggaatgctttcccacttgtttgtgtcctctcagatttctctgagcagtggtttgtagttcttctcaaaaaggtccttcacttccattgttagatgtattcctagatattctattcttttgtggcagttgtgaatggtagttcattcatgatttggctcttagcttgcctgttgttggtggaaaaatagtacacattaattgttaaacaaaattaaatagacagtaaaggaaattaaaactgcctgcaatcccatttggtaatactatcattttccttcaatattttgtctattcaacttgtatatttttaaattactattatctcacatatacatatgtaatacatttctaatgccgctcttttcacctaatattaaatcatgagcttcccccttatcattaagaagttattcaaagacataattttagttactacataatgtcccattttatggatggtccataacttatttttacctttccctatttttggccacttatggtctttccttcttttgactatggtattaaacattctcgtacataaatctcttgtgcaattgttaaacattttcttagagtttattcctttaagtagaattaataaatcaaaaaatatgaatgtccataggactctcgatttattctgcccagttgaattctgttgagtcatttctttttacatcacctggtgttctgttaaggtttgaaaaaaagtaaaatagaaaaatatatgccaaattagttgtattaattttgaattttgaaacattaatatttttgtattatcattgctacaattgaaaaatataacaatccatagccagctttggataaatatcatcactgtattttttagagtgaaaacaccaaagacttctctgaagcagatctccaagctgaagtgaaaacgttcatgtttgcaggacatgacaccacaactactgctatctcctggatcttttactgcttggcaaagtaccctgagcatcagcagagatgctgagatgaaatcagggaactcctaggggatgggtcttctattacctggtaagatctgtattcctatttcatcctgaattttccccttatacatttgattatttctctcttccggtatcagtgagttactgtgcattgggatagtctgtatgcatttggaagggtaaagatacaggctagagtcctatgttatttaaagattatcactagtttttatgtggaaaaacattgtgtcaatcacacagtattcagtatgcccttttttttttttttttttttttttttgagacggagtctcgctctgtcgcccaggctggagtgcagtggtgtgatctcggctcactgcaagctccgcctcccgggttcacgccattctcctgcctcagcctccggagtagctggcactacaggcgcccgccaccatgcccagctaattttttgtatttttagtagagatggggtttcaccgtgttagccaggatggtctcgatctcctgacctcgtgatccgcccgtctcggcctcccaaagtgccaggattacaggcgtgagccaccgcgccggccagtatgccctattttataactttcctcacttcaggcactggtacaattgcggaaggaatagtctgcctaccttttttatgtcacggaaggcaggaatataacaaacccctctttctccaagatgtaaatggacttcttaggactccagcttttaccaccttagattgcccaagtaagatgttcagtcacttgacatgaaagagaattcacacccctcttccttatcaccatctctgaaccttaaacactgccaccccacaatgatgattaaccttgagctgctgggtatttcatggtgttaataaaaccaaactgatcatgtcttaaaaacttttaaagtggtgaaacatagaacacattcaaaaagtacaaagaacagatgtacagcttaaaatgttgtctaacaaacgccatatagttgcaatcctggtttaaaagaaaaattgcacgttaccagcactgctaaaaacctcgtgcctgccttcccatcacaaaccccttctatttctccaagatgtaaatgttttcctgactttaataacattcattctttgtttttgtttatagtttgttgcctaagcatgcaactttaaatactagagtctagtttatcttctgtttgaagtacatatgaataaaatcatacattcttttgtttgacttcttttgcacaggattcactcattttttagaggagcttcttttcggtcattttcattccactatggaattccattatgtataaatcatgaatcctatatccattctagtgttgatgaacatttaggctattctcaggttttgttttggttttgctattacaatggctccttcttatctgtggtttcactttccatgatttcagtatccactgtcaaccgtggtccaaaaatattaaatgaaaaatgtcataaacaaacaatttataagttttaaattgatgccattctgagtaacatgatgaaatctcctgccatctccctctgtcccatcaaggatgtgaagcatttctttgtccagcgtatccacactgtatatgctacctgccagttggtcacggttggtgttggttatcaaatcagttgtcttggtatcacagtgcttgtgttcaagtaactcttattttacttaataatggcctcaaagyatatgaaaaaacagtatatacaaagttcagtactatccatggtttcaggcatccactgggggttttggaacgtatccctcacggataagtggggactactgtataaataatgcttttaagaacaaccatccagttctggaattttctttgttggaagactttttgttactgattcaatctcactactcatattggtctgttcagattttctatttctttccagttcaatctgggtaggttgaatgtttccaggaatttacccatttcttctaggttttctagtttgttagtgtryagttgttcataacagtctctagtgaccttttgtatttctgtggtatcagttgaacgtcttctttttcatttgattttatttggatcttctctctttttctctttgttagtctaacagtggtttgttgattttacttatcttttcaaaaaccaactttcattttgttgatccttgcattgttcttttagcctctacttcatttagttctgctctgatctttatatttctttccttctactgatttggggtttagtttgttcttgtttttctagttcctagaggtgcctcattagattgcttatttgaaatctttctaggtttttgctgtaggcacttattactataatttccatcttagcactgcttttgctgtatgtcataggttttggtaagttgtgtttcaactttcatttgattcgagacttttttttatttccttcataatttctttcttgactcatttgctgttcaggagaatgytgtttaatttccatgtatttgtacagtttccaaagttcctcttattattgatttctaattttagtcctttgtggtctgggaagacacttcatatgattttaatttttaaaaaatgttttcagacttgtttagtgtcctcacatatagtctatcctggaaaatattccatgtgctgataagaaaaatatgtaatctgtagcttttggacaaaatattctgtaaatgtctgggaggtccatttagtccaatgtgcaatttaaatccatctagaccatccaaatttgtctagatggcctgtctaaagctgagagttgggtgctgaagtctccaactgttattgtattaaagtgtatctctttagttctaacaatatttgctttatatatctgggtcctccaatgttggatgcatacatgtttagattgttataacctcttgctaaactgatccttttatcattatataatgactttctatgtctttttttataattttttactttttctctgatataaacatagctcctcctactcatttttggtttctgtttgcatggactatcttttcccattcctttactttcagtctatatgtgtctttacaggtgagatgagcttcttgtatacagcatatagttgggtcatgttttttaatccattcagccagtatatatcttttaagtggaaaatttaattacattccaagttattactgatatgtgatggcatattgctgccattttattaattgatttctggttgttttgtatatactttgttcttttctttcattgtttatcattgtggttaggttgtattctgtagtggtaacatttgagctttttctctgtcttgtttgtgtgttagttttaccagtgatctttatattttctagtattttcactatggcaattatcactcttttacttctgggtgtaggacgcccttgagcatttttcgtaggttgagcccagtggtgatgaattccctcagcttttgcttgtttctccttcatttatgaaggataactttgctgggaatagtatccttgactaaccattgttttgtttcagcactttgaatgtatcatcccattctatcctggcctataaggtttctgctgagaaatctgctgttagcctaatggaggttcctttataaatgactggtgacttgacactgttctcttgctgtttttagcattttctcttcatctttgtcttttgacagtttgaccataatatgctatagagaagaccttttgaattgtatctatttgggaatttttaagcctccagtatgcggatgtgtaaatctcttgctagacttatgaagttgtcacctattattttattaaagggttttctaacctttttgttttctcttcaccttctgggacacaaaaaatttgaatatttgatgattttatggtgtcttatatgtcacataggctctgctcattcttttttatccttttttatttaatttttctgagttatttcaaaagacccatcatcaaggtctgagtctgcttgatctagtctrattgttggagcttccaaatgtattttttatttcattcaatgaatttttcagtttcagaatctctgtttgtttttgtttgtttgcttgttttttaagagacagagtctcactctgttacccaggctggagtgtagtggcatgatcatagctcactgcagcctcaaactcctgggctcaagcaatctttctgtttcagccttccaagtatctgggattacaggcatgtgccaccatgcctggttaatttttttaaatacagataggatctcacaatgttgtccaagctggtcttgaactcctggcctcaaacaatctttctgcctcagcctctcaaagtgctgaggttacaggtgtgagccatctttttttatatctgtctctttgatggatttctcactcatatcctgaatttcttgtctgacttctttgtagtgtttttcagcattctcttatatcttaccatgcttgctgtatttatttattagatggagttttgcccttgttgcccatgctggaatgcaatggtggcaatggtgtgatctccgctcattgcattctcacttcccgggttcaagcgattctccttcttcagactttcgagtagctgggaatacagccacatgccaccacatccggctaatttttttatttttagtagagacagggtttcaccatgttggccaggctggtctcgaactcctgacctcaggtgatatgcctgcctctgcctcccaaaatgctgggattacaggcgtgaggcaccacgcccggcctcaccatgcttctttagggtcaatattttgaattctttttccagtattttgtaaatttatttttgattgggatctgttgctagagaattactgtgttctttccttgcttttcatgtttcctctgttcttacattggtatttgtgcatcttgtgtaacagttgcttcttctaattttttgaatttgctttcataggggaggactcttcctgaaaatgtatgtgtagtgttcattgggtaggatgctttggctttgattctgggtgtgtgcagtagtgtaatcactgtatgatttcttcaactgtaaacagcatcattgttgtctgtgattttctcagtggcttaggatgtgcttagtgaaaagtgtggtgaagctttgctaggaactgggatactacatgggccagtcttcgggtcccagcagtggctgcagtgggctgagtatgcctgttcttgggcaccagggtgatgtatactagcaccagtgttggctgctccaggcaggccaattctttggtttccaggtggcttgcctgagcgttggaaatagcagtggtgggccaggtggatgggtgagttcttgagcccctgggcatcaggcatgtgggacaaccctctgggtcctaagcagtccacactggtattggtggtggctgtgatgggctgagtaggccagtccccaggcctgcagttggcacatgcgggtgggtgccagctgtggtggtagcagcagattgagtgagcccaacctcagaccccaagagaaggtctcaggtgccagtgatggactgggcagggcagtctctaggaccctagacagcatgctcaggtactgggaggagtggagccagcctgagcagatctkccctcagaccccccagtagtatatgcaggtgctggctatggtaggcagggagagggtggtccccaggctgctagcagaatgctcagatgagaatggcagcagctgtgctatggccctgctactggagagggaggggctgcttttatttggagcagccataagcaaaaggcttttgggggctgggggtggggtgactcatgctttgctagcaccttggcccttgcagcagcccacagcagctacagttacaggcagtggaatttgtccgcagggtgcatgaaaatgtgtgcccacccctctgctgggggtgatagggtcactggcagtggctcccaccttggccccagcagcaacagcagcagcagctgttggggaatgtcactggggcttcagggatgtggagatgtagaggctgttgaaccccaaggcaagacacagtctgatgggggctgaactctccagatgatgccacactgcagctgctgaggactcaggggtttgtgggacccagtgtgagctctctctctggagtaatgtcttcatgcaatctctaggcagctccttatgtcagtctcagggcctgcaaaggttagtgggctcttccatagctagtattgtaggagtccgtggtgggaatgtggatcactggagggctctcacttattcttttcccatattaaggagcttctccagactcccagttgatccccgccaaacaggctgcctcactttcctctccttccttgcttttggtgctttccatcgcttctctgttgaattccagtgttctcccttagatcatctattcaaagtgtcattatctacttgctatgttgcttcctgtctgtggaagaggtgagtaccagatgcctctagtcagccatcttagagccccctccctattttatttattttatttttttacaatttttaaattttacctgctgaaattttatctccttgtactgagtaagaaaaactattttaaaattctcatgattccaatatttgaaactcctgtggatattattttattatgttgtatctgctggattgttgttttgtttgttttgtttttcaagtcatccaggctcattttttacctggaaaatttttactttgtaccagacaagttttttaccaaattccttgtaaactaaggctgatgtaagcttcttccagagaggatttacatttctttatgccaggtgtctgtaatcatgcaattcagaatcctcttaattcaaatatttggaccgttaaaagctgtgccattgatacggtgacttttcgtagctccagtttactcttttaactagaatgccaactttgaactcccaactcaaagcagctagattcttcaggcaccttcccccagagggcctgcaatctgatctttgtccacatagccacaggaggctacccaaaacacttctgagtctcttagctcactcttctgcaatcggcaagcccccagcagaaaagcatttctaaatctcaggatcaaatccatgaatcttcaatcttcattctctcctgaaccaacatctctatattatattactagctttctgatgtgttcaagtacactatgtgtgtttttgtgtgtgtgtggtccaaattttctggttgtcatagcaggagatatgaactgaattacttagtccaccatcactagaaacaaaacttgttacctttttgttcaatttggatagttgtgtcttttttctctaacattctcacccaaaaatgaccaattttattcatcttttcaatgaaccaatatctagcattgctgaccttgttgactttttgcttttgcctatctcattgattcctactcttccctaaactattttttcctctacttctttgcatttattttgcctttcctatacctgtttccaggtgcattcctttgcaggcccagcccagagctgaaggtggcttcccacagtccccacatgtgttgagcccttgattctgactcatgtctccttgcccactgctccacttctggttcgcaacagaagcatcagccattatctgcccacttctgtgatctccaatcctccaatcctctttatggtctcctaacaaatgagttatctcaytgatgcttttaagaatattttttaaagttccctgagttttttcaactctcttagtgaagaaggtagtctgtattcctactacagtactatcagaaatacttatattttcataaaagaagcactctagatataaatacagcccacatgtctatccaaattttcacagatgtgtgatattggtcacaggagccctggaataggtatgtctcaggataagagccctatawcttcggcgaaaaaaaagcttacagttacatgtsaaaagtggttcatgttaaaatttagcttttcctaagacatacttgatacatctgaagtcctcctttgggtaaagaacaaaatcattctcagttacaaaaatggggaaaagctgggctttcagtgcaatgccaaagtgactactcctccttttcctttcctcctgtgcttstacccagggaacacctgagccagatgccttacgccacaatgtgcatcaaggaatgcctccgcctctacgcaccrgtagtaaacatatcccggttactcgacaaacccatyacctttccagatggacgctccttacctgcaggtcttaaaacaactttttttttttttaacaatgcagctatgtttggattgaaatgtcttaacacactcatgtctttaacagttatttatccttagactctgtggaacctagggccattcttatttcccagagagggagaaagaggagagagctctcaggactatctaaacaggcacaggattatgcaggtgcaaaggtacagaatcctgccatatggactgaggagtgggtgaggrggccttcatgaagcatcatggctttaatgctgaaccttaaaggactagatttatatcagcaaagatgagagaggcgcattgttggcagagagaagagcagacacaaagcagcaggcagcctgccttctcccttccctcaggcacaccagcagggcatgtcactggagcaattgctgtaatccaccagactccaggattcacagagggaagttgtgggactatacctggagccatgatgtagccagatcatagttttctgaaggccaacctttgtgttcagcctttctcaatcaagcagcagatttaagacatctaagctgggtagcacgattatagttattttttagaaagattaatacattggtgggatgcaagatggattgaaagatgacattagagatataaaggaatgagccagaatttatctttgacctatgttgaggtgtgtttctacaccttcctccaatttaaccatctttcaaatactggatttgattgggcatttgtagtagtctaattaaatgtagcaatatttaattgctactgtgctaccatagttgcccaatagcaattaaatatttgtttcctacaaaatcaactttactattgtaacaacaaaaggaaaaaattatttagcacttactaggagctgagaattgttccatatgttttgcatgtgttaactcattttatccacccatcctcctgccccccagttctgctgtggaaatactagtgttatgcacattttagcaaacagggacaaaaaggtaaaacttcatctctggtaaatggtagaactaggacttgaacccaagaaatgggactctagagtgtgctcttaactactacactacagcaacaacttaagctttctctgggatctctccagagaaagatctttgctatcatggggatctttgcaatcatctagtatctaaagaagtttcctctttttaattcagtgttatttttcacatrgtatttattgtaatatttattacctacataatattgcatctatgcacataatgttccacgcacctagttgttcaaacaagacagctcagagtcaacttttactaccttttcccttaaccttgcatttcaataatacttaaatcctgtcaataatctctggtttttttcaatatcaataaaatgatgatttattgctgccttccaacacaagaaaattattttctctgcttccattctagatcacctaagccctgtaatccagagtcttaaaatcccccgacccatacaaaagctacatgttgaaaatgtgagaatcagcatgccttctaatttttcccattcaggtcctttctgtttcatgttcctttcactttcctgatcttgtggcttttgcggctgctgcgggtaactttctgggcttcagacaattctgttgagatctgcatggatgttggtggaagagctggctccacccggctgactcagttttaggcgacttatacgtcatctctggtctcctgcagtctctgccctttcctccaagtgccttcaagggctgcaccttaatctccctcaagctacaatgaagggacaggaagtgcacacgcagagttgccttcacctcactttacattcctttccgccacaccttcttgccacacacagagctttcaggccttcactggacctcacgtgctcatctgtctcatttcctgttaccctgctttccttcctgcccctctcatacacacaggcactccacaacttcactttcttcaccccagggttggatgcctggattcatcactccaacttcccctttggcaatgccatcaacttccttgaatattttccctttctctactgtcactcatcagtaattcaaccagcattaaattcctctatacgctttctctgccctgctaatgggcccttgaatacagctatagcacaacaaagcatgtgcaaatggatgcctcatatccgccagacccacctcttcccctgtattacccaaaaatcctgtttatttctaaaaagaaacatgtttatgatgcctgctttctctcccacacctcacaatatcacttacacattttcatcactctctacctgtgcctgtgccatggccccattcactcttggcaaaagacctactacattatgtgtgcccttctcttcatttgttggcccaacaattgcctagtaaacatctgctctaggcactttgctttgttctgagcgtactatgatgtgcaaaatgtccaaaagaaagcatgtcatctacctccttcccctaaacctattcctcctcctggattgctacattaatgaatggcaccactgtctgtgagtaattttaagtgagaaagatagaagtcatcctcacacctccaccatcttccttacccagacagtatccaagtcctagaatatcagctatttccttctcaacaaccttgcttccatggtctcagctattgcctttgtcaatcttcatctgccagagtcccctagtttttatatttccatacttagctatctacaaaccaatctacttataaaagataaatcataagtctaggtaaattctaagttccaactcaagaaagccacttgggtgattctgttgccacttgtccctcctaagatcctacttatacacatacactgaaatgcaaaaagaaataatcccataaaagtgaaaagaatggaaggaaggtatttaacaaacaaaaagagagagagagattttaatgaatttatgaaattaaaaaagaaggtaggattgggctgccaaattaaacaagaagagaaattcccagttttaaaaggcaatgagggggtggctgcagaaagacttgcagagagtagagggtggctctactttttaatcccatagaaaaggtttagaaattgtggtcttaataagctcagtaaggctgagctacttcaggaaaagtgtatattaatcacctaaaagaaatagtcaatcctaaaaattatattttatcttttaaaagttaacttttaatttagagcctagggtacaattaaagactctttattctggcagagaaaaggggatgtccactctgctaacagattgtgacccaaatgataacacagattcctgggagagcagtcatttttttctggacaatgcagatcccttttcactaatcttaagagatattttgagccttgctcagaattacctagatttgtggaacaaagaaactggagttaggaagacagatttagggagaggaagaagataaaatcagatcagttgcaggcagtcattaatctgcctttcgtaagtttttttccagggaatcttcactgacattgagttagagtcattgaggtgttttcagattttctacatggcaaaaagaaaaaagatgacaaaccaccaaaagttatgaattttattttctttttgccctaaggctccatggagatttaaaacctcaataaaataggatgtttttcaaattgtgtctttttctgacgtattcttggtttaaatatgtaattttgttagataatgtgcatgcttttttattataatgaatatgctcataaggtgtcagtgtgattctctggattaataaaacccatgccagaaaaacaaaaacaaaaacaaaacagattccctcaatagccaataacagacctatcaatggcctagtgtgtgccatgaatctgatggtccagtaagcctcagtggagagggacatggcccaaaaaaatgggtgttctatgaaatctcctaaataattcacaatcactaaatagagcaaaacacaatgggttttgtgccactcatgggagagatccatggcaatcaactagacactggctgtaagctagagcaagcagaaactcctaagaaagacagtaacagacttaggaaatcaaaaatatctcatctgaggacactggcatgtgcctgtaatcccagctactcaggaggctgaggtgggaggatcactttagcccaggagtttgaggctgcagcaaactataatcacaccacttccctccagcctgggcaacatagcgagaccttatctcaaaaaaatttttttcattgaccatgagttgagactcacccaaaggagctaataattgatgagcctgtgaatcatacttcttaggtattagctactactgaacttcagtgggcagtctgttctgatgatcttggtgagacttccagaaaccgtttaaaagagaacaaggcttctggaaccaaaaattgaaaaatgaaagaatgtgtactgccaggatataaacctaatccaaccatagaagttagaccctatgattgaggcttgggagagttaaataacattgggtttttgaagctctaaacttcaaaatctctgacccatgttaagaaagcaaatttcttgaatgtccttgattagctagcaatatgtggattaatcacttaggaagaattcgttaacggtgacctggccatttgttttttgaaagtgatctttgctgtgtggatgcagcactgttatggtgtcccagttgccattctaacccaaattaggtctttacctcagtcagttagctagctggtcataacaggattggtgaacttcaaaattagtcttcataatgttaaaagccacagttcatcatgaacataagacagctatgaatacctatatatcaagttacacatctgtaatttttttttttttttagatggagtctcgctctgtcacccaggctggagtgcaatggtgcaatctctgctccctgcaaactccacctcccaggttcaagcgattctcctgtctccacctcccgagtagctgggactacaggcgcgtgccaccatgcctggctagttttttgtatttttagtagagacagggtttcaccatgttagccacgatggtcttgatctcctgacctcatgatccatctgccttggcctttcaaagtgctgggattacaggcgtgccaccacacctggccctgcaattttttaaagcaaactataggaaatgaaaaggaaaacagacagaggcaccctactaatagattttaactgcctttcaaagacgtacacaaatcaaagtacacagactatctaaacaatataattaataagatagactttatgcgtacaatattaaactttttccccactaatagagaactttccttttaagtacaccagcaacattccttaaagttgacggtatactagaccacaatttaaaaagttactaaaagagaaacattacaaaatagcattctttaaatgaagacaataaaaatggaaattagcaacaaaaatttttcaaaaagtttcattcatctggagttttttgttttatccattaaaaactcttgggctaaagcaaaattacaaaatcaaatcatgaccctgaaaactctacatatgagaattaatggtctgccactaaagcagcattcagaagagaagctataatagtaaatgcgaaatatttttattaataaaagaattaaattaaacactgatgtcgaaaacaactggaaataaatcagttggggaaagaataaaagagtaaactaaaaggaaacaggtgaattaacaaaggcgaaagcaaaaggtaatggtatggaaagcagaacggttgcaaaactagtcaaaaaacacaatagccagtgggggaggggctggtcaacaaagagacacaccacgaactaatattacacaagtgtatgcacagagacttgaaaaaccaggaaaaaaactagataattgtataatacataatttactaaaattgatactggtagagataaatagtctaagcatgccaattttcacaggactagagaaaaattgtagagcccctgaaaaggaaccaggcccatgcagtttttcagaaactttttcaaacctttaaagaccaaataatcccagtaataagttgtccagagcatagaaaaataaaaacttagaaagttatttaaggaagtatcacactgataacaaacctactaaaaattgcacaaaagtatctttagataaaaatcactaatgtatataaatacaaaaattttaaataaaatattagtaaacrtaatccaatagctcatcaaaataaatatattggctgggcaggtgactcatgcctgtaatccaaacactttgtgaggccaaggtgggaggattgcttgagtctgggcaacacaacaagaccccatctctacaaaaagacaaaataaaatagtgtatcatggccaagtaagtaggtcatattccaaaactgcaaagattgttcaatattaggaatccattaatataatttattatatgtatagatttcatgagaaacccatatcatctccaccctgatcaatggatattccataacatgataaactattacttcagtgccatattggcactatatcccatattgttctatggctccaaagtataataaaatctcccaagtagctgactagaaaaggtaaaacaaaaacaaaacctaaaatataatactctcactctctgcttaaatttcttggtgatccatattggtttaaacctaaaatccttagcatgacctctttgccattttagggtacaagcccagccaacctccccaggctcaactaaggacactttgctccctgaatcctgttatacaaccacccagtcacccaaatttgtaatgctttctcaagtattaaagcttggcttcatgcttttttatctgcctcaaattcctttctgaatcttgttttcctttttttttttttttttttttttgctttttttaaattaactttaagttctagagtacatgtgcaaaacgtgcaggttagttacatatgtatacatgtgccatgttgtgctgcacccattaactcgtcatttaacattaggtatatctcctaatgctatccctccccgctgcccccaccccacaayaggccccagggtgtgatgttccccatcctgtgtccaagtggtctcattgttcaattcccacaacgagtgagaacatgcggtgtctggttttctgtccttgcgatagtttgctgagaatgatggcttccagcttcatccatgtccctacaaaggacatgaactcatccttttttatggctgcatagtattctatggtgtatatgtgccacattttcttaatccagtctatcattgttgga

SEQ ID NO: 94803 - DNA, 29715 bp, Homo sapiens
ctgaattttgatgattttgaggaggacttcaacctcatcgtcagcaactgcctcaagtataacgccaaggacaccatcttctaccgggcagcagtgcggcttcgtgagcagggtggtgctgtgctccgccaggcccggcgccaggcagaaaaaatgggcattgactttgagacgggcatgcatatcccccacagcctggctggagatgaggccacacaccacactgaagatggtgggtgatatatcacacacacatataagaggccaatgccggggatggacagctttccaaaagtcccctcctgggagcaggcagtgtaggcagaragcagctaggctgagcagtggcaagctatccccaggaatgctccccaagaagccagactgggtgaatggatagcagtgcccgccattccacatcttggtgctgctattttacagctgttcctggtgagaagcccaggggggatgagtgggtttcttgctgcctgcccaggttcaaggggccctgagggctgccctgagtctgacctttcccctccaaccctacccctagcagccgaggaagagcggctggtcttgctggagaaccagaagcacctgccagtggaagaacagctaaagctgcttctggagcggctggacgaagtgaatgccagcaagcagagtgtgggccgctcacggcgtgcaaagatgatcaagaaagagatgacggcactgcggcggaagcttgcccatcagcgagagacgggacgtgatggccctgagcggcatggcccctcgagccrgggtagtctgacaccccacccggcagcctgtgacaaggatgggcagacagatagtgcggcagaggagagcagcagccaggagacaagcaaaggtctgaatcccatggcaaggtggaccccaaagcaagtcagactttggctctgcagcacacactcaacccctgccattccccaggcagaggtccctcctacacagctagctgtactttctccctcattccccaatcaggggcctcttagctgcctctctggctatttgtataagagttaatcttccaaattccaagcccctaaaatgatctccccaacgttagctggagtaatggtcctatatgcccagggcatgaccctggatatctacccttctcaaatcaggcccctcaccaactctccttctttctttctctgctccaggcctgggtcccaacatgtcctcaacccccgcacatgaggtgggcaggagaacctcagttctgttctccaaaaagaacccgaagacagctggaccgcccaagaggccgggccggccccccaaaaaccgggagagccagatgacccccagccacggaggcagtcctgtggggcccccccagctccccatcatgagttccctgcgtcagcgcaagcggggtaggagcccccggcccagttcgagctcagacagcgacagtgataagtccacagaagaccccccaatgggtgagccttaccatcacccagccccccaagagagtgagcaaagctgccattcttcccagcatactcccagttacccctttatttgcccataaaagagcgagctagaagggtccttaggaatcctttaactccactcactcatcttacagttgggaaaactgaggcccagagacactacgacccagctaaagtcccatccagggccccctgcctccattgtatcactttaccttttctcttctcaccttccttggggatctcctgccctttaagccatttgtgtcctaaagccagtaactgccgagggaagcaaggggtggagcagggctgtggccaactgtggtagacactgcccagagctagctctgctggccaaggttggaggaattttccagcacagaaggggaacccaagctccaagtccctcttacctccatgtcatctctgatctacatcttcctgaccggttccttccctcctccccttcccttcaaccaagacttaccagccaatggcttcagcggtggaaaccaaccagtgaagaagagtttcttggtataccgtaatgactgcagccttccccggagcagctcagactctgagtccagcagcagtagcagtagcagcgctgcttcagaccggaccaggtaccagccctccagatcgaggccaacctcaggggatgcccttccagggctcttgggcctgtgtaggtttccctgttggaagtggggtggcagccatctcagtctagattaagatggctcaaactcaaggttctctgctaaataaataaatcagtgttaccattaatagaacagagagaaccatcctggattaaggtgatgattagagtatgcactcctgccgccactgctcaggctaacccacctctgttaggtcatcagcctagcccctgtgggtgtttgaatttgaaattcctcatatagcctctgctttccaaaagtctcagaccctgcgggctttaagagctgagggcacataccatgctgttccccattcttcccctcctttgagctgagctcccattgtcttgtccacagcacaacgccctcaaaacaaggccggggcaaaccctccttctctcggggcactttcccagaggacagcagtgaggatacctcaggcactgagaatgaggcctactccgtgggcactggccgcggcgtgggccacagcagtaagttcccttgcccaaggccagggatgctggggacccagtgtcagggtctcgccagccccccagctgctgatccaccccctctcccccattcctgtgaagtggtaaggaagagtctgggccggggagctggytggctgtcagaggatgaggactccccgctggatgctctggacctcgtgtgggccaaatgccgaggctatccatcatacccagctctggtatgcttgcttctgttacacttcttgctttccaatcccagaatacagattcacagttagcagacttttcctactccctgctgagctgtggggcacagagtttcttggtaaggtagactggtgggcagatacagcttgagtaccacttagaggctcccactcagtttctccatctctcccttttgcttctctttgctccttgggctctgaaataatttagcatggaaagaagctgagggtcagcattgcagttctagtagcatgataccctctctgtccccacttcagacatactctctaagttcttgaggaggaaaagccttgggaggacatggactgaaccaaactgggctcttattatatcctcagatcattgatccaaagatgccccgagraggtatgttccaccatggggttcccatccctgtgcccccactggaggtgctgaaacttggggagcagatgacccaggaagcccgagagcatctctacctcgtcctcttctttgacaacaaacgaacctggtaaggaggggagcatttggtgtgactcayagccacagatgcagccctgtgtggtatgggggcagactgccaggaaactccagcaacaggcagactgggctatcacaagtcagtgggggagggacttagaacagttttttgagcgaaagggttgtgtcgaccatgtgtctgagaggctgagtgggcactagtggacacagctatagctagaaaccaaaggaccatcagagacttakgacaaatatagaggtggctcccacccagactcagatggcttctagacttagttttcccacctctgcctccacagtgacaaaatgaggataaagcaggcataaacattcaggctctgaatccctgttctgtcacatttacacatgtagtctttttgttaattgtctgcagaggatattcaatgtcagtaaagtctgcctagagcctatggcacagggtagctatttctggtgaggtcagggtgcctcctttttgtacccataaataccctgtgattaccctcccgccgccaccacacagtataactgttgactgggctctttcatctctagaccatgaacagtcctttgagggcagggaccatcacagagtctggccagagtgggtgcttgggtggtgtgtttgagtgaatagaggaggaaggctggtccttgttctccctgagatgatttatttgatcttcaccttatcctataggcagtggctgcccaggaccaagctggttcctctgggtgtgaaccaggacctagacaaggagaagatgctggagggccgcaagtccaacatccgcaagtcagtacagatcgcctaccasagggctctgcagcaccgcagcaaggtgcaaggcgagcagagcagtgagaccagcgatagtgattgatactgctcaacacagcccaacctatagtgccctgtgacttctctcctcccctttgctcactgtcctggagtggcaccggcctctgcactgactcatttctggtcttggggccagtctcaggggaagctgggtgggggaggtccctcctgccctaagtgcagctggactgtacagaacactccaagggccaatggcagttcagcgcaaggagagggagggcccacaggtcagaaaaagctccagagacctcacagcattgtagggcggggtggtgggccaaagttaggacactgcgtaaaacaggccatsccaccacctctacctgctcatgccaggagaatccataactgcctagaggcctggggcccctaccggtcgtgaggtgagtgggcatctgtccagcctggaagaggggcactaggtgactccctcccctgctgttgkaaatactgtaattatcggagaatttaaattattctcatttgtaactgcgtttccgggtcgcgccagagtcatttggtactaaaaaaaaaaaaaaaaaagactgggggctgtccccatttcccttctctttcccatagattcccccacctttcaaactggtttgtatttatttcaaaggaagaaaatatattgattcttagaaaataaactgtcaatttagaattctttgttcttgccccctgccagggcaaaggggatacaaagggaggttctgtgccccagggatgatacataattgggcccaagtggttgctgactgctgtgcatgctacatttcataagacacagcaaagagagcccctgttgcccatgcatggagtgagtggcaggccctgtgttgagcacctttagacattcagctttgcgtaatccttgcaataactatagggtagtttaataatagactggttatctccacaaagatgctgaagtttcaaaaaattatcttgcctaagttcctacaactaggaaggtgcagagctagaattggaacccaggtctgtttgcaaacctggctcttcaaccagtatgctgaactgccaggggaagagtcaactatcgattcctacttggcccttagaggcctcaagtcctttgccagtggcatggcccaagtgtttcagcatcaatacagctgagaccttccccactgcttaaccggagacagagctgggatggagacggttgctctttgctcacccccaacctcagcaccttctttccagactccaccgacatttattgaaggaatgccttccaagtgctaggcgcctgtgggatggcatgcctacagataggaacagtcacaggaagaaggggcggcccaggccttgcagccactgaggactggcactgagacaatgatggcactggtctgatgttgattccatgctgacggtacactccgctaggtctctggctgggacacaagggtcaatccgctgcagatgttgctcttcaagaatttgcagtctgggcggggtgcggtggctcacgcctgtaatcccaacactttaagaggccgaggcggctggatcacgaggtcaagagatcgagaccatgctagccaacatggtgaaaccccatctctactaaaaatacaaaaattagctgggcgtggtggcgcgcacctgtagtcccagctactcgggaggctgaggcaggagaatcgcttgaacccgggaggcggagcttgcagtgagccgagatcgcgccatcacactccagcctaggcgacagagtgagactccgtctcaaagaaaaaaaacttgcagcctgatagttaagatacagcaaccccaaatccctatgctaaaaggtgagaatggcccagataaaggtcatgtctcctagctccctgctttttcatgccatcctccagaagggaagaaattaaataatccatcctcctactccaggcgactagaaggcaggctgcctcagggccacacactgggacttggactcaacctgatgggcttctgggcccagccccagacaaacccccggcaaacgtcccattccgaggaaagcatgagcagatggagtatggaagaaatgcccaagacggcaggcagcagctgtggcggccggcgggacgacaatccgaggagaggcctctgatgtcctgaggtctcagaggacgcctaaaggccttgaatgggacaagcttagcgggcgggcgcagaagagaataatactctggagacacttcccgagggctctggggccggagctgtgttcgctccggttcttggtgaagacagggttcgtgggaggcggcccaaggagggcgaacgcctaagaytgcaaaggctcgggggagaacggctctcggagaacgggctggggaaggacgtggctctgaagacggacagccctgaggaaccgcggggcgcccagatggaactcgttagcgccccgagtgcagacaatcccggagggggaaaggcgagcagctggcagagagcccagtgccggccaaccgcgcgagcgcctcagaacggcccgcccaccctgatttctcattggcgcctcctacctcctcctcggattggctacctctaggtgaaatgagcggtggttgagccctacttccggtggtgctgtggtctgcccctggagaacccagaagaacacagctgtgcgcgcccacaggctctgggggcgggagaagataagtcgcaaggagggggcgggacctacacctcaggaaagccggagaattggggcacgaagcggggctttgatgacccgcaaagggcgaggcatgcaggaggyggaggaattaagtgaaacagggaaggttgttaaacagcaccgtgtgggcgaggccttaagggtcgtggtccttgtctgggcggggtctttgggcgtcgacgaggcctggttctgggtaggcggggctactrcgggkcggtgcctgctgtggaaatgcctgcccgcgcgcttctgcccaggcgcatggggcatcgtactctagcctccactcctgccctgtgggcctccatcccgtgccctcgctctgagctgcgcctggacctggttctgccttctggacaatctttccggtgagtgactgagcctgagaagcctgtcccctcggactggctcctgccgcctcaacactgcctggcatggggtacaaaggaatttgggggatgatggaagaaacccggggtacaaaagaggaaacaagcacgggtagccaacctgttacctttaatatgtctgtacagtgataattgtaaggatccagcggtataaccgatgcagaagataatagcacttgtttttctttttttgagacagggtctcgctctgttgcccaggtaggaatgcagagaggcccattccagcctcgaccccccgggcgcagcytcccgagtagctgggactacaggtgtgcgccatgcccggttaaatttttgtattttttgtagaggtgaggtttcgccatgttgctcagactggaagatagcactgttacttgtattagtttcgtacatggagctattgtaggataggagggaccccaaagggtgcaagaaaggaaattgagtgccagggttgtcatgtgccttgggctcaggtggagggagcaaagtcctgcacactggagtggtgtactagcggatcaagtatggacactgactcagactgaggagcagctccactgcactgtgtaccgaggagacaagagccaggctagcaggcccacaccagacgagctggaggccgtgcgcaartacttccagctagatgttaccctggctcaactgtatcaccactggggttccgtggactcccacttccaagaggtggctcagaaattccaaggtgagtacaggacctgggctggggttagggttcttggacataagtcacttctctatgactcagttttgccacctgtaaaatggggattatatctrcttcataggcttttatgaggatttaaggaactaatacatgtaaagtgcttagaataatgccaggcacatagtaagtattattaccattattattatcctgctaatcaccatagtgaagtgacaaggattttgagcccattcykggttgtgtgacctagggcaagtgatttcattcattctgtaaatatatacaaagcatctgctgtgtgaccggggatacaccagtgaacaaaacagacccaaatgccagtcctcatggagcttacattgtggcctctttatctgtggaatgggatggtaactcagccctcacaagatgctatgaggaatgagaggtctggtgttgctttctctaacggtgctgactctcattctcctgggatcctcctggagttttggtacctaggatctgacctgtgggtgggaagaggccacacccaacagcaggtacctctcctaccccctgcatttctggtctccaggtgtgcgactgctgcgacaagaccccatcgaatgccttttctcttttatctgttcctccaacaacaacatcgcccgcatcactggcatggtggagcggctgtgccaggcttttggacctcggctcatccagcttgatgatgtcacctaccatggcttccccagcctgcaggccctggctggtgagtaggtgggtcccctgcccccaggccttccatcagctttcaagatctgttcatttctcccctggttaccttctcaaggcttcctgccttcccaaacacttcccctatccagaaccgccctgcctggtctgatcaactccagttactcatcctccctatgcatccctaaaatgtcagcacctcactggtctgtgctttttgcccaatgggttcaatgcctaatcagaaaaatatctgtatacaatgtacagtagtttggggttaagagcatgcattctggggacagacccatgcctggttctgaaccccaactctcacttgggcacattatttagcatctctgtactaaagtttcttcatctgtgaagtagaataataatagcacctacctatgctattattggagttgtcatgarggttgaagaaaggaatatacatactgcacctarcacagtgtttggcacacaggaagtatatgtaaaattcaagctggtatcagccaggcgcagtggctcacacctggctaacacagtgaaaccccgtctccagcctgggcaacagagcgagactctgtctcaraaaaaaaaaaaaaaaaaaaawttcaagctggtatcattgtagtgaatgggatagttttgtatctaagaacacgtgtgttcttcacagtagccctgtaaggcaaatgttttacagaggcaagtgtatcgattggcagatgtgagaaccaasctaggacaagtgcttgggaactgcatagcaaagagacagactgcctcaaaacaggagaatgtttttggtgcttagaaacccattcctggccgggcgtggtggctcacgcctgtaatcccaacactttgggaggtcgaggcaggcagatcatctgmggtcaggagttcaagaccagcctggccaacatggtgaaaccccatctctactaaaaatacgaaaattagtcaggcgtgatggcaggcacctgtcccagctactccggagggtgaggcaggagaattgcttgaacccgggagcaggaggctccagtgaaccaagatcagaccacagcactccagcctgggttacagagcgagactccatctcaaaacaaacaaaaagaaacctgggtcaggcacggtggctcacacctgtaatcccaacactttgggaggctgaggcaggtggatcacctgaggtcgggagtttgagaccagactggccaacctggtgaaacccgctctctgctaaaaattagctgggcgtggtggcaggtacctgtaatcccagctactcaggaggctgaggcgggagaatcatttgaacctgggaagcagaggttgcagtgagctgagatcatgccattgcactccagcctggrcgacagggcgacagggcgagactccgtctcaaaaaaaaaaaaaaaacctggccgggcgtggtggctcacacccgtaatcccagcattttgggaggccgaggcgggtggatcacgaggtcaggagatcaagaccatcctgcctaatacggtgaaaccccgtctctactaaaaatacaaaaaaaattagcmgggtgtggtggtgggcgcctgtagtcccagctacttgggaggctgaggcaggagaatggcgtgaacccgggaggcgaagcttgcagtgagccgagatcgtgccactgcactccagcctgggcgacagagtgagactctgtctcaacaaaaaaaaaaagaaacctgttcttgagtctcrgctcctggcttagttagtcataaggcctcaagaaagtcattcacctcttccggcttctcttagcttgtttgtagaatgggaataacagtttctatctagaagggctttgggagtgaataaagcaatcatgaggcagtgtagtgtaatgggttaagagcacggcgttagccrggtggggtagctcatgctggtaatttcagcacttttgggagcccaaggtgggaggatggcttgagcccaggagtttgagaccagcctgggcaacatagtgagacctcatctctacaaaaaataaacaaaattagccaggcatggtgacacaagcctgtagtctcagctactcaggaggctgaggtgggaggatcgcttgagccttaggaggtcaaggctgtagtgaactgagattgtgccactgcattccagcctgggtgacagagcaagaccctgtgtcaaaaaaagaaaaagcacaggtcttggtgtcccagacctaggtgcaagatcttatctcccccatgtcctttcttaagtaagttaacctcttctaagccctcattttctccacatgtaaaatgggaaaacagcagtactgtcagtggggttcttgggaaaagtaagcatgataatatatctgaagcatgttgcctagcacttgatcatagaagctgttgctatattgtggttatttttttagatcatgagtgtgaacactctttcggaaaggttaaggaactcagttggggagctcctcaagggragcaagtcctcagtccctggactagacttgggctccggggccaattcatagcaggtgctcagaaaacatgtgtagagggacaggacccaggcctaaccctttcccttgcacataaaagtgtccactatcccatagagggtggggaggtaggaggggaacttaggaaaagcactcttgtgaggtagagagctcacttactagcctaaggacaggaagaacttgaagatgcctgatgcttgccctcctcctcactccccgcagggccagaggtggaggctcatctcaggaagctgggcctgggctatcgtgcccgttacgtgagtgccagtgcccgagccatcctggaagaacagggcgggctagcctggctgcagcagctacragagtcctcatatgaggaggcccacaaggccctctgcatcctgcctggagtgggcaccaaggtgaggccccagggggtaggagctgccctctctactgacactaagaggagagcaggaaatgagccaagcctgggagctgggtggaggcttggcttccggaggcagagcaggaaggagaaaggatataagtagatgttttatgagagaaaaaagcagagtgcagaaagaktagaaaggatatagccctttgaatgaatttctagaaagaccatttgttcagatgcaacacatatatgctgctatatatatgcagcaatttccaraaggaaattgcaggaaactaaataatagtttccttgggggagacaaatgggaaratatttcttcttttcggttttttgtttgtttgtttgttttggtagaaataggctcttaacaatgttgcctaggctggtsttaaactcttgccctcaagcagtgttcctgctttgccctcccaaagtgctggaattacagggatgagccactgctcccggccacattttgttcctttcgtaaaatgacatgtactgacaaaactttttgcttgatgtcaatagggttaactggcaataagatgactggaaattaggcatttgtctttttttttttttttttgaggtggagtcttgctttgttgccaggctggagtgcagtggtgcaatctcggctcactgcaacctccgcctcccggcttcaagctattctcctgcctcagcctccagattagctgggattacaggcatgcgccaccacacccagctaatttttgtatttttagtagagatggggtttcaccatgttgggccaggatggtctcaatctgacctcgagatccacctgcctcagcctcccaaagtgctgggattacaggcgtgagccactgcacccagcctttttttttctttatacttctctgtagtttaaaaaatgaatttttgcttaaagatttttttttgatgggctttggactacagcctaacattaaatcttggttctgcctattctcagccatgtgactttggccaggtcacttcacctttcaaagcctcagttttcttgtctgtaaagtgggtgtggtaataccttcttcccaggttatgataacctggcccacataggtgttcagctagtagcacctcttattacagcaatttcagtgtattcataggccrcgcatggtggctcacgcctgtaatcccagcactttgggagsccaaggtggacagatcacttgaggtcaggagttcgagaccaggctggccaacatggtgaaaccccrtctctamtaaaaayacaaaaattagccacacgtggtggcacatgcctgtaatcccagctacttgggaggctgaggyaggagaattgcttgaaccygggagagccaggattgcaccagtgcactccagcctaggcaacagagcgagactccatctcaaaaacaaacaaaaaaaaagtgtattcatagatagtatctgttgattgagaatatagaacaacagtaaccccagagtgaaggagaaagcagccggctttggggctataagcaagatgctggccacatgctgcccttcttccacaagggctcsttstgtgtctgtcaaaggtggctgactgcatctgcctgatggccctagacaagccccaggctgtgcccgtggatgtccatatgtggcacattgcccaacgtgactacagctggcaccctaccacgtcccaggcgaagggaccgagcccccagaccaacaaggaactgggtgaggaaagtgggctgcaggggctggcagtgggctgggatggtagaaacttctctctctcttagtcacctctccctcagaccctacttctgttgatgggtcacagaaggggtcagataacttagtctcatcacttctgatttaggaaactttttccggagcctgtggggaccttatgctggctgggcccaagcggtgagtgtacctaggtgtcctccctaggtttcctctcctccagcccagacccagtggactcttccaccaccgccccaggtggccctaaaggactctccagccacccctgtcccaaccccagtggattctcattgccttcggccctgttccccaaggaytcttccacctcccaacactgtcactagtctcaccagccstgaccccagtgtaccctcctccccacacagactccaccctcctacaggtgctgttcastgccgacctgcgccaatsccgccatgctcaggagccaccagcaaagcgcagaaagggttccaaagggccggaaggctagatggggcacccwggacaaagaaattcccyaagcaccttcccctccattccccacttctctctccccatccccacccagtctcatgttggggaggggcctccctgtgactacctcaaaggccaggcacccccaaatcaagcagtcagtttgcacaacaagatggggtgggggatattgagggagacagcgctaaggatggttttatcttccctttattacaagaaggaacaataaaatagaaacatttgtatggaaaatgcagtgaggagtggtagggargcaggtgaggaggggacagggcagagaaactcccggttcagggagggaaggggagcaggctgccsccaagccctcccacgcagaggatcatgacccgaggtccagggccctagagctggtggggcagtgtgggggacagttctgtgcccggctccacgcagcagtctcgacagcaacagccagctgccggccctgcatgggaagacagaacagaggtggccrcaggggcaggccctccactccagcccgggtgcacctttgtggaccacccatgcccttctgcagagcccgctcctyacccccagccactggtgtcagcagctccccatggctcgccgtctgcccctgcccctcctggctggtgcccagctgcagtttcctcatgtgccgcaccacagccgtggcattgaaggcttgctggcattgaaggcattgaagggagaggggagaaaggacttttgagagagtcaagtcatggggcaggggcgcagtgggattcttgcaattgttctgttattttcattcaggagttattttattaattcccctaaagccccccaaaaacctctacaaggctttattatatatttacacacacacacgcacatatgttagatgtatgtgtatctatatatataaatagaaacataactataattcatattaatatgtaatagcaaacactatagcactgtatgtcaggcactgttctaagcactttacgtagtaattcatttaatcttcatgaaagtctttgaggtaggtactattatcattttcaaaggaggaaactgaggcacagaaagctgaagtaacttgctcaggtgtgtctctattcaatatctccacctaggtgtcccacacacccctcaaattcaccatgtctaaaactaaaaccatccccccaaaacatgtttctgtccctgtgataaccatctcagtcatggtaccaccaccatccattctgttcccagccacagtcttgggccagcccttgacatctctttcccccaacatccattgcatcgtcatgtcttgtcagtttcacctcctaaatgactcctggatcaaccactgttctctgccccctgttgctgctactgtggttccaaacccttaccatctcctgcctgtatctctgccacagcctcctaatgcgtcacccagtctttactccatgccattctctgcatcctgagagctctttcttttttttttgaggtggagtctcactttgttgcccaggctggagtgcagtggcgcgatctcagctcactgcaacccccatctccgaggttcaagtaattctcctgcctcagcttcccaagtasctgggattacaggcacgcaccaccatgtgtggctaattcttttatttttagtagagacagggttttgccatgttggccaggatggtcttgaactcctgacctcaggtgatccaaccacctcggcctcccaaagtgctgggattacaggcgtgagccaccatgcctggccctgagagccctttctatgcagcaaatacttgcctaagattcttctggggctcctcagtgccctcaggatcaagttggtgctcctctgtggcatatgaggccctaagaggcctggccccttacctgcttctctaaattgggctcctgcctctcagtcccctcagcccctccagtctggccaggcttagcacttgcacttcccggaatggctatagacattattccgctatgcctcactaattcctacttaactgacagctctgtcaggtcatcaccacttttatgacctttctcggaccccataggctggatcagatgcctcctgaagaattacagacttcttcctctagacttggaggtgagggaccctctctggaatagagaaggtgttgggagtgtttgttgaatgawagagtgaatgaatgaagtccttcagtaaggatccctaagcagttactgtgtgcccartgtgatgccaggtgctgtgcaagctgagcctgggtagggatggggaggagtcctggggaggctgggaccagaactagggatatggactcaccttccacttgctcttggcaaagttcttcttgatctgctcactcaccgactggtggatattcttatctagagctgtatctcctgcaatcctaggatggggttatgtggtgggttgcctatgagggcagaagcagacctgagggccccaaatcccgccccagctcacaggttgtgtgaattctcaccatgggtgctgcaaggcctgctcacaggtgaatcttttctctgggtccttctccatcaagtgccggatgaaatctttggctaaacccccaagacaaaagcaaagataatgacagcatggtactgcctgtgtactccccaagagcatacccactccctcaggtctggcctggcatcaagacaaagaggccaaatcagtccatgccccaccccacccaacctatgctcttcttcaggccctcccaccccgtgccttccagctctttcctttctctcttaagaaaaacatatggccgggcacagtggctcatgtctgtaatcccagcactttgggaggccaatgcaggtggatcacgaggtcaggagttcaagaccagcctggccaagatggtgaaaccttgtttctactaaaaatacaaaaaaaattagccgggcatggtggtgggcgcctgtaatcccagctacttgggaggctgaggcagagaattgctcgaacccgggagacagaggttgcagtgagccgagattgtgccactgcactccagcctgggcaacagagcgagactgcgtctcaaaaaagaaagaaaaaaaaaaaaaagttgttcttgactaatctcagtgcattcacactgatgataaacgatagtagcttcacaggtttgcttcttaatagggggcacaaaaggaggatgaaaatgtttatggtggtgttttagacattagggtgtcaataggggagaggtattttcaaatagactatgtttgaagattgaacaaatgaatgcctagtttctcactctgggagccaagcagaaggaagtacccaagcagaaggaagaaggggtagggtgtctggtctcgaagacagctctttgtgtggtgctggaaaatccgacagaaggaaggcaggagggagaccgcccccaaagcaggtgagggaggaaccagaggcagggcccaggggaaaaaagcaaagccccaaataccagagtcagagatgtcgtcccagtaaggagagtcaaactcgtactcggccttcaaaatctgttcaaagagtttggcatcattctcgtcatagaagggagggtaaccgcagagcctgggcagggagaaactcatcctcatttccactttcgggtgccgttggctccggggtggagcactggggcagtctcaggggtcaggcaggagccatggaaggagttccccctttataaactctaccagccctgcctgctcactcctsttctagctacattatcctttctgttccttgwatgtgccgccatcttgccctcctcagggcctttgcacttgccattgcttctgcctatgccactctttccccacacctccaatgtctggctccctcaccactcggtcatcacctccacagcgagcccttccctgacctccctactgaaatggcatcaccccgtctccctattcctgcttggtttttctccacagtatttatttttatcacctgacgtcagtttgtagatttatttacttgttgattgtctgtcttccctactagaaagaaagtcagctccctgagggcaggcactttgtctggtttgtgctgtgctaaatttaccccagtgcttgcttggcacagtgcttgaaacatagtatctattgaatgaagtaatactggtaattgattggtggaaggaagggagggagggaaggaagggagggcagagggagagcagaggaaggaagagaggaaagtaggcgagaggacaactctggagccacagcctaccrtggccaagccccacttacaagatgtaggcgatgacacctatggaccagcaatccacagccttgctgtagggcttctgggccaggacttcaggggctgtggagggaagaggacgtggtggtgacaaatctctgcccttcaactcctggttccccccaccatcacagccccagcccagggccctccgcacccacgtatcccggagttccacaggcggtggagagcacactgcccgggtcctccatcttggagaggccaaagtcggagatcatgattttggagtcttcatccaggctgtagtacagcagattctctggcttgaaggkcaggagggaagagaaggggcaatcagagatggttrgaggctggtagaaccttctgccgctccaagcaccttctgagaaataatggatccccaaaagccactgtggcttcatggctgtcataagaaaatcaaggaagytctcaagaaggccaaaaattccaggaaggacaaggctcargagggtgtgggggggaactgtctctaaacctcaggtgtgcactgtaaagccctaaaggaatgtttgaatgcctattttatgccagaccctggattagtgcttgatttaatgccatcctcactgcttccctgctaggccagtctgtataatctcacctaacagatgaggwaactgatgcctttggaggcaaagtgactcacccaagaacccacagttaggcagtagcagagccagaattcaaaaccaggcatgtcacaccccaagtgcccttctcctagaacggattgagatgtactgctaaatgtgagccccgtcgctatttccgaggagtaggatttcggggatttctggcttttttctttatgttttgctgtcccatccaagttttctacagaaggggaataggattttttgtttttattttattttttttgacatggagtctcgctctgtcgtccaggctcgctctgtcgcccaggctggcgtgcaatggcacaatctcagcttgctgcaacctctgcctcccgggtccaagtgattcgcctgcctcagcctccctagtagctgggattacaggcatctgccaccacgccgggctaatttttgtatttttggtagagacagggttttgccaagctggtctcgaactgacctcaggtgatccacccgtctctgcctcctaaagtgctgggattacaggcgtgagccatcctgtctggccagatttttttttttttaatcagaaaaagacaaaatgttgtttggataaaatgccacacaattcactcgtgttcctttgagtatctggactagaatgggaggaggcagtttaaaggttacaagatccactttgtagatggaaatccaaggctcagtgagggggtgaaagttgcccaaggtcagacagtttggggtttgcaaaggccccacccctgggtaccctagctcaccacacccccttgagccccaccttgagatcccggtgtacaatgcccaggtcatgcaggtatttcacagcatccagcacctggaagatgaggcggctggcgtcccgctccgtgtagaagcctttttccacaatacggtcaaagagctccccacccgacaccctgcagcaggggatagggcagtctggcaaagagggttgggacagctgggagaggtgtgggggcagggcagaggttgggccactcacagctgcatgatgaggtagaggtggcccccactctcatagatgtcatccagggctacaatgttggggtgcttgatcctgaaaggagaaatgaggtggtttagccaggcatggcggtgtgcacctgtagtccaagctacttgggaacttgggaggctgaggcaggaggatcacttggccccagcagttcaaagctgcagtctgttatgattgcacctgtgactagccactgcactccagcctgggcaacagagtaagaccctgtctcaaaaaaaaaaaaaaaaaaacagcggtttagagctcaggacagctcagccacccccaacccccgaccactgcctacatacctgggtaggacaaaccaaggatctcgtccccaaagggaaaagctagcttaccatggtttattaccattttttggaaggtgagagagcagagggataaacactgggctctggcatacacagacctgggtccaaatcctgcccgtcacatgctatttgggtgcagatcttttcaccagtgagccactgcacccagcctgatacatacctcttaagagttttctggctaggcacagagactcacacctgtaatcccagcactttgggaggccaaggcaggcggatcacttgaggtcaggagttcgagaccagcctggccaacatggcgaaaacccatctctactaaaaatacaaaaattagccaggcatggtggcacatgcctgtaatcccagctatctgtgaggctgaggcaggagaattgcttaaacctgggaaacggaggttgcagtgagtcgagatcatgccattacactccagcctgggcaacaagagcaaaactccatctcaaaaaaaatatatatatatagttttctgtgtttacatgtttgtcagcctcccccaccagacataagctccccgaatccagaggctttgtcttgcttgccactgttcctccagcacctggtacagggtaggtgctagatttaatgtaacctctctgaacctcagtttcttcatctataaaatgaagccaatggtagtacttccctcaaagagttggagtgaggatcatgtgagataatgcaggtaaggtgcttggcacagtgcctggcacacggtaaatactcataagtgaaacaataatggtaattgattttttttttctttttttgagacggagttttactcttgttgctcaggctggagtgttgcccaggctggagtgcaatggcatgatcttggctcatcacaatttctgcctcctgggttcaagtgattcttctttctcagcctctcaagtagctgggattacaggcatgcgccaccatgtccagctaattttgtatttttagtagagacggagtttctccatgttggtcaggctggtttggaactccccacctcaggtgatctgcccacttcagcctctcaaagtgctgggattacaggcgtgagccactgcgcctggcgtttttgttttttttttgttttttttttttttttgagatggagttttgctcttgttgcctaggctggagtgtaatgcacggtgtgatctcggctcaccgcaacctccacctctcgggtttaagcaattctcctgcctcagcctcccaagtagctgggattacaggcatgtgccaccacgcctggctaattttgtatttttagtagagacagggtttctccgtgttggtcaggcgataattgatcttgatgatgaggaaggctcagctctgccacaaacttgccatgtgactgtatacaaatccctgtcctctctgggtcttattagaaatgctctgccaggagttgggtgtggtggctcatgcctagcactttgggaggccgaggcgggtggatcacctgaggtcaggagwtcgagaccagcctggccaacatggcgaaaccccatctctactaaaaatacaaaaattagccgggcgtggtggcaggtgcctgtaatcccagctactagggaggctgaagcaagagaattgcttgaacccaagaggcagaggttgcagtgagccaagattgcgtcactgcactccagccggggcaacagagtgagactccatctcaaaaaaaaaaaaaaaattatctgcccagggtggttggaagctcaggggagagattggaagtgattctctgtaagttttccagtgaggacaggaggtttcatatcagcatgagcaattcatagaccagttggttgtggatttagtctgggggtcagcagacagtcatttttaaacttgctgagtggttttaatatgtgaggggaacttgaggtaggtccagagacaacaccaactgagatatgtgggtccaagccatgttcaggatggatctttacacctgattgaacagttaaacccctgtgactaagcactggcacctccatcacatctgtcatgttaggccaggcacttgaaataaaggacttctgatgttccccacaaccctgccaagtggaaattgtgatcccyattttataaaggggcaatttaaggcttagagagtttaaatgatttgtccaaagcaggaaaggaggaggatgggagggccaaggcagggtcagcttggggcagggaaaggctgtggcccacgcacttgtgcaggacagcaatctcattctccatgctgccttccttgccctccagggcctccttggcaatgcatttgatggccaccagcttctgcgtcctcttatcttctgccaggatcacctccgagaaggcccccctatcgggagaggggattcacaaggtgaagaactggaaccccagcttccctccagcctctcctccattccctatgggttctgtgaccactgctggaccaaggacgtggatgaccctcccctagtcactcatccatcccctggctccagagatggtcacatgacccaggcctggccagtcaaagtagtctctcccctggccacagtaattggtcatgtgatgcaagccagcttactagcactttgagaatgagtctcctgttgagctggtaggatgtaagcctggagctaatggcgatcatctttgccaccacctggggagagcctgcttgggaatgaaattaacacaaaggaagtccaacctgagaaatggccaaatatatttcctgataacattatgtggccctctggatccagccatgcctgaggtctacccctgggcttttggattatgtgtacagttggttcatccctttttctgctaattcgagtcatggctaatttaacaccctttagaaccttaaagaaccatcagcatcacccgggaacttttttagaaatgcaaaatctctactgctttggatcctgggtcaaaaaaaagaaaaaaaaaagaaatgcaaaactttaggccctgccccagatttactaaatcaatctgcagtttaacaaaatcctcaggtgatttgtatgctcattgaactttaagaagcagtgttttagaacaggttcttaaaaaggaacaaataaactcatttaactaaagttaactgattaaagaggatttgctagggtattctttccacatctgtttgctttctctgggagaataagaagtcataagtcaaagaaaagcatctctcgtggtgaaatttcaatcctcagggataattagttactgtagtaacctcatcactggtttccagtcttgtccctctccaatttaccctccaagctgtggccagagtgactatcctgaattgcacacctgccaaaaagtcttaagtgtctcccggtggcctatgggacaatatccagcctccctggcctggcttccaaaaccctacacaaactgtcccactttcatctccagcccctttttccactctccccccagcctgtgattttaagctccatcacactctacctctctccacatagaaccatgcctctaagcctttgtttatgctattccttctgcctggaatgtccttcttcctctctgacaagtgcacacctacccatccttcagtccccagctctaatgccccattctccaggaagttttcccccaggcagaaggcacagctctctctgggctccacaaagccctcaatcccaaccttaattggagcacagcacacaccctgttgtcattttctgtaggtctgtctcttgcacatgtctgggatcaacttgaagggcagagaccaggtttgagttatttctgcattcccagcaccaagaacagagccatctccagcctcagttcccaaacctaggctagaacacytagctcttggcagcaagttaaatggactgactggcaccttcattctctcgacttctttctcttcaagaacccagggctattgggagagcagcccgtgtcccacccactgtcatccagaagtgaaaagctggggacagtttaggccctagatagtgctgccacagggcctgggctgtgggaaacaggaagcattaattgaccagaggaagccccaccctggactcagcctccctcagccatccagcacccaatcctgccctggactcacgtgcccagaacatctcggaagtcgtagatgtctctaatgtcctccgcctgcttccacctggggccttccactgcccccagcatggcccactgccccccgaccacagccagggctcctgtaaggagaatggaaggaggagactcagcagagcccagccctctgtctgggaatttactgcaggccccattcagtcattcaacctgcatttattcatccttgattcatccatttgacaaaatcattcaacaaacattcatttgtttattcaacattcagcaaattctcatgcctagagaaaaacctttcacagtggcagcaaaattctttatttaacaaagtcatgcattcattcattcatttattctagttctcttcccagttttccccctatccaaatccaagcacctagggaaaccctgacttctggcagtacaacagataaacccccagagcagctggtagaagcctggaggatccccctgtccccagaaccagtgatgtccccgccccaccctggggattgctggggtgtctcctttccctcctccttcccccgactccccggcctctccgaaatcaggtttccagcagcctgggcttccagcaacatctcagccacatttttaaatagctctttctgcactgttaccacagcaacaacagccacagctggagctccccagacctctccctcctgactccccatctgggtcccgggagcatgagaaatggtcctgctcactctgtcccttcctggccccatctaaccctatccagcctggcccttcctctgctgaggtctgtctcatccagcaggagagggtgggagttctctcccatttatcagatgaagaatggggagactgaggttggagttaggtagaggctggctccagaggccctaatgacacctggcctggggcccccagctaagcttgctgagggcaaaggccatcgaatggccttggctggtacttccaatatgaagccagaatgggccccattcagagaacacagcctcccaacccatccacagatgaggccaaaacagagcccagcatgctttgtgacctcagggagagcactttccttctctctttttctctaagggagaatgaggagaaggtgccctgactagggcctctggtgtgagattccactcctggaacaggacctttttcccaggggacyctgcccacccatccaggggcagaatcttctaggaaaggagactcgagtgtaagctctagaggcagagtctgaaacccacatggaggcctaccaaatacaaccctcacagatccacacacatccctgtagcagacatgccacaccaagccccctccacagccctgaactcaaacacctgcctcccagatccagtacgccttgtatccacatcccgtgacacctgatcatacatgtactcccagacatcagcacacatgtccacaccacacagtgccccagacagccctgcacccgaacacctgcctgtccatccaaacatccctcacccagctccctcttacaccccaaaacacacatccacccgcacccacacaagatgacacccagacacacacacacacaccctcatataccagacgtaccctacaccctccagctcctctaccccatcccctggaagctcctgtattccaaaccaaaccccaagtccttacacacctaactccaaacatcctcagtacacaattgtacaccccctcctaactctgacttaagaccctgagagccaaataccagcacacaaaacacgtggacacccctctggaacaaaaaacacacagattcccagatcctccacccatgtctgacccacacgcctgtcctaagacagtacactccgcaagcccccccaccccatggatacctccaaatgcccacgcccttccagtcaggcccagctgaaggcgctcacacaggcccccttctctattacccactcagtgtcccataggcccgcctggcacctgctgggcctgggacagaggtggagaaaggcccagccctgcccctcagggtccagcccgcccgggagagtgcccagtggccactccttgggaaaggatacccagaggctaggggctcccaccgcccccacgcagcgcccaggggtgcagggatggggggcccggctgtacctgcggctgccccgccgcggggctggctgggaggcccgcggtggttggcgccgagctgtggccgcggtcctcaccgctgcgtgcctgggccacccgcccgcgctcttgctggagctggggctcggctcggctcggcggctctctccgcccgcctgcggctctgatgtcagtggaggtggagcctgcggcggagggacccgggattgggaggcgaggcaccgctccaaggctggggaaggggcacgggtggaggccatctccctgcttctggtcagagatctcctgctggacgcttcccgcccttggtcttaagcggggtccatttcacagaggggacaactgaggcccggagagatgattttcaaatcagcgggtggtcggaagcaaagcaggattcgaaccccgtctgtctgaagctagaggccggccaaactcaccctgtggcctggtggattttctttcagaccagttctgcgacctcccttagggctctgtctcccttctccgtgccctgaagggaaacaggccctggaactgcacgggagtctggtgggggatgggggagtgagggagtggggaaggaccgggcaagactaggcaatgaagagagtggaggtggtcgcagggtgtgggccccacttgacaggtgggaagactgaggccccggttcctctgcaagatggagctgaggcttcagccccagacacttgctcctcagagcgggtggtggtgcctagaggtattgggggcagagggaattggggaggaggaagttaaatcgggatcctgaaggaaacaggccaaaaaggaccgaggtgtcacgtgactggcggggctccagagtttgatggctggggtccaggttaggggagagagcctgcaactaggacggcaggcaagaggccaaaggtcggtttgctcaaggccttccttgggaagaaatttggtgccgagtggaaagagggggcggggggagcaactcgcaggaattggggatggggctgaactgggggcagccggaggaggcacgttgcttgggaccccactccacctccaagggcctccaagtgccactccctactcctgaattcttgcatgttccagctggtgatggggagagaacagtgcttatgcccagctcatttcctttttctctttctttctttcttttttctttctttctcttcttctttttttctttttcttttttttttaagacagggtcttgctctgtcacccaggctggagtgcaatggcatgatcacggcccactgcagcctcaaactcctgggctcaagtcatcttcctacctcagcctcccatgtagatgggactacaggtgcgtgccaccacacctggcttttttattttttgtagagatggggatctcactatattgcccaggctggtctcaaactcctgggctcaagcaatcctccccaatcagcttcccaaggttctggaattacaggcatgagccactgcacctggccaatttattatgcccatcttacagatgagagaggaagatagctgaggttcctggaaaggctttggagtctaactgatcctggtcatgctttacctctccgaacctcagtttcttactcgggaacatgggaatattgaagattgactcagagttctgagaattctatgatataatgatatgaagtgcctagaacactattcaaaacatgagagctagactcagtgtaaactgagactcagagagaggacttgatttggccagggatgaggggttaagggatccatcttccaaatctcagtatctcagactccttagttcatggaaaaatacatttcctgctcagggctgagcccccactctcccctatacccaccaagcacacccactgagctaggggttcttttaccacaaattcctgttcatcttgatgacaacaccccctgggtgataagatgacctctgtcctttcgaggacttgtacaacttcttttttttttttttttttttttttttgagacagtctccctctgttgcccaggctggagtgcaatggtgccatctcgcctcactgcaacctccgcctcctgggttcaagcaattctcctgcctcagcctcccaagtatctgggactacaggcgtgaaccaacacgcccaactaatttttgtatttttagtagagatgggggtttcaccatgttggtcaggctggtctcgaactcctgacctcaggtgatccacctgcctcagcctcccaaagtgctggaattacaggcatgagctaccgcgcccagctgacttgtacagcttctatggtgtgctttacatttttcctgcttttgagcatttctgagaggcctcgtgttttcttttctttaacaaacacattatctttactttcttagtatttctattgaacaagtgatacatggtcattgcaggaaaattccataatgtattgaaaacacacacagactaactgatgagattctttcgcttcccaagtgacagaatgccaacctaaaccagcttcatccaagaggaatctatagttcacaatagctggcacaagattgcaggaaaaacaccagagattaggggcttggagactggaactggagatgtagtactcataggatttgctttctctgtcttccctcctctctccttgtcttgatttttcttcacacgttggcctctttttctctccagagtgaacttctagttggcaggaaacatggagtgaggcagccccagctttccaattaaacacagtggaaggaaagcatcctcccaatttcctatctcattctcagggaaggactctggctctgcttgagtgatagagtgacatgttcaccccttggcctccaaaactgttgccaggagaattagggtgctatattgagcaagtgk

SEQ ID NO: 94804 - DNA, 24183 bp, Homo sapiens
tttccatggattttaggtatttggttgctctgtgacctaggttctctgatggacccaagaagccatgaatttacagtttttcaagttttgtcctcgctgtgaggatgggatttatgtttttcccactgctatatctctgagctgtactcagaagtctgtttccttctgagtaaatgtagttgttacagtttttctaggaatatgtccatttcactcaaactaaaatataatggcatataattatgcacactatcttcttgtttttaatggccgtatcatttgtgctggtctttccttttcatttctgatcttaattattgattcgtttttactctgtcttaacattctcatcagaagcatgttggttcttttcaaagaaccgatttttttttaagttgtctctattgcaaattaatttcaatttcactgcttctacccttaggtttatatttcctttatttattttactatttttggtttattttgctgttctaatttcttgaggtgggtaattagccttcacattttatctgtatgttttattatgaacatttaaggaatggatttctcattagttcatgagttttatatttggtatatttgatatactgtaattcagactagtgtgagtattcaatatgattgtttctttggcctatgagtatgtttagaagttaatttttaaattttcagacatacggagtttttctatttttttcctttatttcgctggtcagaaaacatactctgtaccttttcaaacttttgtaaattgttttctttgattattaattcatgactttttaatatgtttaatgccttcttatcaattttaatcattacgttgttgaagcttaaagtggcttctcgctggcctgctggcagcaccttccacctggctcctctctcctctgacgtgaccccatcagtctttcatagtttacttggtttccagccaaatacaatgtcccagactcacctgatacatttccaatcctcagcccagaaacagcgatttctcctaagaaccctgttgcttctgtagaatacaagctgtgcttactatcaaattgctgttacttctaagcattttcagagtgtagggccaggatattggcatgttttaaacgaggagaaaactgtggtttcattgatttcttaaaaaatacaaatttagaattatagaggttatatttaacttttctgatttatatttttattttttctctgactttggacatcatagttgataacaacattcacaattttgttattcacttaattctataatatattcataataggtttgaaataacactgataatattactgaaaataagaaaaatctaatgatcttaaagatttctgtggtttttcttttatctttaaggtatatcacacagagaatgtgtagtgaaaattctatgtactaaggttacatggaatactttctttgttttatgtaattgttttaccaacttggtgtagagttagattcatttgttttcaatttttaggtgtgattctttattttttatgtttaattttgtttgtgtttatgtcctatcaatggtcagttttggtaaatgccctgtgtgtttgtaatgaatgtattttgcggtactgggtgcagtattctgtttaagttctatgtcaattttatttattgtgttattctagttttctatttccaattgatttttttggctggttgtattggtcactgaaagagatgtgttaatatttctatcataattgcagatttgcatatttctaccagtagaccttagtattttacctgtcctttagcaagtttatcaaagtttgcttgatgtattttgaggctatgtaaatgtggacttgttttatcttcatggacatgaaattttatcactagggagtcatcctgtttgtatgcagtattgctttttgtcttaaggtcacttttgtctgtcattgatattgccatgccagacctctctgattaatatttgaatgtgtatcattttctatatcctcatttgggttttaatcttgctgtaattctacatttttctttagacatctctcttattagagatcagaaattagttgaatatttttattttagtctgacacaattaaacttttatttggagctgtcagtcattcatatttcatgtaattcttgttagactgaagttgaacctgccatctgattatgtgcctgcttttaagtgtttcttttctttttctttacaatcttggcttctttttatggattcgactatttaaaaaaatcaatttctgttttttcctatgtcattctggagttacagagtctgattttatcttttaaaagtcatccttgaaattttaatgtaagtactgagtcccctgcagtctaaagttctgctctccgcctggattgtacaagtgcctcagggcaagcactgactctggccactccatcagatgcatcttctggatttttcttgtatttgatttctatctttttaaaactctaaaaatatcatgtatttgttttatacaatcaatattccttcagttttagcccaatatttatctttttgctttttattatttttcatatcttggagattctactcaggatcagttttcttctgcttgaagtacatgctttagtgatgtctgtttatggcagactctctgtttccaggcttcagtctcttcccggctctgaattctaatgtggcagttttctttcagcacacagtctgctgacttcactgctgtgatggggagggcttctgtcaggctttcttttctcctttattactaagaattttttgtttctttttttgttttctgcagttgaactatgtctctttctgagtgtctttttatttattattccagtttgtcgggcttctagaatgtgtgtgttcccaggtagtagttcttcaaatgttgcttctcctgtgttgtctcactcctctcatcctggaattccagctaaattcattaaaccttctcaaatgtgctgggtatctctttagtttgtacatttttgtctacttatgctgctatttggatactttcttctgatttattttcatatacacgaattctcttttcagctgtatctatggtgatactgtatttgatttaactttgtaaaaatcctcaatgagagggttcgtccaaataacatagatcatgattgttggaaattgtgagtctttgatcatatctttaaatatgttaaaaaatttttttatttggtttattctctttagggacacaagttatgtgtaatgcaaacttcttctgtcttactttcacatctcctgcatccatttccttctcattctttctactctctgttcattttaactgtgctcacttttcactccttttcttttcatgtccctcacaatgtttattttccttttagctgcttccagtttggacttaatattttctattttatctgccttaaaaaaaatctttgttaggtaatattttagctccttatatttccttatcatgtcttccttgagtacttttagttctctttttatgctctccatttatagaggtgattgtttcattggggtttttaactttataacaatatttttgggtcacaattttgacctatgctatagaaagtttttggtgttcctcctctaatttctttccctgttgaaaaagaaaaaaactcttttttattagaattttaaatgtagattctattgttgtttcttttttattattactcatctttgatggagatgagttcttattggctcaaggactcaagagaagttgctgtgagagcccgcatgcgactgcgctaacaatgtatcttagtggcataataacaatgtatcttagtggcacaatgctgtaggcagggatgaattcttatctttacccatcttcctttttgctttctctcctcccagggagccagtatagatgcaggactgctctcagatgcctcacaagcagcaacttcttcctccttatagttcttatctgtgattcttccataattttgtccttctaagcttctgatgcactgaattatgtaaagtgcattcccttcaccagcttgtgcaccctattctgtaactgataataaatggttggtattgcactatagagtatgcttcttacttaggagaaatttgtgctgttagtctttcctaaaatcttcgacaaagagcattctctctctacgttttttgaacccctgatagaccttcaatgcttttgcgcttcttcctcctcatttatattttgaagtttcagatgactcttagcttcacagaggatgttgtttgtgtttccatttctcagtccttattttgatttggaagatttccaggaggagaatgtcaagcccacagtacaattttaacaccagaagtcagtctttcctcttgaatacaaatggaaaattaaggatctgtatttatttaataaaatttcacaaagagaaaataattaaattacaaataaagaagaaaatggaaatcagggaacatggagttaattcaggcaacaaaatagagtagtaaaaaggcttattaatatgcatagagatatgaataagattatacctgaacaagagtgggctgttaagtaagagggacaatcagggaaccaaaaacaactctttgaaattaaaaatctaatatttgaaattaaaaattaaatatagaagttggaaggtaaagatgatcaaattccctaatattactattagtataagcccacaaaacagaaaagagacaagataaacgtcttataggagtattgtaggagacccaacatcttattaatactggttgcaaaaagagtggacaaagagcatggaggaaaggaaattgcaaataacataagaatttcctttaactgaagtatctatatgtccagatgaaaagtgtacctcaaatagtaagcacagtaagtgatgaaaaagacctaaattgtgaaattagcatcctacagagagaaaaaccacaggtttacatgccaagcaaaaacaattagaatggcataggattataaaatattggataataggaagcaatggcatatgcctttaaaatttgaggctaaatgaattttaacttagaattttatacccaattaataattttaaatattaattgtgttgatagccagacatttaaggactcagaatatttattttccactcatcttttctatggaagtgtttgaaggatgcaggaaatgagaaatgaaaccaaagtagaagagaacataggatctggaaaacatcataatccaaatccagggagcagctaacaaaagtcctaggttgacagatctttgggcttagagtgagacaatcttagagcagcagcatgccagaggactccaggagtgcagctgaaaatgcatgctgagtggctgacatatcacccagaagaagctcagctatgatcttccgttttaatatccatggcacagcaacagccaggcctactgtagaggaggtgtcaccttttaaaaacagaatctacgttattcagcagcactgaaaatgctaggctacaagtggaatgcaggtgtcaggctgaaagcctgtggcatctgagtttctacataaggaattgcggtcaggtcctcgtgtatccaaaacccattctttcaacaccagccttgggtgagacagggttgaaattgctgatggtgctttccgggtatagtagggaggcacatgaagctggagaccatggacgtttaggagtggaggaaccagagctgtgaatgacggccaagggccgtgggggaagaaatactggatcaaaacgggaaagctctgaattgggaaaaaggagaaacgcatgagttccttagttcccatctattgcattcaggttttctgatttttcttttttgttttttgccagacttagtatttgctttggtttgtttttagagagataagccccttctgattatggaatactgggtcggctggttcgacagatggggagataagcaccatgttaaagatgcaaagggtgagtgttttgcagtgtttgactccaggaagagatggccccaggtcccatgagaactcattcatacagttctctgctaattgattcacttgatcagccgtagatattcatgcaacttttcacatacaagcactcagccaggccctgaggatgctctggtggatagaaattayatggttcccacccccaacagagtataagttagtgaggtccacagatcattacagagtaaaacaatcaatatgtagttccatgtttggtggatactttgaagcaaacaaacagggtgcagtgatagaaaagacagaagaaagacctgcgcaggtaaggttaggtggtcaccgaagcttctctgaaaatgtgacatctctgaggaaggtggaacattaatcatctctagcagtgcataggccctctctatggcattgtcaactaagcactaataatagtcaggggacaacatgcagcgatagccaagagcatggatcttggagccaaagagatcaggttttaatctcagctctgcagcgctagccatgcgctagcttcatgcaggcttccttcattttaattctcagtgacctcatccaaacgtgaggattatcataaaaccaacctcatgaggctggtgtgaggatcaagtgctgccacttagagcaatgcctggcagtcgtttacttaataggcatttgtgtctacagaagatatttcgaaagagctgttatgaaaacaaggccacttgtatctgaagtatagaaaaacattgaaaaatacttgggaactgagaaaagcctgttttaggttgaaaaatagaaaaaaagtcaaaagaaaaatgccactattaccaccaataacaccacataataccatcactaccaccaacaataatgccagcaacaagacctgcagcatcatcacatcaccaccacaatcaccatcatcaccaacaccaccaccascaccamcaccaycaccatcatcaccatcaccactaccaccaccaccaccaccaccaccatcaccaccatcaccaccatcaccatcaccaccaccaccatcatcaccatcaccaccaccaccaccatcaccaccaccaccaccaccaccatgtccaccaccactaccaccaccatcaccatcaccatcacsaccaccaccaccaccatcaccatcaccatcatcaccatcacctccaccaccaccaccactatcaccaccatcaccatcaacaccatcaccaccatcatcaccaccaccaccaccaccaacaccaccaccaccactaccaaataaaacttttctggtctcttgtatggcaggcactgtgccttttttccacatatattacctcatcaatgaattttctcatcagtcccatgatatagctggaattaatacattcatttaacagatcaggaagcagtggcgttgagaaagaaaataggttgccccaggtcatacaaatagtaacgagcacagccagaattgactcccactctaaatgacttttaaccttcttcttcccactgtggccagtggagagatgattgcagctgtttaaacacagtacaaaatggaagttttgtggctaaagattaagagcaaccacttgtggactatggcggtgtttccaagtcagtgttcccagaaacatttyactggaaggtagtaatgagggtgtactaattatatgtrtgatttcaaaaaacttaaggaaaattagatatttaagtgacatgagggttcttaggttattatttaatagatgtagtttagagtcaaattatgtcaatattttggaaaaaaagtgttcaaaaatctcttgggattgacaagattcggtgtcctagagtagttctggccaattctgcctatttttttgttggaatctttgtagaggttgaatgataaaacatttgcagtaggtctttaacgtcatcaataggttcttggaaactaaacaaaatgatgtacagcatatcctcatataatactgttttcttcaacattgtttcattataaaattgagagaaaaattgtttttttttttatatcattttacttaaagtctccattcccaaraaygtatatagcygtgaagcgaggagttactgtaactgattgtggagtggggttggaaaggataagagtttgccaraggcttctgtctcctcttaatttctaacattctctgtgttctcatgttcccctttgcagaggttgaacatgctgtgtctgaattcatcaaatatgagatctccttcaatgtatatatgttccatggtggaaccaactttggtttcatgaacggggccacatatttcgggaagcactcgggcattgtcaccagctatggcaagtgtcgctggtgtagtagcctctccagcatgggcggtgctggggctttacagaggaggctccggaagcctgttctggcaccactgggttcttgacctataatctatgctgagtactgaagattttcctatctactttccttccttctgtatgttcataatgccccaacaggctgtcattgcagtagacagggctttccgggacttagagctccgcttcacacatctggtatactgccctgttggcttgaacctctgaagagaggcagggtaggaacggtgactgctgtaaaggcacagacctgcacggccgggcgatacagactgagcaaagaaaagagtacccgttgaaggggtgtccactcttttggcttccctgggccacactggaagaagaagaattgtcttgggccacacatgaaatacactaacactaatgatagctgatgagcttaaaaaaaaaacacaaaatgttttaagaaagtttatgaatttgtgttgggctgcattcaaagccatcctgggccgcctgtagcccatgagctgtgggttgaacaagtttgcattagaaagtgaagaagtgggggcaagcccagtgtcatggcttgacactggaagccagtggaaggtgcccaggaagagttgtggggaatgtccttagactggcatcacacacccacgtgggatggaaggtgtcttccttttgtctcactcacggtggccctggccatctcctgccagcggtgctgaaacagggcctcctgcagagactgcatggctggtgactggccctggtgtcttgcagactatgatgcagtgctcacggaggctggagattacacagaaaaatatctgaagcttcaaaaactctttcaatctgtctcaggtactcagcacccatttaacttacgggccagccctcctcatgtggagtctctgttctgtggaaaagtgaggaaggcgtgggtctcccttgtgggcagcagttacaccaagctcctgagaacaagggcaaccttaacttcgaaccctgggsttaaaatctgtgtgattttttaaaatcagggtttctaagcattttataagcctcagtttcttcactgaagcataaagrtagtaaccttggtctcctgtgatgactgcgaagattgagttactctttgtaaagctcttataccatggatgacatagtaacccccaatatgaaaggaaaagccatgctggataggcatggggggcttagagaaggcagtggtcatctcaggcactttttgccctgtgccccatctccattgcagcaactcccctgccccgagtacccaaacttcctcccaaggctgtgtatccccccgtgagaccgtcgctgtacctcccgctgtgggacgccctatcctacttaaatgaggtgcgtgctgcctggccacaggaggcggagtggccaytggagggatgggggagggattccttcaggaaactttttattaggaagtgggaaaacaaatcctctgcatttcattcaaatttagaactgtgggacaagagccaccagctccttccgggtggactgtgaaggggtttgaccttggagtcagtgtgcaggggaggggcagcaggacgtcggaggatcccgggttcccgcttagatgaacctgtctggagatgctcttgtttggactgygtggtccttacggaatccacgtaggaaaagctgctgagctggaatcgggagactagcttctgcccgtgcttcaccagcagctgggcctgaacttcctgggtcactgctcccccttttccatcagccttcctgtcctattttgaagaaaggtgaaagctgtttggaactgaaactgtagcccttggattcacattggttttacctctgctatcactattttagagaaaaggtagtgactggtacactaaagaaactacatttatttaatgtaactaaatttaatttaatgaaataaacatttgcttggtgcctcattcattgctagacttcaactattttagaatacaatttatttactcttttttttycttgagacagggtcttgcttggtggctgtggctggaatgcggtggcacaatcatggctcactgcagccttgaactcctgggctgaagcaatcctccggcctcagcctcttgagtagctgggattacaggagggcaccaccacgcccagctacatttttaagttttttgtagatgtgggtctcactatgttgcccaggctgctctcaaactcctggcctcaagtgatgcacctgctgcggcctcccaaagtgctgggattacaggcgtgagcccctgcgccccatccatttcctctgttaatcagttcttaggattataacgattgctccctcatcaccatgccctgcatttccctgagtttccttcctgggcagtggagacgtaagcacagagcagtgtcacatggcatctgtttcatcatttcccattygaagaacccttggggaccattaggcaggaccaaatgacagggtcttaggaaggaggatcctgactgctcagcccttggacttctgctcttgccatttctcctcatagccagtcaggtcgcgtcagcccgtcaacatggagaaccttcccataaacaatgggagcggccagtcctacgggcttgtcctgtatgagaagtccatctgctccggaggccgcctccgtgcccacgctcatgacrtggcacaggtagggccagcaggctgtctgtgtgggaagcaaagtgcatcacctccccatgctgtcgggcagggtagttgactgaaggatgcacgttgctgtttggtgacctactatatgggaggcattgggactaaaaagtcaggccaaatagacttgctttctgctttatcaccactgagagtctcttggggcctccaggcagcttcatgccatcagtgagcaccacagctggtccctgccttcatactgacctccttctcccraaaccgcggcctctcttctccctttcttcgggtgggcctagcagtctgacgccggctcttcttttgcaggtgtttttggatgagacaatgatagggattctgaatgagaataataaggacctgcacattcctgaactcagggtatgtaatttgagagtccaggtgatgccctcgacccccctcaaatgcagacggagcctggtcctgagacagtcrgcctcccttctccacccctgctgctggtgctgctgctcacctggggcggcggcaggaagtgtgcagggctggaagccaaagtgcctcccaggccctggcccctcaggagctacygcatgtgtgctggaggggaggggatttcctcaccaagtcctgagcctgtcctcagcccctggttgggtttctgtgccttttggagttggttaaaggtacagctgagtctctctgcctttcctagtaggatcagcagaggggaaagggaagattgactataggaacacaaggcagtccttaggtgaagggaagactgctgggccctggagcctcctgttctcccatgtgtctctccatgtgggactcagtgaaaaaacgggttgtygggtagacgccctccatggctgcgtggtctccatgacctggcctgtcccagcaggactgccgatacctgaggatcctggtggagaatcaaggacgagtcaatttttcatggcaaatacagaatgagcagaaaggtgggctctggctgtggcttctcctcagttgctcagaaccgaagacccgggctatgcactggagtcgggggcgggagagggyggggaaaccagccgctcagcagtgggctacccaggccctgggagcagagatgcaaaatcggcccctcgcccttgtcttgccttctctgatctccagggccagagggtggggccagtgtgttcggtgctggcttgtcctcaagcagggccagtctccttttgggaatttcaggaaaagttccagtactaagtgggggaactttcttggtagtgtggaaacatacagctagaacccttcagtcacagcaggtcagacaaatgtttgccctcctggctgtgcccctgtcctaaggcatgtacaagtctgcattgctttgtcccagatgctagagaatatccagtcctggctcatattctctttcctgcctcccatctgcatctgcaggaataactggatctgycagcatcaataactcttccctggagggctttaccatctattccctggagatgaaaatgagcttctttgagaggtatgctccagctggcccccagtgcacacttcagtgatcggggaactcagagatttcagattcctcattgcagataaagagtccaagatagagactgagtgatgtactccaggctgttgggtacttcggcgtcagaactagggccctggaacaagtgtcctgattctgatcttaacgcatctagtctactctatctcattgaaacagaaccttaggctyggcccacgccacctggggtgggtactgggaactgggttgggaaggggacttcttctcccccatggcttggcctttcttccaggctccgctctgccacctggaagcctgtcccagacagccaccagggcccggccttctactgtgggaccttgaaggctggcccttctcccaaggacaccttcctgagcctgctggtaggtgatgccctctgctgccctggtgttccaaacaccaattttatttttaaagagtcctgaagcaaagccagcgttcctggaggaatacttccctttcttcttttcctcttcttcctcatctccaaccaagccttccaacattgatcagtcttcctaatttatcactgttcagagaataacacatcaaagcacaattaaaaattcaaacaataacaagagggagagagcaaagcatgaagttcgcctttgaacccacccccattccaattagtctctgcttctcagaactcaacactgccaacagtggtacatttttatatataactttgcctgaacacacacgtacacaattatttttacactaatagaattgtacyatgtattctgaagcttgccttttttttctgtgtggggtgagttggtaagttagtttttacttagaatatctttttctgtataaatacacatagataacataaatgtacaaaatgtgaatgtacagatcaacaaatgatcacaaagtgaacaccatataattatcactgaaagttaaaaatattgttggcacccctcccaactgctgccttgacttctaacaccctaggccagtgtctcctattttgactttatgtaaatggaatcatacagggcatcttttttaaatatgttttcttttgttcaacattgtgaggttcagccatttatcgatgttgcagtgatttgttcattttcactgttgtattgggttcatttagtaaatacattataataatttatttaaccattttactttttctgaacatttggattatatctagggcttgtctatggtaaataattaagacttcgtttgtgtttatgttcataactgagatctctttgtcaggttttggtgccaatgtttagggmtctcataaaggatttaggaaggcgaatttgtgtaagacaagtatcacttcttaaacatttaatggagttcattagtgaagccttctagagctggcattttctttttgaaaaagtgtgtgagtgtggattcaattattgaaagattaaagtactattcagattttgtttcttttaaagttagctttgagaaaatatatttttctggaaattttcccatttcatctaaattttcaaatatattgcctttaaaatattcgtttttgatgtctagatcattggtagtaacgttccccttgtcatttgttacaggatatcgatgcactcttttttcttgataattctcaccagaacactatcaattttattaattgttcaaagtacagtgtttggctatgactcttactgtgttaagtatttattttctgattctgtcattatctttattattttgtttattcaatttcttagtttaggattaatttgctttatttttataatgtcttgacatagatacttagataatggactttcagtctttgttctttttaattatatgaatttaggttattaatcatcatttacgcrtggatttggttgcatcctctaagttttaaaaagattttttgaggtaaaattacataacataaaattagttctgttaaagtgaacgattaagtagtctttcatgccttcacaatgctatgcagcctctatctccagttccagcacattttcattatcctataaacattgggcaattacttctccattttccccttctcccaccgcctggcaacagcaatctttttattatctttatggatttgcctatattggaaatgactcccataccttttttttttttacacgtagaataagaataaatttawtgtatttattttmatgactgaagaattacattcttcaaagcaagaattcagaatgtacataattataagccatatttcatatcagtgcattatttttatattatactttctattatatgggtaatggttcatattgaaatacagaaaaaataagttgtaagacaagcgatgtctatataggaagagatgaatcattttagtgtcttattagttggataattgctgctttaaggttgccatgttagcctaacagtttaatcataactataaattctatctaaaaaataataaaggtttcataacaaacagctgatactaaaggtgagcacttcacctgtaggtgcttctctgaaggtgtcaagtagacttcggtatgtgcattttagaatgtcttaaagatgattttgtaaggagctggcaggcaaattaagcccaacaaaagagaaggtctgcaaattatcctgcaggttagggccaatcttcttgagtctgctaggaattataaaatacctactcttgctctttcacctctaagttttaagttggaattttacttttccttcatacggctgtgtggattgttgaaggtcacatgcttcacaagcacttgcccataatgacaacttccatgttttgggggacattgagaagcttccctgggtccagaactttgctatagtagggctgtgctttcttctcatattaaggcaaatagtgtagaccgaaggcgccatttggcaggtagtattcaacctgaggcactggatgtcctggaggcagtgtccagaaagctgcaggccactctgggggccatgttgttgccggggggaaacttgatgatctttaccaatcagtttatactttttgtggattcttggtactgtttaagttcctttcttttcaagttgaaggacttcctttagcacttcttgtaaagcaggtctagtggcgatgaactccctcagtttttgtctggaagtctttatctcttattcatttttgaaagacagttttgctggatgtagtattcttggttgccagttgatttttcttttagcattttaaatatatcggtccattccacgctagcctgcaaggtttctgctgaaaaatctgctgatagtcttataccctacaagtttctatcaattttatcatcatcatcaaagaattcaaatattttccaacttcctttgtcattacttgttagatttatggtttatttagaagtgcttttcttaatttccaagaatttggatattttagggttatcttttttatcagtttctttcttaaatgcattatagtctgagaagtttatgtgaagactagtttaatacaggatcaagcttgtaaatattctgaggtatacttgaaagaatatgtgtatactgtagatgttagatcaatgttctattatgtcaattagttcaattttgttaatcatcttcttttaaatgttttatgtctttattgattgttatttgctttgcctattgactattgaaaggttgtataaaaatttcccgctatggttgtaaatttatttatttctcttctgtcaatttcgctgatatgttttgaatctctgcttttatctttcttatgtatgttgtatatacatttttggtaaattaagaattttaccatcatgaaatgtccctctttatctctaataatgcttcttgccttaaagtattatttttctgaatattaacagagctatagcaacttccttttggttagggtttacatatcrttatccattgtttttcttttatttttccaatgccttatgtttttgatgcttctcttatatgtagcatataactactttatttgaaatcaagaccagcaacctttgccctttaatttgaagcatttcagagactccaattttatgtgctagactgttttgttatatcccagaataagcaggtgcctctagtggaaaaactgcctagatgtctccttgtctctccattttcttcttctagatcttgatcctgtaattcttcattatattgcaagcagatttttaaaaatgtgcagcttttatattaatagccactgtcagcagtggtgttcatcactattacctgatatttatttctggaagtagaagatctgctttttaaaatatataacattatatatcacataacaggaacaatagcagccttaccattaaagggttggttctatttatgcttttctctttcattcctagacagcaaggtagaagttctataacatatcccactctaaacycacctycatttgagtgccataaagtatctcaatcttgctctcactctccaagtgccttaggttttaccttgctaatgtgaaccaatttccaaatctcaagccaccattcctttcagaactggaattatggattygtgttcatcaatggacgtaaccttgggcgatattggaatattgggcctcagaaaacactgtaccttcctggagtttggcttcatccagaagacaatgaggtatgtcactccagtctctgccttgagatctcataaactttcagatcaaaatgtgagttgcagtgtctttttcaacctgtactaaataggcttcacctttcccactgtcaacctttcttttcttctcaggtcatcttgtttgagaagatgatgagtggctcagatatcaaatctacagacaagcccacgctgtaaaactgtgtctgaacattttttttttttttttgagatggagtctcactttgtcgcccaggctggagtgcagkggcacaatctctgctcactgcaagctcagcctctcgggttcacgccattctcctgcctcagcctccccagcagctgggactacaggtgcacgccaccacgcctggctaattttttgtatttttagtagagatggggtttcaccaagttagccaggatggtcccaatctcctgaccttgtgatctgctctcctcagcctcccaaagtactgggattacaggcgtgagccaccactcccggccgtgaacatattttttgggttgctggagttcatctataagtcatttttgaggaataagatttatgttaagactatcaaacacagtgttgcctacaatagcaaaaatgtgaaaataacaacaacaacaaaacagcagaggaattgttatgtattttgtagtctatctatatgatgcctatttttaggctttaaaaagtcttcaaaatctttaatgactgatttatctagttaaatgcttaatccttagcaggctcttattctttaattaaacgtgcctttgagtagatgtgaataaaataaaaacaagtttcatttctgcctcccatactcaattgaagggaagggaaaggtctgaagcctggggaagagtaaggatactgatttcctcatgccagagagagtattgcatgtactaatgggcaaactcacggtctccctcctctctctctctctctctctctctctgtgtatgtgtgtgtgtgtgtgtgtgtgtgtgcgcgcgcgtgcatgtgtgtgtgtgtatgtaggagtaggggaaaggagagggcaatgaacaatgtctttcatttcccttcaactatgtgtctacaaggtgaccctgcatgtcacatctaatcagagaaggaacagaaatttggtcatttgcttcagacacgtgtgacaacaaagctagcgcagggttctctgtgtcttcttactccctgtctatctggctatagtcaaggctactactgatagtgggtaggcattagtgagattagccacacacacatgaatattccaaccactatgaaaagccagtggagccatttgaaaaaaatggcaccattgggaaccaagcactttcttatatacaaaacacagcacttggcctaaattcaaaccaatgcactataagcaaatcttatcaccctgttaaatatagtgcctagggctttcaagtaatttagtaagtaatcttgtgtccagagggaagagaaccctctgtttggattggaatgaagataaagatgtcagattatcttctctcccactagtctgaatgactatttcaatggaggaaacttctgtgagatacctccacaattctacataaaactttattctctggggatctagcctcaaacctatgaactctatagaaactgcaatgtaaaggagggaagcagaactaataatcataatgatcttgagtacatattatatttcaggtgtaacatctgcaacatctaaacttaacaacaaccatgcaacatatccattttacagatgagaaaccaaggttcaaagaggtatttgaaatcatgtctctctgattggcacctcctctttcgctactaccttagttccacacgtatgccagtcttttccaaatatgaatgcaaaaatgctattcagaagatataatgctttcagtgcacttagagaaaaagagctcacaacttagaattctttacccagcaaaactattttacaagaaaaacaaaaaaaaaaaacaaaatatagaactttctgacaaacaaaaaccaagagagttatcatcaaaagatccccactaaatgatgttctgtagcggcctttctcaatgtcccataagagaattaaacactgcagaaagtgtcttcagtgactagtttctcattatatcatctggatgcatattagagacgttaactcattacatactgtggatgtcttggggcattacatcttcacgctctcagggaaccacagttgagaagaaatttctaaaagatatgccacgagcagatggaaagtctgacttttaagaaagaacgtggaatccaagaaggatgctgacatatgtgagagtgaatatggacaaacgttaactccatagaaatagagccaatgtctaacttgaggtagcatcagcataaaactctaagaccaggcaaaaacactgtgtaaagcgagagggatgtgatggccaaaaagtgatctaagatttctgtaattctcagatattaactttagactttgttgaatattcctagttaataaactaagcttaatgtttaaagaatatacatagagcttttaactttctaaaaaaattaggaggataaatagagtaagaaaaaacaaacaaacaaaatcctctaaccaataaaagacaaaagatagtagaagataaagaagtagaaaaataagtacaagtataaatcatgctgctataaagacacatgcacacgtatgtttattgtggcactattcacagtagcaaagacttggaaccaacccaaatgtctatcaatgatagactggattaagaaaatatggcacatatactccatggaatactatgcagccataaaaaaggaggagttcatgtcctttgtagggacatggatgaagctggaaaccatcattctcagcaaactatcgcaaggacagaaaaccagaccctgcatgctctcactcataggtgggaattgaacaatgagaacacatggacacaggaaggggaacatcacacactggggcctgtcatggggtggggggagttgggagggatagcattaggacatacacctaatgtaaatgaggagttaatgggtgccgcacaccaacatggcacatgtatacatatgtaacaaacctgcacgttgtgcacatgtaccctagaacttaaagtataataaaaaaaaaagtacaagtagaaacacatattaagacagtagaataaatacagatatatcagcaaccatagtaaattttataaatgcgctaaactctaaacggtaaaaattgtcagacattatttaaagaaaactataaatatttgagttttacaagagatacacctttaacataaagatgcaatgatcgaaagtccaaggataaaaaatatgctatgcaaattctaactgaaggaactatagtaactgtattaacatcaggcaagtagacttaaagacagaaggtgttactaggtatagagggttacccatagtaatggaaattcaattcctgagaaagatatactaattttgacttgtttttgtctgaaaatgtagcttcataatatgtaaagcaaacatttccagatctatatgtagaaatagaaaaataaaagtaccttgaacttgagaaacgtttgttctacttaaaaagttgagatacgattcatataccataaaatttttcaaaatgagttgtaaactcttttaaagtctacaattcagtagtttttagtaggatatattcacgagattgtaccagcatcatcaccatctgatctagaacattttcatcactccagatagcagcccttaacctgtcagtagttactcctgattcccctttccacccagcccctggcaactatgaatttactttctgtctctgtggatttgcctattctgaacattttacgaaagtggaatcgaatatgtgaccctttgtgtttggcttctttcatgtagcttaacgttttcaagcttcatggatgctgtagcatgtatattctatcctttttcatggctgaataatgttccattgtatggatacatagcattttgtttatccattcatcagtggatgattatttgagttgtttccactttttggatattatgaataatgctactatgaatattcatgcataagtttttgtgtggtcgtatgttttccattctcttggttatatacctggaagaggaattgctgggtcatacggtaattctgtgtttaacttttccataaagcattaaactgtttccaaagtggctgcagcactttacagttcccaccaacaaggtattaggtttctaagttcgccacatcctcaccaacacttgattttaagctctctttttgattacagccatcctagtgagtatgaaatgttatctcactgtggttttgatttgcatttccctaaaaacttgtcctcttaaacattgaatccaaacatgtaacaatgaagtcatgcaattggactttaagataacaaaaattggctgggcgcggtggcttatgcctgtaatcccagcactttgaaaggccaaggtgaatgcatcacctgaggtcaggcgtttgtgaccagcctggccaacgtggtgaaaccccgtctctactaaacacacacacatgcgtgcgcacacacacacacacgtacacacacacacacacacacaattagtcggcctggtggtgggtgcatgtaatcccagctacttgggaggctgaggcaggagaatcgcttgaacccgggaggcggagcttgcagtgagccgagatggcaccactgcactccagcctgggcgacagagcgagaccccgtctaaaaaaaaaaaaagtaatctcttaaattgtatgtgcatttcagctttcatttccacagaaaggtggtagtgtttttcatcaggtgtcatggaagaataacttctctctggccatatcaatggatttacttcttcagcacattccagcaaataaatcattagttgcttgtaaggcctgtgttgctgttattctctgcaaagtgtaatattaagcctttttttttcttttttgctgaagctttttaaaaagcatgttttagttgctattcaacctttctgaacgtcttgcataaagtaaagagacaagagagtttcaaaatcttttttatgtcgtgtactctgtttttggttgaagaggccctaccttatactgtgctgaaatttctttctaaatacagagctaaaagtcgtgaatgaagcaattacacatctgtaattcctaagccacttatggccttagccatgtttgttctttctttgccaatgataattgcatggcaactttatatcctaatttttcatttcataactatttcttgggttgctgtgctatactcagaaatcatggcaaagaataaaggagaagaattgttaaagttttcgttaatctaccataccaaacttaatctaccgtacccaactttaaggcaacttctatttgtttctgcatgcccaaatatctgatatacaagacatggatattttaataatatcactgattgatacacagtaaaatataattcaggaaaacatattttagtagcatgttttgtagaaggagctttgtacctcgaagtcataacttgggcagatttaaacaattctttggcagccaaaaaactactaaaaataccagcatatagcaattatcctgagaagctttttatttagtctctgcagactcaaagctataagaaattatcttttaaaagtgttattataaatctgtcttttgaagttggattagtgagaacataatgtgcctaatttttgccgaccactatcgttttttctttgtaccttgtctgttctttgttctgtctgagctgaaaatgatttatcatagatgtagctgcacataattttggagatttgccttctcatgaaatttgaggtggcaagaatccccaaagaagactttttcttcaaagattcatggcctgaatgatattaaataataacaataaatttggtataaaccacatttttataaaaaacacatgcatgttgtttagtgtaataaatggtactcatcaagcaattctaaaatgataaaaattgtgatataacataatctttattgtgttaatatatatttattacttatacatttaaatttataattcatatgatataaaatgtttacatattttatactacattttatattttaaaaacatattttctatacattgttggcttaaagaggatatcatattcttcccaaagttataaagttataaagctaatatatgctctccacattcacatgagctgtcaatctgtttccttaggtgcttcaacatttgaaaattcttaataattgtttttggacattaaatcaacagtttttataataatcagtaattgctttatttcactttaacctgctgataacattttaatgtttcactttatgttacatctcaaatgcatacttgcatttcaaagtgagtacagtcgtcctgcagcatccgtgggggaccagttccaccatctactatggataccgaaatccacaggtgctcaagtccctgatatgaaatgaggcagtatttgcatataatctatgcacgttcacttgtatcctttcaatcatcttgagattatttataatacttaatacaatgtaaatgctatgtaaatagggttatactgtattgttcagggaataatgacaggaaaaaagtttgtacatgttcagtacacatgtgttttctttgtagttttcttcgttttaatttaaaaatctatgggtacatagtaggtgtatatatttatg

SEQ ID NO: 94805 - DNA, 35988 bp, Homo sapiens
aggcaggagaatggcctgaacccaggaggtggagcttgcagtgagccgagatcacgccactgcactccagcctgggcgaaagagtgagactctgtctcaaagaaataataataaaaataaacaaaacaaaacaaaaaagaccagaagaggcaaggtaagtgggtttgagattacctagtttgaatttcagcaggctctggagcatagaggctgtcctgagtttttggtgcctggctcagggagcctgtgctcataaaggtgtggatggggtgtgggctctggattggctggtttacataggaaaggtgagtagttaactatctctagcatttggctatccctgggagggtcagtccctccagagtcatcgaggcccgcacttgtcaaagcagcagaagttcagaaaatacaaaggcatgattaatacaccaagcacacaagctgggggctgggtgcacagaactggcaagaggaatctgaaggcacctgggtgcgccaccagcactgtccactgcaggtggaaaagaacagtagaccaggctgggcgcagtgactcatgcctgtaatcccagcactttgggaggccgaggcgggcggatcacctgaggttgggagttcgagaccagcctgaccaacatggagaaaccccgcctctactaaaaatacaaaattagccgggtgtggtggtgcatgcctgtaatcccagctactcgggaggctgaggcaggagaatcacttgaatccgggaggcggaggttgtggtcagccgacatcacgccgctgcactccagtctcagcctcccaaagtactgggattacaggtgtgcaccaccatgcccagccatttctgcatttttttatagagacagggtttcactatgttgctcaggctggtcttgaactcctgaccccaagtgctcctcccacctcagcctcccaaagtgcagggattacaggcgtgagccaccacacctggcccagagacttttctgactgtatcactctccatatcaatgtgtccccatctctgcctgactcaggtcactctgtcctggttctgtcttcatatctcttctctgttctctgtctgatttgccctctggctgttctctcctccctatctctgtctccaactccctcctgccctttatccctgctgcatccgtcatccctgtcagtctctgcgctcatctctctgtgtctcgggcactcgtctttcagcttctgccaggccccccacctgcctccattgcaccttccgcatctcgcctgcatccagagtgggctctgttgagctgagggtgcacgtggtccctgcactgccccaaggagtcagggccaggaagccggcttggtggggtgcctgtctgaaccttcagcctaactgaaaggcttgcctcctgcactgccggcactgccgagcgcccaacacccaactcttctccaaagacttcatccctccctcctgcctcaggaaaaccagggctggaccaagggggatcagatggggaaccccaagcagcaccttccttctttcctctgatctcaacagaaggtggatatttacatcatgaggcctgaaaaagaccaccaacatcaaaataccaaaaattactaatttatattataaacgtactccctccccaaaaggatatagtcatgttcattgtgtagactggaaaaaatatttctcctcctccttcctctctttttccttctttccttcttcttcttttttttttgatggagttcactcttgttgcccaggctggagtgcaatggcatgatctcggctcaccgcaacctctgcctcctgggttcaagcgattctcctgcctcagcctcctgagtagctgggattacaggcatgcgccactacacttggctaattttgtatttttagtagagacagggtttctccacgttggtcaggctggtcttgaactcccaaccttaggtaatccactggtcttggcctcccacagtgctgggattacaggcgtgagtcaccacacctggcctccttcccctcccctccccttctttctttcttttttctttctttcttccttcctttctttctttcttttctttctttctttctttctttctttctttctttctttctttctttctttctttctttcctttctttctttgtctttctttctttctttccttccttccttccttctttgtttctttcttttctttctttctcttttctttctctcttttctctctctctctctcttgagtttcgctcttttgcccaggctggagtacagtggcgatatgtcagttcattgcaaacttcacctcctgggttcaagtgattctactgactcagcctcccgagtagctgggattacaggtgtgcaccaccacgcctggctaatttttgtatttttagcacagacagagtttcaccatgtcagccaggctggtctcaaactcctgatctgaagtgatccacccaccttggcctcccaaagtgctgggattacagatgtgagccatagcacctgcttgcctcaggatctaattgtatcttttcaattatcttttttttttttagacggagtctcgcgctactggcaggctggagtgcagtggcacaatctcggctcactgcaacctccacctcccggattcaagcagttctcctgcctcagcctcccgagtagctgggactacaggtgcgtgccaccacagcagctaatttttgtatttttagtagaggcagggtttcaccatgttggccaggatggtcttgatctcttgactttgtgatccacctgcctcggcctcccaaagtgctgggattacaggcgtgagccaccacgcctggcctgtatcttttcgatttttaaaaattttgttagtgatggtgtcttgctatgttgcgactttggaatgcagtggctatgcacaggtgtgattgtggctcactgaagccccaaactcctgggctcaattgatcctcccacttcagccttccgagtagctggtcctacagttgtattccactatacccagttagttttttattttttgtagagacaggatctccctatgttgcccaagctggtcttgaactcttgctctcaagtgaccctgccaccttggcctcccaaagtgttgggattacaggcgtgagccactgcacctggcctgtaccaattatattttgaagtgatttgttaatgccgtcttgagagcagggatcgtatctcctagattgctttctgatacatgataggtgcacagtatgtatttgtgggtagtctggagaaaatactgtaatattgagatctaaaaaatcgttgtaaaagttgccttgttcttttttttgaccaagtttcgctcttgttgcccaggctgcagtgcaatggtgtgatctcagctcactgcaacctccatctcccaggttcaagcgattcttctgtctcagcctccctagcagctgggattacaggcatgcaccaccacgcctagctaattttgtatttttagtagagacagggtttcactatgttggccaggctggtcttgaactcctaacctcaagtgatccatctgcctcagcttcccaaagtgctgggattacaggtgtgagccactgcacccagccaaagctgcctttttgatccagacttgtaataggattccatctactcttaagaattttttttttttttttgagatggagtctcactctgttgtccaggctagagtgcaatggtgtgatcctggctcactgcaacctctgcctccctggtgcaaacgattctcctgcttaagcctgccaagtagctgggactacaggtctgcaccaccacccctggctaatgttttgtatgtttagtagagacagggtttcactatgttgcccaggctagtctcgaactcctgacctcaggtgatccgcccgccttaccctcccaaagtgctgggattacagccaccatgcctggcctaagatgtattttggagttcatgtgatacttatgtaatacgctctcagagaaccttttctcccatccgcaaagtcataattgtgtttattcatttatttatttataagagtcagggtatcactacgtcgtccaggccgcagtgcagtggctattcgcaagtccaatcacggtgcactatattccctaactcctggcatcaagcaatcctcccacctcagcctccctggtagctgggaatacccaactccatgactgtatgcacactggtgattaaaaaaaattattcctttgatgactgtgtaatggttacaaatgtatcctctgagagggaaggctgctgtggggggtttcactgcctgacatgtaacacatgtgctgcaaacatttactgaaagaatgaacggaacgccctgaagttcactgagccaggctggtctctcagttctagcaatgatcatcccaggccctagaaagccaggattgaagaggcaggacctatggacttggatgcatgccagctacaagccaatatggcacatttgtgcaaactggaaaaaggctccacttccagatggactaactagaaaacagtgagctctagggccgggcgcagtggctaacacctgtaatcccagcagtttgggaggccgaggaaggcggatcatgaggtcaggagtttgagaccagcctgaccaacatggtaaaactccatttccactaaacgtataaaaattagctgggcgtggtggcacgcacctgtaatcctagctactcgggaggctgaggcaggagaatcgcttgaacctgggaggcggaggctgcagtgagccaagatcatgccactgcactccagcctgggggatgcagcaagactccatctcaaaaaaaaaaaaaaaaagaaaagaaaaagaaaagaaaacagtgagctctctgggtggacacaatgccaaggacacctggtttgatgagtagactgtgggtctgtttaaaccccacttgccttcttaaccaggggacttcctgcagtgaacaacctacacaacccctcagggcatctctgttgtctactctaaagccatttccccttttcaccttggtaacaccaccctaattttctgcaagctgcatgtccttcagaggtggctgatcaacttctcagctgcagaatctgaggctaaactaatcccagaagtctcatttcttttgcctcctatcgggtcacatgggtatgtgacaattcctacccatcggagttggggggaaattgctggaaggcttaggaaggtttcattcattcttcaaaagggaccaagacaagaacgagcctctttctgctgtttttgaaaggaattatctgcatgtgatggctggatgtgtagcagcccttttgggaccatgggatgatacagctaagaaatggtagcacagcatgtgaagatggatggagctcaggtgactgatgactttgtggagccgctaaattaactgaccctggacctgggccacttctggtcttatgtgatatgcatgattatggtctttgaacccattcatttctttttcttttcttttttttttttttttttttgagatggagtcttgctgtgtcacccagactggagtgcagcggcaccatcttggctcactgcaacctccgcctcctgggttcaagtgattctcttgcctcagcctcccgagtagctgggattacaggtgtgcaccaccacgcctggctaatttttgtatttttagtcgagatggggtttcaccatgttggccaggctagtcttgaactcctgacctcaagtgatccacccaccctggcctcccaaagtgcgagcattacaggcatgagccaccacgccaggccactgttcactgagatttctgttacttgcagcccaacgcatcttcacagaagagagatgggtcctgctcatggaaccatgtgcttctcatgcccgggcactcatcttgagggaggcagagaaggagaaaaggtctcaaagaatgggccagcattagtgcttgagtaagggggacaggtctgcggcaatcccygtccactccggcaggaaggctgcctctggcttaaagattttgaggaaaggggagtcggggagggtgtaattggccaggtagatggtgtctccgcccgtgaggtatgcggcycagatcccgaacgtcccaatggtcatgatggtgtggttacactgtgtgagtagagcaaaatctttggcaggtgagccctcaatgccatcgccagcaaacaccacatcacygtgggaggtgtcaatgttctcccgacaccaggccatgccattactggtgaccacgaagatgagggagctgtagcgagctcrgaaccagtccagggcctgctgtaggtatcrccggtcggccaccacccccttccacacttttggcatgacatggacatagtcccctcrgcgaacatggacmcctacaaaggtgcccggccggctcccgttcacctgcaggccccgcaggaacttctgggcctcctcccgcacgtggtyrtgcagggtgaactcctggaggatctcctggcggaggtggtggtagaaggtyyaggagcaggggtagccggtgaagcggacgtactcccccgggawgtggcrgtaytcctcctccatccagtcrttcaggtggtagttctgccaggggatcctgctggccgtggcrctgtgcagcaccggcagggtgattctgaagatgggggccagggtgctgtgcatctgggccgggatgaaggcgggccgcccgttcatcttggccagggcrtacagtgtggcgtactcgcccatctggttccccaggcggcctatygcattgatcgtccacatccccctgagctggctgggtcccagtgcctttgatgttgaggctagcactggtatctgcaccggtaactcccacatggcttgaatcttcgctagccgctgctgaacgtgaaatayagtggaaaccgtaaagacaaagaggatgaagtgggccatgggaaaggagaaaggcatctgaacgaccagcatggctgtcaggggaggaaaacgggacacgttagctgggagatrgaggcccggggcrctggtgaacgtggscatgcggtggtgtgcaggcatagtgtgggtgtgtgtstgcttctacttcaggtgtgtaaatacttggcacatacttgcctatgtgcacaggcatgtatctcaagtgtgtttatacagatgtgtctacattgtgttcatasgtgggtgtgtgtacacaggtagatgcgtacacattgtgtgtaatgtggatatggggatccatacattgtatacatatacaggtgtgtgcaaaattgtgtgtgtacatatacagctgtgtacaaatggacatgtgtacatggtagtgtatgggtagagatatatcgtgtacatgtaagggtatatgtgtaagtatgtatacacatacatatgtcatctaggtgattgtgaacacagcatgtgtgtatatgtgaatgtgtatacatatatatgtatatatatacactttgtgtatctatacattgtatgcattttttgtttattaattttttatttattttttgagacaggatcttgctctgccacctgggctggagtgcagtggtgagaacgtggctcactgtagccttgacctcctaggctcaagcaatcctcctgccttagcctcccgagtagttgggactacaggtgcacatcaccacgcccagctaactaaaaacaaattctcttttgtagagataaggtctcagtatgttggtcaggctggtctcaaactcctaggcccaagtgatcttcccaccttggcctcccaaagtgctcagattataggcgtgagccactgcacctggcccacatggtatgtttaaatgtgggtgtttatcgactgagtgtacatatgtgggtgtccacatatggtgagtacaagtatatgtagctattatttactggtgatccagtttgtagagatgttctttttttttgaaatggaatctctgtcacccaggctggagtgcaatggcacgatctctgctcactgcaacctctgcctcccaggttcaagctatactcctgtctcagcctcctgagtagctgggattacaggcgcccgccaccacgcctggctaacttttgtatttttagtagagacggggtttcaccatgttggtcaggctagtctcgaactcctgacctcgtgatctttctgcctcagcctcgcaaagtgctgggattacagatgtgagccaccgcgcccggcccaagatgttcatcttttgtttttattttcctacttgccagagtccagtgccagagatattcatctttgcatgtcctgcctgtatccactttgaagggaaattgtccacctggcctgcctgccctcctggccgcagccagttgaacttgagaggaacacccagctccaccgtggacttcccattcatcggccatggcctatgacaagtgtaggctggctctaaaagatgagttgtggccgggcgcggtggctcacgcctgtaatcccagcactttgggaggccgaggtgggcagattagctgaggtcaggagctggagaccaacctggccaacatgacaaggccctgtctctactaaaaatacaaaaattagccaggtgtggtggcggacgcccgtaatcccagctactcgggaggctgaggcaggagaattgcttgaactcgggaggctgaggcaggagaattgcttgaacccgggaggcggaggctgcagtgagccaagatcatgccactgcactccagcctgggggacacagcaagactccatttcaaaaaaagaaaagaaaagaaaagaaaatagtgagctctctgggtggacacaatgccaaggacacctggtttgatgagtagactgtgggtctgtttaaaccccgcttaccttcttgaccaggggacttcgtgcagtgaacaacctacacaacccctcagggcatccctgttgtctactctaaagccatttccccttttctccttggtaacaccaccctaattttctgcaagctgcttgtccttcagaggtggctgatcaacttctcagctgcagaatctgaggctaaactaatcccagaagtctcatttcttttgcctcctatcgggccacatggttatgtgacaattcctacccatcggagttgtggggggagttgctggaaggcttaggaaggtttcattcattcttcaaaagggaccaagacaagaacgagcctctttctgctgtttttgaaagaaattatctgcatgtgatggctggatgtgtagcagcccttttgggaccgtgagatgatacagctaagaaatggtagctggctgggcgcggtggctcacgcctgtaatcccagcactttgggaggccaaggcgggcggatcatgaggtcaggagatcgagaccatcctggctaacacggtgaaaccccgtctctactaaaaatatatataaaaaaattagccgggtgtggtggtgggcgcctatagtcccagctactcaggaggttgaggcaggagaatggcatgaacctgggaggcgcaacttgcggtgagccgagatcgcgccactgcactccagcctgggagacagagcgagactccgtctcaaaaaaaaaaataaaataaaataaatggtagcacagcatgtgaagatggatggagctcaggtgactgatgactttgtggagccgctaaattaactgaccctggtccgcttgcagtcttgtgtgatatgtatgattatggtctttgaaccagttcacttcttttccttttcttttttttttttttttttttttgagatggagtcttgctctgtcacccaggctggagtgcagtggcgccatcttggcttactgcaacctccgcctcctgggttcaagcaattctcttgcctcagcctcctgagtagctgggattacaggtgtgcaccaccacacctggctaatttttgtatttttagtcggacggggttttaccatgttgaccaggctggtctcaaactcctgacctcaagtgatccacccacctcagcctcccaaagtgctgggattacaggcgtgagccaccatgcctggcctcacaaattctagataaagctcctttctcatcactacaaaagtatatcctttcactaagtccaacacagaatgctggactcgatgactcaaagacacatcaccaccagtggctaggtgcacaagctctggccaatttcagactcacagtcacgagctgtgtgattttgggcaagtgacatcacctctctgaggattaaaacagtgtctggcacatatacacaggcggtaaatgtttgctattgtcacccacaaggcaaagaatgctgttcgttttaggctctgggtgaagaacccaggtttcccagttttgatactgggagtattgatagtggtcaaatgtagcgtttaaaccatagmtcatagaacgggaggtagccgggcacagtggctcacgcctgtaatgccagaacttccagaagccaaagtgggtggatcacctgaggtcagcagttcgagaccagtctggccaacatagtgaaaccccttctctactaaaaatacaaaaattagctgggcatggtggcgcgcacctgtaatcccagctactggggaggttgaggcaggagaatcacttgatcatggaaggcagagattgcagtcagtaagctaagatcgcgccactgcactccagcctgggcgacagagtaaaactccatctaaaaacaaaacaaaacaaaaaacccacccaggtttccctgtttctttaggccttcatttctgaaggctcccatgtcaacacttgccttaaatacatttgttatgcttgtgtctgttaaccttttactgtaggtgccccagctgcaaactttgtgataggtgaggaaaagatgctactttttctcacctatggaaggaaggaaggaaggaagggagggagggagggagggaagggacagagatgataaaagggacagaggaagagacaaatagagaaaaagaccagaagacacagagagaggcaggactagagagacagggagaatgaaacagacagggaccaggcatgatggctcacacatgtaatgctagcactttgggaggctgagctgggaggattgcttgagttcaggagttcgagatcagcctggaccacatagtgagaacttgtctctattttagagaaaattaggccaggcgcagtggctcacgcctgtaattccagcactttgggaggccaagcgggggcggatcacctgaggtcaggagtttgaaagcagcctgaccaacatggagaaaccccgtcgctactaaaaatacaaaaattagccaggcgtggtggcacatgcctgtaatcacagctactcaggaggctgaggcaggagaaccacttgaacctgggagatggaggttgtggtgagctgcgattgtgccattacactacagctgcactccagcctgggcgacagagtcaggctctatcttaaaaaaaaagaaaaaagaaaagcagaatgttctacacggatgtccctgcctccttggtagctccctacctccttacccaggaaggaggaaggtggctgctgagtggcccagagcaggaagctgggcactgaccttgactggagcctggaaggagagaaggaagaggtggggaggcctcacagagcaagctgcgctatgagattgtgaatttttgaggtttggcgagatgccctgcacggcatgatcaggaaccttttatgtgctgtgtgactttaacccagggcttttacctctctgtgtttcattgtccttgtctgtccatcaacagggggttgtggggagggataaaaacaacacctccccagaggtttcagtgagctgagatcacaccattgcactccagcctgcacaacacagtgagactccgtctcaaaaaaaaaaaaaaaaaaaaaaaagagccagtgcagtggctcatgcctgtaatcccarcactttggtaggctgaggcgggtggatcacctgaggtcaggagttcgagaccagcctgactaatatggtgaaaccccatttctactaaatacaaaaaattagccaggcatggtggctcatgactgtaatctcagctacttgggaggctgaggaaggagaatcgcttgaacctgggaggcggaggttgcagtgagccgagattgtaccattgcatgccagcctgggcaacaagagcaaaaatccatctcaaaaagatacaacaacaacaacaaaccacacctcccttagggctgcgtgggcacaaagggaaatgctgtattacatgggctgtccctggtattcagagcagaatttgtgccccaaactcacacttatgtcaggcttgaaccaagcaccactcccattctgcctgaaggcattattttttttgaattgctttttttgtagggatggtggggagggggtcttgctatgtggcccacactgatctcaaactcctggcctcaggaggtcctctgttctccttcctcagcctcccaaagtgctgggattacaggcatgagacaccacacctggtctatcttactgagattttttttttttttttttttttttgagacggagttttgctcttgttccccaggctggagtgcaatggcacaatctcggctcaccacaacctccgcctcccgggttcaaacgattctcctgcctcagcctcccgagtagctgggattacaggcatgcaccaccacgcctggctaattttgtatttttagtagagacggggtttctccatgttggccagactggtctygaactcctgacctcaagtgatccgcctgtctcggcctcccaaagtgctgggattacaggcgtcagccaccacgtccagccccgtccacgtctttctattgcggcccggcttcctcctctcccctctgtcccctacacccagcgccggccctgccccttcccagctcgcagccccttcagggctccctatgcctcttaagacacaatcccagtctctcgccggccccgcacacccctccggctttgtcaccagctgttcccgtgaaataacccagctctccgctcacccggggccccgtcctgtcccccagctctgaaagcctttctctaccccaaccgccccgtgccccgggcagctcagcacatccggctcagtcgcaccccactgcctcgagctcgctgtcttcctgcacctccccgggattcccggattcccggcattatcacttccaccctggggaggagaagggagcttcagacaataacktagggccatcacttggaaaccccacctttattctccgacccagaacagaagcggtgattcagagcgggattagggagtgcaggagggacggagccgccctccctgggcgasggcagggctcggaggtgagaccagcagtttgggttccatgaagcctctgaggagccccagggtggaggcaggaaagtcgggtcaccaccagctgtgcgcgagccatctgcaccattactgccagggtggttcatagaaactgctgaggggaaggagacaaggaaggacctggtggcccggggtggagaaggggagggagctggtggttggagctctagaaacagatccacctggaaggaagtggggagggagctaaggagggcggctggctggggaggggggtcctggctgccgagggagggaccctcctctcctggaggtcctgagttgggggtgcctcccagagggcaccagggacccacgagggcacrcaggtccacgtcccaaatccctgctctccgcctgggcgtgtgtgcagaggtgtgcgtgttgtagggtgggagaggagccccctcaccttctctcacctggtcctgctgaaggaaaccgggacagagtggttgggcaggcacctcagtgttccctctgggtctctcttcactcagggccaaagaaacccttccagcatcggtgactggcaaaccccgcccaggagctacagggctttccagagcaggtgtggctgggctgcgggagggaggtgagcccgtagcccctcctccctccccattgccggccacamagtccatcttgttatctacccttagctcctccacctgcaccaggcaccccaagcctggccataagggtgggggagagaggcaggacaaggtcgcatcccccatccgggtccccgrgggtcttccttggggaactgttgtgatgccccaacagaaaggggcccccactctgctccgctcctccaggcagccaggaaggcctccaggaaggcagcatggaggcgggggacagagtcctgctaggccaggctctcgctgactctgagtcccctcagagtcttatatttatttattaattaattattagtagtattactttttgagagagttttgctcttgttgcccaggctggagtgcaatggcgtgatctcagctcactgcaaccgccgcctcacaagttcaagggattctcctgcctcagcttcccaaagtgctgggattacagacgtgagccacctcgccctgcctatttcaaaaaaatttttaaatacaaatgggcccggtgtggtgactcacacctgtaattctagcactttgggaggccgaggcaggcggatcaactgaggtcaggagtcagagaccagcctggccaacaaggtgaaaccccgtccttataagaatacagaaattagccatggcccagcacagtggctcatgcctgtaatcccagcactttgggaggccgaggcaggtggatcacctgaggtcaggagtttgagaccagtctggccaacatggtgaaaccctgtctctactaaaaatgcaaaaatcagtggggcgtggtggcrtgcacctgtaatcccagctacttgggaggctgaggcaggagaatcgcttgaacttgggaggcggaggttgcagtaaactgagattacaccattgcactccagcctgggaaacaagagcaaaactctgtctcaaaaaaaaaaaagatggatgaggaattttactgagagaagaggcaggcaccaccagagctcccagcagtcctaacaggaggaaagagaaaccagcagccactccccagcttcagctaagcagcaggaggctacctaccagctacggagctcccttcaaacaaacaaacaaaaaaatcagatcaagcttcccactctaaccaccagtttgcagaaaacaggaggacaaagttcccagtgaaacgacaccatgaggcagcaatcagcccagtccagaatgtgagcccgtccacaggacaaacgacctgtttccctgtgattcagcgacaaggaaaaaagaaacagggtggggcggggaagtggggaggtgagctgtcataaaatatgcaaaacaggccaggtgtggtggctcacgcctgtaatcccagcactttgggaggctgagtcgggcggatcacgaggtcaggagattgagaccatcctggctaatacagtgaaaccccgtctctactaaaaatatatatawaaaaaaaattagccgggcgtggtggtgggtgcctgtagtcccagctacttgggaggctgaggcaggagaatggcgtgaaccccgggggcggagcttgcagtgagccgaggtcacaccactgcactccagcctgggcgacagagcaagactccctctcaaaaaaaaaaaaaaaaaaaaaacgcaaaacagatttggggctcagaggcttagactttccaactccatgaatgtcccacagatgttccaaagtcatgggaatgacctgggcgcagtggctcatgcctgcaatcccagcactttgggaggccgaggcaggaggatcacctgaggtcaggagtttgagaccagcctagccaacatttttttttagtgaaactccatctctactaaaaatacaaaattagctgggcatggtggtgcacgcctgtaatcccagctactcaggaggctaggggaggagaattccttgaacctgggaggcagaggttgcagtgagccgagatggtaccactgcactccagcctgggtgacagagcaagactctgtctcaaaaataaaacaaagtcctgagaatgcaggacaaaccttcattgcgtaacttttattgtcgctgaccccagccgcgtaaacgctgtggtagcatcctaggacctccactgtgacaactaaaaacaacccccacagattcccataactcccccagggggacagcactccggaattcaggactgttgccctaaaccctctgttttccatttcagctttcccttactggtgcacgcccccatgcttggccaccacggccaatttcaagctaccaataagagatcattgaacatggaattggaaagaaacgcacagtaatacattgttctatagtaagtcttcttactatggtaaacacttaccagccagttctctggagaaaaaaacacactgtatgttagtatctgccaatctgtgtgccaatcaatgtatgtgctcactgcaacctccgcctcctgggctcaaatgagtctcctgccttggcctcctgagtagctgggactacaggtgcccgtcaccacactcagttaattttgtgtttttttgtagagatggggtctcactatgttacccaggctggcctcgaactcctgagctcaaagcgatcctcctgcctcagcctcccaaagtgctgggattacaggtatgaaccatcttgcctggcctatttacatttattatgtctgtgtaataggcttgctatagaacaatgtaatactgtgcatttctttccaattgcatgttcaatgatctcatattggtagcttgaaattggccgtggtggccaggcatggaggcatgcacctgtaatctcagctactcaggaggctgaggcaggagcatagcttgaagccagaagttaaagaccagcctgggcaacatagcaagaccttgtctctctacaaaaaataaagaaaattagccagacatggtggcacatgtctgtagtcccagctacttgagaggctgaggcaagaggagcccaggaggtccagcgtcagctatgatcctgacgctgcactccagcctgagtgacagagaaagaccctgcctctgaaaaattaaaaaataaatctgggcacagttgttcacgcctgtaatctcagcactttgggaagctgaggcaggcagattgcttgagaccgggagttcgagaccagcctggctaacatgctgtaacccagtctctactaaaaatacaaaaattacctgggtgtggtggtgcacacctgtagtcccagctactcgggaagctgaggcatgagaattgcttgaacctgggaggtggaggttgcagtgagctgagatcacgccactgcactccagcctgggtgacagaacgagactccatctcaagaaaaaaataagaaaagtttttttaaacacaagtgtgtgagggtggctgtccagggacacaaggacaccgaagaatggtgatcagtgcttccagtatggggaaaagtggaactcatttatacaggtaaaaatggagaggtcaaacgcagtggctaatgcctgtaatcccagcactttgggaggccaaggcaggtagatcgtttgaggtcacgagtttgagaccagcctggtcaacatagtgaagccctgtctctactaaaaaaaaaaaaatacaaaaattagctggctgtgtggtggtgagcacctgtaatctcagctacctgggaggctgaggcagaagaattgcttgaacctgggaggcagaggcrgggtggggtggaggtttcagtgttccgagatcgcaccactgcactccagcctgggcaaaagagcaagactctgtctaaaacaaacaaacaaacaaaacaaacaaaaaaccaacaacaacaacaacaaaaaatggagatcgtgagcagaatgacagcattttgcatacaaaggctaacatacagttataagattagattgacagttataaaagattagattaggtgcagtggctcacacctgtaatcccagcactttgagagggtggcgggctgatcatgaggtcaggagtttgagaacagcctggccaaccctggtgaaatcctgtctctactagatacaaaaaattagccgggcatggtggctgtgcctgtaatcccagctactcgggaggctgaagcagaattgcttgaacctgggaggcagaggttgcactgagccaatatcgtgccattgcactccagcctgggtgacagggtgagactccatctcaaaaaacaaaacgaaaaaaaggccgggcacggtggctcacgcctataatcccacccagcactttgggaggctgaggtgggcggatcatgaggtcaagagatcgagaccgtcgtggctaacatggtgaaacccccatctctactaaaaatttaaaaaaaatttttttaaattagctgggcatggtggcgggcacctgtagtcccagctactcgggaggctgaggcaggagaatggcgtgaacccgggaggcagagctttcagtgagctgagatcacgccactgcactccagcctgggcgacagagcgagactccgtctcaaaaagaaaaaaaattgtaggccgggcacagtggctcatgcctgtaatcccagcactttgggaggccgaggtgggcagattatgaagtcaggagatcgagaccatcctggctaacatggtgaaaccccgtctctactaaaactacaaaaagtagccaggcgtggtggtgggcgcctgtagtcccacctactcaggaggcttaggcagaagaatggtgtgaacccgggaggtagagcttgcagtgagccaagatcgagccacttgcactccagcctgggctacagagcgagacttgtctcaaaaaaaaaaaaaaaaaaaagaaaaagaaaaaagaaagaaatttactctttctggacgggcggggtgaggtggctcacgcctataatcmcagcactttgggaggccgaggcaggtgaatcatgtgagggctgaagttcgagagcagcctgggcaacatagtaaaaccctgtgcctacaaaaaatgcaaaaattagctgggcatggtggtgcacatctgtaatcccatctattcagaaggctgaggaatgagaatcacttgagcccaggaggcagaggttgcagtgagctgagatcgcaccactgcactccagcctgggtgacagggcaagactcggtctcaaaaaaaatgtttttaaaggcctggcacggtggctcatgcctgtaatcccagcactttgggaggccgaggcaggcggatcacctgaggtcaggagttcaagaccagcctggctaacgtggtgaaactgtcttccactaaaaatacaaaaaagtaaccgagcttggtggcatgcgcctgtaataccagctgcttgggagggtgaagcaggagaatcgcttgaactcaggaggggtggctgcagtgagctgaaatcatgccactgtacttcagcttgggcaacaggagggaaactccatctcaaataaaaagaaaagaaagtttattctttctgagagcccctacccatcagggtttcatctgcattaaaagacagccctccgtagccaggcctttcttctctctcttccataacctgtctcaccagtctccaagtcctgattcttctttaacctcagagtgatataaaaacttcgtcgggcacggtggctcagccaggcacggtggctcacgcctgtaatcccagcactttgggaggctgaggcgggcggatcacttgaggtcggcagttcgaaaccagcctgaccaacatggagaaatcccatctctactaaaaatacaaaattagccgggcatggtggcgcatgcctgtaatctcagctattcaggaggctgaggagggagaatcgcttgaacccgggaggcaggggttgtggtgagccgagatcgcaccattgcactccagcctggggaacaagagtgaaactctgtctcaaaaaacaacttcagctatctggccctttctctgagtttgcgtattttctgtgagtcctgtgtgcacatgataaaatgtgtattcctttctcctgctayctggctattattagtttgatttatatagactcaaatgttttaacctccaggggaaacattttaacttccccgcagttctggcactgtgagcaggatgcaaatcaaatcactcttgtttcggagcctacagatggttttctgggacaaatgataaatagctggcagaaaaaggtgagatttcttaccagctccttggatctctgcctgtgggacccggtccagtaaaggtggtaaaagtcttggtttttttccctttccaaaactggattaacgggaaaaaacgtatgtgaaccagtttgcttayaaaataaattgatgggccgagtgtggtgactcatgcctgtaatcccagcactgtgrgaggctgaggctgaaggatcgcttgaggccaggagttcaagagcaccctggacaacacagcaagagccatctctgccaaaattttatttattattattktatttatttttatttatttatttattccaagacagagtttccctcttgttgcccaggctggagtacaatggcacaatctcggctcactgcaacctctgccacccaggttctagcgattctcctgcctcagcctcccgagtagctgggattacaggcgtgcgccaccacgcccggctaatttttgcatttttagtagagacgggggtttcaccaagttggtcaggctgatctcaggtgatccacctgtcctggcctcccaaagtgctgggattacaggcatgagccaccacgccaagccttctaaaaatgtggaaaatagccgggcatggtggtgtatgcctgtggtcccagctactttggaggctgaggtgggaagatcacttgagcccaggagatagaggctgcagtgagtcacgatggtggcactgcactccagcctgagcgacagagcaagaccttgtctcaaaaaaagaaaaaaaagacttgtttccccatctacctccactctttcttccttttgtctccttcaatagcacatgaagagatttaaaagagacgagttaatgggtgcagcacaccaacatggcacatgtatgcatatgtaacaaacctgcacgttgtgcacatgtaccctagaacttaaagtataataataaaaaatatatataaaataaaaaagagacttttagtgattctgagcctccttgaggagctcagccaaagcaccacagacttcctttttggggtcttctgtcttcctcacggagccccaagagtcgagggtggggtctaatcctctgctctcttttgcactaaactccctgatctctttggcttttgaaggtccaagggttactttcttctctttttttttgagagagagtcttgctcttgttgcccaggctggagtgcaatggcacaatctcggctcactacaacctccgcctcccgggttcaagcgattctcctgcctcagcccaccgagtagttaggattacaggcatgtgccaccacgcccggctaattttgtatttttagtagagacggggtttctccatgttggtcaggctggttctgaactcccgacctcaggtgatccacccgccttggtctcccaaagtgctgggattacagacgtgagccaccacaccgggcccaggagggttactttctaaggtaagaaaacacttgacctttggtcatgggataactaagtagttactgtcaatagctacaattttgaagataactgacaaggttggaatgaatggttattaccacagtgggcaaattttatcctcctcatttcttcatgcattgagataagaaaaaactcagatttctgactgagccaagcagaactgacagtaaagtgtgccttgcagcccaggctgagtgtgggagcttttaacagcctgtccctgggcatttccctcttgggctttgccactggtctaggggatcagggattcagcctaggaatgggatccgtgatttctgggatccaagagctctgccttccagctgtgcctgctttttctataggtgaggcttaggccagtcctggaaactccacgtgctttctcggctttatctgtaaatggactcagtaatccagttaaaaaacagaaagtagggccgggagcggtggctcacacctgtaatcgcagcactttgggagaccgaggcgggcggatcatctgagttcgggagttccagaccagcctgaccaacatggagaaacaccccctgcccccccaccaccccatctctactaaaaatgcaaaattagccgggcatggtggtgggtgattgtaatcccagctactcaggaggctgaggcaggagaatcacctgaacccgggaggcggaggtggtggtgagccgagatcgtgccattgcactccagcctgggcaaaaagagtgaaactgtctcaaaaaaaaggaaaaaaagaaaagaaaagaaagaaaaccagaacagaaagtaggccagcacgcctacaatcgcaacactttgggggctggaggtgggaggatctcttgaggtcaggtgtttgagatcagactgggcaacagagggagaaccaatctcaaaaacaacaaaagaacttacattctttctctttgccttgagatataaattgatatcctgttttctttaaaatttggctgggcccggtggcttacgcctgtcatcccagcgctttgggaggcagaggagggtggatcacttgaggccaggaatttgagactagcctgggaaacatggygaaccccatctctactaaaaatacaaaaattagccaggcatggtggagcacgcctgtaaatcccagctactcagatggctgaggcacaagaatctcttgagcccaggaggcagaggttgcggtgagctgagatcgagccactgcagtccagcttgggtgacagagcaagactctgtctcaaaaataaataaataggctgggtgcggtggctcacgcctataactcagcactttgggaggctgaggcaagaggatcccttaaacccaggagttcaagaccagcctgggcaacatagtgagaccccatctttaaaaaaaatatacaaaaattagccaagtgtggcagtgagtgcctgtggtcccagctactcgggaggctgaggcaggaggagcacttgagcccgggaggcagaggttgcagtgagttgtgtttgcaccactgcacaccaacctgggtgacagagcgagactgtgtctcaaaaataaacgaataaaatattataatagagcatatatagaaacctcatctctggcactttgtattggcattgcagatgaagtacaggagatgactgatattcaataatggtgctcggagatttsgttttccatattaaaaaaaatgaatttaatatatatatacacacacacaccccatctgggtttgtgtaaatatactctatgatgttcatacaacatgaaattgcctaataatacatttctcagaacacatccctattgttaagtgacccatgaccatattgttgaatgaatgaaagtatttccagaattttacttcctgggacagtgtccatgaaatcatctccaggactactrgccctgtgccaaggacactgaaacctttcatctctaagctgctttcctgctaagccatggggttctcttttcgctctgtttgtacaatccattcaattaatatgcattagacgytctatgtgtttccccggttgctctaagaaggtaacacacaactgggtccctcaaagcaaaagaaaatcattctcctttagtttttcttttttctttttttttttttttttttgagacagggtctcactctgtctcccaggttggagtgatcttggctcactgcagcctccgcctcctgtttaagcaattctcccacctcagcctcccaagcagctgcggttacaggcatacaccatcacgcccggctaatttttgtgtttttagtagagatggggtttcgccatgttaggcaggctggcctcaaacttctgacctcaggtgacccacctgcctcggcctcccaaagtgctggaattacaggtgtgagtcatcacgcccagcccgttctcccttagttctggaggcccagagttaatctctgcctttgtcatcatgtggctttcctttctttggtgtctgtgtggtcacccgtcataacggattagggacaccacacaccctactccagtataacctggacttaaccagttacacctacaattatcttactgtaaaccacaaataaaattctcagtcccccaggtaactgaatggaccctccctctagaccaagggcattctaaagtaaacctgaaacactagttcagcccaggatgggactgggtggctggacatgcctcattataccctcctgccattgtaattcaggctcagctgaccagtgtttaacatcaacacagacctcaagactgaccagggctgggcacggtggctcatgcctgtaatcyccgcaatttgggaggccgaggtgggcggatcacttgaggtcaggagttccagaccagcctggacaacatggtgaaaccccatctctactgaacatacaaaaaattagccaggcatggtggtgtgctcctgttatctcagctactcrggaggctgaggcaggagaatcacttgaacctgggaggcggaggttgcagtgaaccgagattgtgccactgcactccagcctgggtgayggactgaggtcctacttggggctaggactttaatatatgaacttggccaagggaggcygggtgcrgtgactcacgcctgtaatcccagcactttgggaggctgaggcaggaggataacctatggtcaggagttcragaccagcctggccaacatggtgagaccccatctctactaaaaatacaaaaattagcagggagtggtggcaggtgcctgtagtccaagctactcaggaagctgaggcaagagaatcacttgaacctgggaggcggaggttgcagtgggctgagatcgcaccactgctctctagcctgggtgacagagagagtctctgtctcaaaaaaatgaaacaaggaaacttggccggggactcgtcacaagtcaaaccataaggaacatgtgctgtgcactggatactgtctgaggtgctggggtatgcaatccccttctttaggggacttaagtggcccctgtcctgctcagcttccttttgtccccttctggtgagggacagggcgggcttttaggtgtctgtccaacttctgctttggaatttgcaaatgcagtaagaaactcagtaaatatttattgatgaattagtgcagcttgttggcagcttgccagcttctgcttgggcttttgtaatgtgaaagctgttggctgggcacagtggctcacgcctgtcatcccagaagtttgggaggccgaggtggaaggatcacttgyggtcagaccagcctggccaaaatggcaaaaccccatctctactaaaaatacaaaaatcagctggatgtggcagcgggtgcctaaaatcccacttgggaggctgaggtgggaggactgcttgaacccaggaggcggaggttgcagtgagctgagatggcgccactgcactccagcctgggcgaaagagccatcgcactcagccctcctcctgagtttttttttttttttctttgagacggagtctcactctgtcaccaggctggagtgcagtggcgcgatctcagctcacagcaacctctgcctcctgggttcaagcgattctcctgcctcagcctcctgagtagctgggattacaggcacctgccaccacgcccagctaatttttgtatttttagtagagacggggtttcaccgtgttggccaggatggtctcgatctctcgacctggtgatccacccgcctgggcctcccaaagtgctgggattacaggcatgagccaccgtgcctggcccctcctgtgttctttaacacctcccaagcccaaaccctgttactggcagcaaatccgtgtgggtctgcagcaacctcaattcttgtctcctaagaagaaagaattcgactgaggggaataggcagaaggaaagaccaaggcagcctgggcaataggctctcatttagagcaggagagaaagtttattgaaaagctttagagcagggacaaaaggaatgaaagtacacttggaagagggctaagcgggcgacatgaaagacaagtgtgcagtttgaccttttgagttggggttttatatgttggcacacttctggggtcttgcgtcccttctccccagttcctcccttggggtgggctgttcacttaggcggtggcctaccagcgcctgggtggggagcatgcgcagtgtgtttactgaagttatacgcgtgctcacttgaagcgttcttcccttacccactgaatgtccccaggaggtcatgtaccaattaaactctgctattttgcctcttagtgcacatgcttgtgcccactcgccgaactcccaagatcttattgggaagctgctgatcaccagcttcgggtgttttcttttctttttctttttttgagatggagtttctctcttgttgcccaggctggagtgcaatggcgcgatctcagctcgctgcaacctccacctcccaggttcaagcgattctcctgcctcagcctcccaaatagctgggattacaggcgcgcatcaccacaccggctaattttttttttttttgagacggagtctcactctgtcgcccaggctggagtgcactggcgcgatctctgctcactgcaagctctgcctcccgggttcacgccattctcctgcctcagcctcccgagtagctgggactacaggagcccgcccgccaccacgcccggctaatttttttgkattttttcttttttttagtagagacggggtttcaccttgttagccaggatggtctcgatctcctgaattcgtgatccgccaggctcggcttcccaaagtgctcgattacaggcatgagccaccgtgcccggcctaatttttgtatttttattagagacagggtttcgccacgttggccaggctggtcttgaactcctgacctcaggtgatccgcccacctcgggcccccaagtgctgggattataggcgtgagccaccacacctggccagcttcgggtgttttctgtctactgggagactaccattccttggcaccagctgcaagcaatttatttatttatttatttaattttattgagacagggtcttattctgttgcccaggctggagtacagtggtgtgatcatggctcactgcagcctcaacctcccaagctcaggtgatcctcccacctcagcctcctgattatctgggaccatgggtgtgtgccaccaggcacagctaatttttgtagagatgaggtttcaatatgtttcccaggctggtctcgaactcctgggctcaagggatccccctccaactcagctctcaaagtgttgggattacagaaatgagccactgcacccaaccttgaaaaggtttcaaatgggaaagagatgtgattggaatgttttctaaaccactgcacctacatttggtggaaatgtttaatgcatgtaaatgatcattgtatatgtcaagtttttttaatgtccaaaaggagcattacaccaataaaacacaggaaaactcgcactgcaattacttaatccaacttgcacccgtactgagctttctcagagtggcattaggttctcgggggttaggcagtgccaggtgtgaggtatctttttccagtaactgtcacacacgctgctgctgagatggccatgatttggtcttagtggcccctgggggtcaggttgctgcttccaggatctgaggagtgtcttttctgccctcactgtgacgccttcttccctgcgcccagggtgctacctgcacctaaacccctcccctgtccatcgcaggggaatccctcctcataggtgtgtccctgcaaatcctgtcttccctggaattctatttttttttttttttttgcgatggagtctcgctctgtggcccaggctggagtgcagtggtatgatctcggtttactgcaacctctgcttcccaattcaagctatcctcctgcttcagcctccggagtagctgggattaggggcacgcaccaccgtgcctggctttttgtatttttagtagagactgggtttcgccatgttggccaggctggtctcgaactcctgacctcaagtgatccaccagccttggcttcccaaagggctgggattacaggcgtgccaccgcacccggcccttccctcacattcttttgtgataaggcccactaactccaaagccaaaattcctagttgcccagaaaatcgagttcccctatccttcagggcagggatggcttcgtcctgggacgtgagtgcaaaatatctgggctctgtgctaccagtgctgccaggaaggagagggcaaaactgcgtttccattggaaagcaatgccagtgttcctgacgtgctgcatacatgtgagcagccgacacctcccacacggtcacaaggcactggctctaagcgaatttgctcagctcccaccagctgctactggtgtttagttctgtggtttgtgcattttgtggttgacatactaaggcacagaggttgagtcagttgtccaaactcactcagctatgaagtagataagcctggatccaaactgcatgagggaccgtgagtccatgccccgcacgccccactcactgcccctcgggtcacaggatgaggaccaggcacatgcagggctggctagaggcygttctgtccagcctgtccaaggtcagccgcaaggcccacccactctggcaggaaggccgcttacggcctaaagaccacgttgaaaggggagttgggcagggtgaagttggccaggtagacagtgtccccgcccgcgaggtacgcggcccagaccccgaaggtgcccacggtgatgatggtgtggttgcactgtgtgagcagtgcgaagtccttggcaggtgagccctggaggccattgccagcgaacaccacgtccccaagggagctgttgatgctctcccggcaccaggccatgtcatcgctggtgaccacaaagaccgggaggyggcagcaggcccggaaccagtccagggcccgctgcaggtagccggtcggccagcacccccttccatacgcgcggcatgacacggacatagtccccccggcgcacgtggacccccacgaaggtcgcctgccctgcccacttggcctgcaggccccgcaggaacttctgggcctcctcgcgcacgtggtcgtgcagggtgaactcctggaggatctcctggcggaggtggtggtagaaggtccaggagcaggggtagccsgtgargyggacryasysccccgggatgtggcggtaytcctcctccatccagtcgttcaggtggtagttctgccaggggatcctgctggccgtggcgctgtgcagcaccggcagggtgattctgaagatgggggccagggtgctgtgcatctgggccgggatgaaggcgggccgcccgttcatcttggccagggcgtacagcgtggcgtactcgcccatctggttccccaggcggcccttggagttgatagtgaacaggtcctcccggggcaggtgtctgggggccaggaccacacgggctgagtatgcccagggcgcaggcaccagagccaggtgctggtggcagtgaaagatggtggacaccacaaaaayggcaaagacgaagtagaaggtggagaaggaagggcgggtggcccagaatcccttgayggctgtggggaggagagaggacatggtcaggaggcagggctggggggacaggagtctcttcacccaccccctgccaaagtcattcattcactcactcaatccatccaagcctctgtcctgagcaccacagtgcatgggagaggcctcagagcacagaccctggggtctttccacctgaggctgagttcctgctggaagtcccagcctcaccagcaccttgtgacttcagtcaagttactgcacctcgctgagcacagcggcttgtgcctgtaatcctggcactttgggaggctgagatgggaggatcacttgagcccaagttcaagaccagcttgagcaaaaaaagtgagaccctatctttacaaaaaaaaaaaattttttttaaaattagtcaagcatggtggcatgcacctgtggtcccagctacttgggaggctgaggtgggaggattgcttgagcccaggaggttgaggctgcagtcaactgtgattgtgcccccgcaccccagcctgggcaacagagcaagaccctgtctcaaaaacaacaagaagttactgagtttctctgagtctgtttcctcacctgttaaatggggatgagtagatggaactatttgaaagtgccaatatttaacccgattttacctacactcatggccatttctttttttttttttttttggcgatggagtcttgctttgtcacccaggctgaagtgcagtggcacgatcttggctcactgcaacctccgcctcccgggttcaagcgattctcctgcctcagcctcctgagtagttgggattacatgcatgcactgccaaccctggctaatttttgtattcttagtagagacggggtttcaccatggtggccaggctggtctcgaactcttgacctcgtgatccacccgcctcagcctcccaaagtggtgggattacaggcatgagccaccgtgcctggcctactcacggccatttctatgattctacctcacagaactacctcatggggttgcttgaagattaaatgtgatgattttgtaaagcagtgcctcgcacacaggaaatgccctgtatgtgttggaaaatcaatacctgcagtggctgggcacggtggttcacacctgtaatcccagcacttcgggaggccaaggtgggcggatcacctaaggtcaggagcttgagaccagcctggccaacatggcaaaaccccatctccactaaaaatacaaaaattagccgggcatggtggcgggtgcctgtaatcccagctactcaggaagctgaggcaggagaatcgcttgaacccaggaggtggagtttgcagtgagccgagattgtgccactgcactccagcctgggtgacagaacgagactgtctcaaaaaaaataaaaataacataaataaaatcaatacttgcagagtatttattacaatgccaggcacggtgctcagggccaggaagccagcagaggaaaaaacaggtaagaatctttggtgcccgtgcagagtttgggaaagagcacaggtgggcccaagttcatggacaggctctgccttctgcaggctggtgacctggaggtgttatttaactcctcctctcctcctccaagaaatggggctgccacacccctgcactgataagtgctaagcgtttcctgatactattagtgggtgtggtgggttcaagccaccacagactcctggactccctttcccttggatctgggcgggcccatgactgccttgaccactttaatatagtgcaagtgaaattgtgtccatttctggcccaggacttaaagaactaacagctttcatgtcttgccttgagaatgttccctctgcactatcgtgtcaagctggagagttcagcttttgttttttgagacaggttctcactctgtcacctaggatggagtgccagtggtctgatcacagctgggctcaagggatccttccacctcagcctccccagtagctggcaccacaggcatgtgccaccatgccccgctaattcttacattttttgtagagatggggtctcactgtgtttcccaggctggtcttgaactcctgggctcaagcaatcctcctgccttggcctcccaaagtactgagattataggcatgggccagttttagcttttgtatgtagggttatgattattcatttttttcttttcttttcttttcttttttttttttatgatggagtttttgctctgttgcccttgctggagtgcagtggtgtgatctcggctcactgcaacctctgcctcctgggttcaagcgattctcctgcatcagcctcccaagtaggtgggactacaggcacccgccaccacgcccagctaatttttgtatttttagtagagacaaagtttcaccatgttggccaggctggtctggaacacttgacctcaggtgatccactcacctcagcctcccaaagtgctgagattacaggcgtgagccaccacgtccagccagctcttttttggcaaccactttgagatataattaatataccctaccattcacccacgtaaggtgtgcgatttaatggcttttagtatatttacagagctgtgcaaccagcacaatcaatttttgaatatttgcatagcccccctcccaaaaaaacccacaccctttaaccatctccccacaatcttccctgttccttgtccccccaccaagtaatctcctttctgtctttatggatttgcctattctcgatttttcatgtgactgcaatcacacactccatggccttccgagtctggcttcctcactcggcaccgtgtttcaaggtccatccacactatagcacgtgtcacagcctcacgcctttcttttctttttctttttttgagacggtgtctcactctgtcgctcaggctggagtgcaatggcgcaatctcggctcactgcaacttctacctcctgggtttcagtgattctcctgcgtcagcctcccgagtagctgggactacaggtaggactacaggtacagccaccacgcccagataattgcctcactcctttcaagactgaaagtcccattgtccaggtagaccacaatgtattcactcatcaggtgataggcactggagttgtttccagttttcggctgttgcaaatagtgctgccacgaacctgtgtgctgggtcacagggtgaactctacgttgaatcgttttgggagctgccaggtggctgccccagtttccgtttccaccagcagtacgggaaggccccatttcccagcctcgctcgccgtcgtgtttggttgtggtgggtgtgcagggccatctcaccgtggggcccacacctattcacctccaggtccagccctgaccactgggcctgactgggctccaaggacctcggtcccggtcctcgccgtgggatggatggtcccttctccgggggctgctctttccgagtctcctccagctctccccagggctcccagaaggtcctctgctcccagcctctaccatgtcctgatcggctttctcttctccccttgtccactcctctgaccaatgtcctatggtttccctgtggccactccaatggctacagctcagcagtcatcccttcaccccctccctcccaccccattcctgctgaagccctggttggcatgggctcacccctaaaacttctggcttctgcctcacccctcccggctccccatctctccctccgcctgtcctcttaaacatcgggggcctacaggcctcttcaactgtcatcctcctctattccagggctcctcatttggttcatctggcccttctgagaagcctgaacaatctggggccctccaggcctcttcagctgtcatcctcctctattccagggctcctcatttggttcatctgacccttctgagaagcctgaacactctggggccctccttgaaagtctcgtgtgggtccccagcaaggccagctggcctaaggcctaagaaaaatgctcctggtgctgctttagtttgcaaaaagtgaattaaatctgcccaagccttttttcactgagctggtgaaaactgtgtcccaaacatgatcttgccatccactcaactcagggtcctgccccacggagaaggagctgagctctgagcccagctggagcccccaggcaggtcccaaggctagagctggggtcagtgggggtgcagggcagggacaggagcctgggtcactggccaagggaaaccagctcaggacaagggtgccccccgcggggtccgccttcattttgtgtgactcgtgcagttgcgctgagacaggccccacgcttgctttaatgatctggtgttgccgtcttaaaatccttcataaattctaaacaaggggtcctgtgtctgcattttcccccaggccctgcagatcaagcagtgggtaccgcggctgctctggcttctcctggaatctcaggtgctccctcttgtggctgttctcagcctagacaaccagaaagccgcagaaaagcaccagccaaggccgaggctgcgagggtgctggcgggcaggcccatcacggggctggctgtcctggtccgcgattccttgtcagccattttcctcagggggagcggcaaacgccaacctggactgaactcatctggggacaaccctggcttggaggagggtcatgtggctatttgcagactttacttctcttactgtgaacacccatgtgctctgctgcctaaaacataacatgtttgacaatgtgatgcggcccagacctaccatggatgccatgtcacgtacgtactatgcatccgacaacagggccaggaagcagaaggttccggaacacgactttcccagagagctcagataagaacccgtgggcatgtcagctcattcagtcctcatgaccccctccgcccaccatgaggaaggtccattctttcttcctcatttaacagatgaggaaatgaaggcacagagaggttaagaagcttgttctcggtcacacagctaggacagaggtggatttgaacccaggcagtatggctggggttaccatcctggcctttttgaacatgtccgggagggcaggccctacccagccacacaatgcccagtaactcctgcgggtgacctgccctgcctcgtggagactccgttatatctgggccaccaaggcaggggttagaggtctgtgtgagcccagcactgaggttctctctgggttgaacccacctcagagatgtgccttgggcaggcctggccttctgtagaagctgtgagggtgaaggtctccagcccttaaagaactctccccaacaaaaaaaacagtctccttcccagcttggggcactatgtgctcggctgtggcagctccgtctgttcttccccgcctgcccccgggcacccgcaggggcgcccatcaactcaggcagctcaagctgcaaggaacaaaagcttccctccaggagccggagcttgagacttcgcccaggtggggaggaagacgcagcgagacctaagccttcttcctcagttttgtgtggcagcaaagctgggttctgtgctggcggtgggctcagcacaaatgcccctccgcatcaccccacttacatctgcaatccccgggcccccgtggccgccccccccacttgctttgctccaaggcacttggcaccttccaacaacctagagcacagaaggacctgcgctgctggggtctccccctccctctctggacactgagcctgatggggcaggggtctgtgttcccagcgcgaacccccggcaaagtcccatacagggggagctcaggcagggtcagcggagggacctgcgcctgaatcccgaagttccactctgactcacacagcctgggcccccagctctgacatgccccctctgatggggggcgtctcagccccattccatcctcctgcagctgatgcacctcccagctttcggagtgactcccttctttcaaatccgatgtccctgtcctgctcctgccaaatctggccccctccaacg

SEQ ID NO: 94806 - DNA, 12348 bp, Homo sapiens
taatagctaacaaagagtgattaaggcaagaaagcagaaattcctacacttagcttatagaaaagacgcttggtaagagagaaagatggggctagaaggcaaggtggcaaccaaaacccagcttgacatgtttgaaatgttgccataccaaagaagaactaatcatattctgtattgctttggggatcggaggtgagacaagggaattagaacaacaattaaagtcaaggaattttggcacagtatcaagaagatctttctaacattcagaattgtccaaaaaccaattgtcttctttaaaatgcaataaatcctccgaaactggaggtgctcaaagtttgtatgatcattgcttaaagatgcagtgaaacagatgtctgtattaattcacaaaataatattctacttacaaatatcctgatgtataattcacaatggaacttagactagcagttgaatacggaatcatctttgattcatcacaattttggtagaccctagtttccaaatatgtaaaaaatctatccatttctttccattgtaactataacaactctgataaagtcattgtctcttatcacctatctacttcagtagcctttgttctatttttcccacaccctctattgccacatcctgtctattcatccatgacagagtgatgtttttaaaagaaaactgataacattgcatccctacttaaaacatgtctattttgtcccatatattatatttttgtatggagtgcaaaatgtatattggattataaagctccaagtgaagtgacgctgtctgtctccccagtgtcattttatgccactttttctgtcaccctgtgtgttccagcaacactagcttgctttcagcaacttaattgggccaagagttctcttccaccacaatgaatttgctcatgctatttcctctgtctggacatcccttctgctaccactcctccttgtctggctattgtccttcagatctcatcttaaaaatttgttaatcagatatgattccatagcactcaagactacgaagattttgttattttgtaccccacagcattgcataccctttgtgtagaactttcctcaaatacaattaagtgttttgtgttgtaattattaccataggctatgtctttccacttgatagtaagttccagaaggatagaaggatagggatcatgtctatggtggccattcatctcagctttgatctagtatgatgtctaacccaaagtgtattgctcaattaatatatgttgcatgagatttcaatgttataggatggattgggaaatttgtagaatcacaaaactctagaaccagaaaataccttagatattgtctagcctgtcccattaatcttatacattcagaatttgaagcttaaaagtattaaattacttgtctaaagttaataaaaagattaatggcagagccagggttcagtggaagtcaggaattccaactccgaattcactgccctgtccaatatatcagaatacctctctaacatggcattttcaatctcacaacctgatttttttacttattgagtaaaacaacagcatgtccagtattaatgagctgaaaagaggaaatgtaatttgatcatcaatagtagaacgaatggcagtttttttaacattgtgttgaatattatactacagttatattattccaatgttccccatgcatatttcctgtttatattctgctagagaccttattaatgagtatcatcactcagataattaccataaatagaattggactcttttgttgtttaaattagtctgtatgggagagtctagttgaggacttatctctctgtgacctcatgatatttgggagtaatatcagtagtatagcatttgcaactgaaaatttggctatgggattccaaatatataaaaaggaattttaacatattttgctaacaagtgcctgtccacatttatcgaacacttactctactgttgttcttccaaatttgctgttaaaataaatgatttaaatagtctaggacaaagaaataaagataaagggtatttttcatttatataggccagatatgatgagtaataattcaactcttgaggagaaggtacaaagctagaccctaaggtgacaactacaattaatagtacagggaaaagaattgtgttcatttttgaagtgtttgaatcatacaaccattcttattttgctattttcattttgtgaattatttgactaattaatgaaagaaatatggattcattacaaagtcagttaagtctaggaatatgaatattacgatatattccctgaattatcaataacttgtgatgcaaacatttggcatgttaatatggctgtgtttctcaacatcaaaaatattcttctgtcatcaattcatattgttgtaattcaattatagcatttagagtattgactaagttactgtaacacgaaaattccaaaaatgatggtggattcatcaaaatgatagttttattctccctcgtgtaagagtcaatccattcttggctagcagggacctttgctccaggaggtcatttagcaatccagtttcttattgagttgctcaactatctcctagagcatagtcttatttgatcaaagagagttcatcagcacatttgtgttccaatctcatgaatggggaaacagagaaaatgaaatataagcaattttctctttaaccgataagactagaaagtttaacccattactcctactaatgtagtctcatgcccacacctacctgagtaggttgcaaaatgttgcatctagctgagcagttctgtgttccgataagactcgtggggttctattagtaagtggactaggggataattaataacaatggataggtatcagtctgtcagtttgcccttctaacaacccaggtgtccatgcaccctcatctttcttcataaatacactcaaatcctcttcaagggggcccacataaaatcttattcagttactgctgcagctgaaaatccaggactggagtgaaatatagtcttctctttcaggtctggaagtggctccttgtgctctggcatcaacttacaaacttacaagttacatatcttcctttgtcctgatatataatggtggagtagggacaggataactgcaacaaaaactcccattcagaaacataaaaactgaaaagcacccagctgtttctggctcacagtaaatctcaaattctcctgggtagaaatggtgaatactctccatcctgctgatgtattagttgtttgggttaaccagcctcttgttctgctctcagtgagtattttcttcgtccattgccccctgcagctttgactttacatatttgggaggttcttcttcatccactgtccacatcagaaggtggcaagagtgagtgttctctccttggttcggcttggaaggacagaggattgtgttagagagctaacaacaaaggtcgttgtataccagccttgtggttcttatgataataaaattctttcagacccttagtagtattcttgcttatttgcttccaatcacttccatgtggagtaaccacagcaaaaacaatcttttgagcaatgtctatagagtctatagatgctcccctttttattatcttctcttctctgctcatctttccttcccttaacttaatataagcgaccttaataccacccaaaactaccgctctttacctctgagctgactctgagggacaatctaatatcatgctcgttcatgctcattgggatatggaaacagttagcttttctacactctgaagtctcaaattaggggaattttaatctattaaattgcagatcacaggcagagagattttccattagcagagctttcttttcttttccatttgcaaatgggccacttcttgcctaactttatttcatgtctcttgtaacattttgctgaaagttccaagtagcagccaaaacataccaaaaatacgacattaaaaaaaatcctgttcccctagggctacagcttggtaataatgcagtatgtttccaagttggcatatgttttgtaatggcatatcaaaggacatcactttctagcctgtaggtcctttctacctgccccctaatgtgctaaactaatgtcatgtattttgttttttattatgacaatgccccacttgcaggaaccaatttctataataacaggctataataagttaagcagctataacctaaaatacggtgccttgaataaagcagtttatttctcataacattaaagaagtgaaccatataagtgggtagctacaactcatttacaaggtcatctaaatttttaatatcttatttcttcattattcttcagataatatctttcattatccttcactgtccttaaattcatgcttaaagcatatttccagcctgtgaaataggagaaaaaggaaaatgtggaagaaatttcctttgtaaaaggacatacacatctcttctgctcacatctcatttgtagaaacatggtcaatgtctaatcttgacagaaagagaggctaaaacaagtaatgactagttcacagctataatccagctgaaacttagggggttttgttgctaaatgaaagaagagcagaatgatggagaacttgcaggctatgtgctcctccagtgaaattccactgatatgaagacatttggttgacaaataattgaatcaccatataataattgaacacatacaaattttaagaaaggactatgaaagaccacaggaagcataatgctgccttctgtaggagactgaatcaaaagggtctccaggcaaaaaattgacagaactgacagaaatggtaaaaaggaataaggtacaaaactttcttcttaaccaaaaatttcaatagtagaaaagaatgcagaaccctaagatgcaagattattctccttttaaacatttgatcttacacaataatctttcaaagatgttgaatagtcctgatatgctaggcaacacataatagaatacattacttaggggagtgaattcttaggaggaatagtaatgaaatatgacaggcataacatctgaagtacagatgttacattctatgccatgtaggtaatttacctttctaatagaatcttattcctgtaatagtttttctctcaatgtaacacagtattgaagtccaaggttagaatgataaataataataagagaggtgctcaagcattatttttaaaaaattaaatatccactgattaaataatgaaccaggcattgtgctaggccctgggattacaaagattaattccacagtttctttgactggcagttgtctgattcccatggggaagacagataaaccaacgtattatacagtgtggtatgcactaacattagagacatttaagctattaaatcgatataagtaagagtgatccaattgtgagaatggaaacaaaaacaaaaaatactgtgaaattcccagccttaaatttttggagagtaggaaagtttggctgaaggctaaatatcatgccagattgttgaggaagaagacaagacaattgtcaagtttatttgtttatttatttatttctcttattcctgaacttcttctgtaacaagttctaacctaaaacctttgccacactgttggcaattagaatatttggtgaatgctgagttttcattttgaaaataacctaaactggtttcacatgttagacattaatttatttattcatttgttcattaaatatattttgagcacttactatgtgccaggatttatgtaatgaagaaaaatttcttgctctaacaccagtgcagcctctagttcactgagctgcagccaaaggacaaggggtgtaagtaaggaaatctctattccatggctcctacaaagtggactgcttgcaaatgacccatagtaaactgcccaggaagcaactagctaaaaataactagctacaaatgcctcttgcgagtgcaccctctaccggaggggtaaagaaacctcaccgaatgctacaaatgccgcttgcaagtgcaccctctactggaggggtgaagaaacctcaccgcaagccttatrctgtagtgcttcatgaaattagatattatgaaaagcccattgaacttctgattcaaaaacttctttctagcatctggtgtgaaaaatttctcaagacttcaaaataggtctgggcttccagagtgcagctattggtgctttgcaagaggcaagtgaagacctatctagttaacctttttgaaggcacaatcctgtgtgttatccatgccaaaagtgtgacaattatgccaaagtgcattcaactagcatgccacaaacatagcaaatatgcttaagaatcccctgtgatgggaaacatttcatatccctcggccctcctgccgaattcttttcttcctattattagtcattctgaacgttatttttttcccatggggtccaaaggtacccaaatatatgcttgcaagtggaaaaatagggtacagaaatcagttatttgcagtttttctattttcatttgtatgtgaatttttaatataaacgggatgtgaagcattaacgcaagtcaacatacttcggtgaacaagtttcagcaattcaactttatagcaattataaataaacctgttaagttattctggacatttggattgacgttgggttggcaagtaaattttttactgacagcaactaaatgatgtttatataatttttatcatataatagattctatctttttactatacttttctaagttgtcccacatgcaaatacatgtttttaatgttatctatcttctgtgctgtgcctataagtttgttattaaaatacattaaacaacaacataaacttcttttcctcaaagtacttctagtctagttggagaaacaacctagaaaatgcaccaacaaatggggcacaataactactctgagagagagtggcacacagtggacgcaaagaagaggttcctgatgcagctgggaagagtctacatgggcctctagcaggagaagatactggtcttgagtttggagactaagtaagcatctccaggtaaggtgtgccatgaaacaagtaaagcatacacataaatggaaatgtgagaaaacaggatatgtttgggaaatagaaagaattaaagaagtacagaatatcatattagtgtaaaaaagaaactgtcagtgtgaaataattattggaagagaagtcaggaaatttagattctcctactgtctttcatttctttcattaaaaccattactgagaccctactgatgttccaagcccagtgtgtggctctgggaaaacaagaatgaacaaaacagacatgggatttgcctttgggaatttcacaatttagtcagatatagacagatatagtcattaatcaaacaagctcatcaataaatgtataaataaataccctctaagtgtgcaaagacgcagtagcatgaaggtgctcggtgagctcaatgagctgagaaaaaggctttaatttcctttctgtaactaaaagttatgatgctttccaaagcctcttccaattccaatgtttttatgactgtaaaactcatattatttaatgtggattctaatagtttgagtttaagattttcataatatattcagaaagtgaagtgagactatagaagtccaatcatatttcctcaatactttaaagctgtttgaagatgcaaccagaaaacatggattcgggtattaagaatattttttcagacacttctgtttaaaactttaagaacagtaacatttcacacacatacaggaattactgtgttaatagatgtgttcaggaaatgccatgcaagataaagcacaaatgatatcataaacaatagacacaacagtctttggagagtgtgcactgtcttggcaacacaaaggcctgctggtaaatctctacacacctgggatgactggggaaagctgccaaccacaactgcatttgtggccttaagcattagaactaagaacaggtagaagtcctggttcaacaatgactacatgaagtagaggaaggagcaggtgtattcgctcttggaaatctactacttaatatcatggttactttgggcaaggtagttcaagttagttactgtgcatatgcctcagttctgtcatgtataaaattagaatgaagaaaataatggccttacctaccttcctaccttatagatttaaggaacaaataaagaaaaacaataagagggttgctgtgaaatgacagagagaaacataaagagaggagagagagagcttctttggaagctgaaggcagtcagtatttcttacatttattttgtaaaaaatgaattttctttaataaacacagaagtgaatgtatttctgtgactgttgttttcagtttgcattttaaaaattgccctaattgcagcaaaatttgactagtctgtgttggtttgtatttattttttctctttttttttttacagctctattgatctatcattggcatataaaattttatatatttaaggtgtacaatttgatgttctcatatacatatacactgtgaaatgattaccatgttttttcttcttgaaattttattggtctatgaaatctagaagtttggaaaagtgtttaatgtagggcaattctaaataaaaattcattattattcagttttattcaacaagctttcattgaacatcttcattttgaagttcttaaattgccttcacatttgtaagccttattttccaacaaagtatctggtccttaagggcataaggacctctccaacgtcttcagaatttctcaaggagctaacccagccatgtgggtgcacggtagacattcctaaatgactgaatcagatgatggtctacacttgtttttgtgtagaaatgagaatgagtcactgtctggaacttgtcccccgacttgggaatgttaagcctttggaccacttttccctggctccctggtgggcctttcatccttgcaagggcctcagggacatgatggagtttccttttctctttaatgtccctttcggttactcaaacctctaggattcttttacccactctaccagtttatgctgcatactgggatggagctttcctaggttcctcttttctcttcctgaaaaaacacacaggctctttttacattgaattttaatactaatccctcctggtaattagacatgaaataacaaaaatggtaaactatatcaaattacaatggttaagaaatcttactgaattctatcaggcatgtttcctggtctataatttttgacttcttgagggaaatgctaactaggagtcccaaacatttattctttaaggtaaatttctccagaagtcttattctaaggctagcatatccaatcagagaaagaaaattaatatgatctaggttaattaggtgctatcctaggctaaataatagccacctaaagataacatatcctaatctcaggaacttgtaaagttactttataaggaaaaagggactttgcagaagtgattaaatttaagtatcctgcatagggatattatcctggattatctgggtgagccctgaatacaatcaaaagtgtcctggtaagagagaggcagagggtgatttgacacacacacagattgaagaggaggaggcaatgtgaccaccgaggcagagattagagtgatacagccacaaatcaaagaatgtcagcagccactggaatctggaagagacaaggaacagattctctttagcacatcagaaaagatggtgcattagttgcagtggctcacgcatgtaatcccaggactttgggaggctgagtctggtggatcacttgaacccaggagtttgataccagcctgggcaaaatggcaaaatctcgtctctacaaaaacaaaaaacaaaaccaaacaaacaaaaagcaaactaactaaaaatgaaccaggcgtggtggtgtgcacctgtagtcccagctacactggaggctaaggagagaagatcacctgagcttgggtggtcaaggctgcagtgagccatgattgcaccactccactccagcttgggtgacacagcgagatcctgtctcaaaagaagaaaagaaaatattgtgatctggtgaacaccttgattttgaaccaataatactgatttcagacttctgacattcagaactgtgagacgataaatttctgttgttttagcccatgacatctgtagtgatttgttagcacagccataggaaactaacagaagggcccacttgtcttaaattcctatcgtttaacctgtggggttggtaacatccattttaaggggttcttgccccgtttctttaccttttctggtcattaattgtcaagctgagcagaaactatttttatattactggagagttatgcttgagaaattgggatttgagaaaggcacggaaagaaagatgatatacttaaccactattccttcatctaataaacgttgtgtaaattcctactatgtgtcaagctatgtgctaagtcctagaataaaaatggagtaagacaggatttttgtccttaagaagttcagttgagtaggagaattagacacacacatatgtataattaaattaatttgtggaaaatgcagtaatgattatgtagaaagagtattgtatttccccagtgcatttcatattttgaaaaacactgtctacaaaaaagtttctgtgtttaagtaatatataataggttaagaacagttctaactgccaataggttttataattaacataggaagatcagtgttatactactagcttaccattatttcagccaaaaatcaaaggtatctgtcatttgagtttttattgtaaagtctgttcctggagaaagtgtgaattttcttataatatttaaaatactgatgtagctacagaactctctccccattactttcaagaatggcctttcctagtttgggaaatacagcaactatgtcattaaacaatctggttggccaggcacggtggctcacgcctgtaatcccagcagttagggaggccgaggctggtggatcacctgaggtcaggagttcaaaagcagcctggccaatgtggtgaaaccccgtctctactaaaaatacacaaattagctgggcgggttggcacatgcctgtgatcccagctactctacttgggaggctgaggtgagagaattgcttgaacccaggaggtggaggttacagtcagccgagattacgacattgcactccagcctgggcaacaagagcaaaactccatctaaaataataataataataataataataataataataataataataaaacaatctggcttagagaaaattgtattgcaaacaatctcattaatgagagttcctgcgtaacaggacactagctctgtcccttggggatggcttggagtactgtttcctggtaaagcaacataaacagatctcagtcccctcttacagagttatgaaataatagccataagtaataaccaacatttatataagcattccatcattttacaaaataattttacaaaagtaactgattataggttgttttaattggaagcaaacccagtttcattacctcaagcaaatttcttcatctcttttagcttccgtttctcatctcttttttttttttgagatagagtcttgctctgtcgcacaggctgggttgggtgcagtggtgcgatcttggctcaccgcaacctctgcctcccaggttcaagcaattcttctgcctcagcctcctgaatagctgggactacaggcgcctgccaccacgcccggctaatttttgtatttttagtagagacggggtttcaccatgttggccaggatggcctccatctcctgactccgtgatccacccgcctcggcctcccaaagtgttgggattacaggcgtgagccaccgcgcccggcagtccgtttctcatctttaaagtgagagtgctaacacgcacatggagggctactatgagaatggagtgagattttgtatatgaagtagcaaagacagagcctgggacttagtaggtacattattaagagttggagccattttttaaaccttttgtctttttgttatttttgctgttctgaaagtcgctaagcttttaaaaatggtctcttattttactattcttgaattgtttcacgcttctcaactcatgacaagaacctattctgccaatgaacctcctgcccccatctattgaaattaaagcttaggagcaccagtgcatcccagaatttgacttccttccagtggagagaccccttg

SEQ ID NO: 94807 - DNA, 91787 bp, Homo sapiens
  misc_feature (1)...(91787): n = A,T,C or G
gtccaggctggtctcaaactcctgacctcgtgatccgcctgcctcggactcccaaagtgctgggattacaggcatgagccaccacgcccagccagaattttttcttttttctagagaagggggtctccgtatgttgcccagtctggtcttgaccacctgaccttcattgattttcctacgtcggcctcccaaagtggtgggattacaggtgtgagccactgccaccggccagtaattatgctgatgaaagacctgttttttctccagttcctgggatggctctagggagggttatttacactgtgagtgaggaggcattcacagagaagttcctccagagtgtggaagaagcactaccatttggcaccaacgcctggagaacaaaggaggagaccattggccaaagagaggcatttccattttgttggaacctgctgaccaccaacccatagcattttttccctttcttccttgctaatccaatcgcagattcattgaggaggtgagaggtcctgagatccaggctggaagaggagtgattggtctacctggttctcaagggataatgttgccccctagaggacattttggaaattattaaggaaaattaacgactggttttttggttgtcatctggttctcaagggaacagtattgcttccttgggagaatttggaaacttaccttttttcatcgtcacaatggtgaagggtttgttactgggattagaggacaaggaccagacatgccaagatgttctacaatatagcattcctaattaataatcacctaatgaataaagctcagatagcacttaaaaagtggggaaaggactgtttatactaaattatgctaagctgtaacactgaactattccagttcttttgaaattgtttacatagcaaaatcatagttgactcctggccatttaagacttatgccaccactcttgggatagtgaaaatgttttgcaactagattgaggtggtgattgtataatatggtgaaagtactaaaagccactaaattgtgcacttcaaaatgctgcctaattttatattatgtgaatttcacctcaataaaaatgtctttttttttttttttttgagagggagtcttgacctgttgccaggctggagtgcagtggcgcaatctcagctcactgcaacctccacctctcaggttcaacccattctcctgcctcagcctcgcaagtagctgggactacaggtatgcgccaccacacccagctaatttttttgtatttttagtagagacagggtttcaccatgttgaccagcatggtctcaatctcctgaccttgtgatccacctgcctcggcctcccaaagtgctgggattataggtgtgagcccccgggcccagccaataaaaatgtttttttaaaaggatgcatatttccaaacatgagactataccatcacatttaatttttcccagaaactataaaaagtagaagtgaagagaggaaagggagacacttttagaccttcaatgagtctgcaagtacaggagaaaataatttatgcagcaattagctttattttcagggctctttttcttttcttttttttttgttgagacggagtctcgctcttttgcccaggccggagtgcagtggcgctatcttggctcagtgcaagctctgcctcctgggttcataccattttcctgcctcagcctcccgagtagctgggactacaggcacccgccaccatgcccagctaattttttgtatttttagtagacacggggtttcaccgtgttagccaggatggtctcgatctcctgacctcatgatccgcccgcctctgcctcccaaagtgctgggattacacgcgtgagccaccgcgcctggccaacaaagtgatcattttacaagagttatggcatagtcacaggtaagaacctgggtcactgggtcactccctaaccaattacgaattactatatgccatggaccttcaggattactttcttttttgttttgtttttgtttttttttttgagacagagtctcgctctgtcacccagaccggggtgcagtggcgcgatctcagctcactgcaacctctgcctcccggattcaagcaattctcctgcctcagcctcccgagtagctgggattacaggcatgtgccaccacgcctggctaatttttttgtatttttagtagagaccgggtttcaccatattggccaggctggtctcgaactcctgaccttgtgatccacccaccttgacctcccaaagtcctgggattacaggcgtgagccaccgcgcccagcccaggattactttctttctttcttttgagacagagttttgctcttgttgcccaggctggagtgcaatggcacaatctcggatcactgcaacctccacctctcaggttcaagcgattctcctgcctcagcctcccaagtagctgggattacaggcatgcggcaccatgcctaaaattttgtatttttagtagagatggggtttctccactttggtcaggatggtctcgaactcccgacctcaggtgatccgcccgcctcggcctcccaaagtgctggtattacaggcatgagccaccgtgcctggcctctatttttctttctataatccatgtacattttcctttaataatataaggcaactaaacagcactttattttcagaggcttatctaaaagatacttgacacagccctttgcagctgggtcattctctgaattctaaatgtcgtttcctgcacaaagtggttatttgatcttgtaactggcattttccccggagattaggaagtggcacaccaaagtgcaaaaaactttggaatcagaactttaatttttaatctttattttatttatttatttatttttgtgacagagtctcgctctgttgcccaggctagagtgcaatggcaagatctccactcactacaaactccacctcccgggttcaagtgattctccgccttcagcctcctgggtagctgggatcacaggcgcacaccaccacactcggctaatttttgtattttgagtagagatggggtttcaccatgttggccaggctggtctctaactcctgacctcaggtgatcctcccgtccatgcctcccaaagtgctgggattacaggtatgagtcactgtgcccggcctaatttttatatttttttgtagagacggggtctggctgtgtttgacagcctcaaactcctggcctcaagtgatcctctcaaagtgttgggattacagacatgagccacagtgcctggcctattgaaagcttttccatcataataggtccttccccccaatgcttgcagcaagtcaatagtaggagaccccaggttgcagcagagaaagaggtttaatcataggggccactgaaaaccaagagaggagatggaaggaaccacgaatccacttccccagggagttcggggctttttaagggttttggagtgggttgaagtgtggaggtcattggttggttgaagtgtgcagggtgaagtaatgaaacagggagttgaagaaactctattctcctgtcgatttggttcctctgcggggtcttcacactggttggtatcagctgttttgctggaattcaggatctgaaaaatatcttaagcttttttttttttttttttttttttgagacaaggtctgttgtccaggctggagtgcagtggtgccatcatagctcattgcagcctctaacgcctgggctcaaaggatccttccaccttagcctcccaagtagctgggattacaggcaygcaccaccacacccagctaattaaaaaatttttttttttgtagagacaggggtcttgtcatgttgcccaggctggtcatgaactcctgacttcaagtgattttcctatctcagtctcctaaagcgcatggattacaggcatgagccaccatgccgggcgctaagcaattcttattatttatttatttatttatttatttatttttttctgagacggagtcttgctctgttgcccaggctggagtgcagtggcgcgaactcggctcactgcaagctccatctcccaggttcatgctattctcttgcctcagcctcctcagtagctgggactacatgcgcctgccaccacgcccggctaattttttgtagttttagtagagacaaggtttcaccatgttagccaggctgatctcgaactcctgacctcgtgatccgcccacctctgcctcccaaaatgctgggattacaggcgtgagccaccacctccggcctaagcaattcttaaataaaaatctatgattccgccaggcatggtggctcacacctgtaatccgtgcactttgggaggccgaggcgggtggatcacaagttcaggagttcgagaccagcctggccaacatggtgcaatccccgtctctactaaaaatacaaaagttaggtgggcatggtggctttttttttttttttttagacgggagtctctgtcatccatgctggagtgcagtggcaggatcttggctcactgcaacctctgcctcccaggttcaagcgattctccggcctcagcctcccaattggctgagactacaggcgtgtgccaccacgcccggctaattttttagtattagtagagatgggggtttcaccatcttggccgggctggtctcgaactcctgacttcgtgatctgccctccctggcgtcccaaagtgctgggattacaggcatgagccactgtgccctgccaaaaagcctatgattctaacatcagaaatccttccacctcagcctcccacgtagctgggactatagactcagtaccaccacaccaagctaatttttgtatttttaatagagatagcgtttccctatattgaccacctggggccatccctggttttttttttttttcccttccttccttcctttccctctctctttccctccctccttccttcctttctttctttctttcttttttttttttttttacagagtcttgctctgttacccaggttggagtgcagaggcatgatcttggcttactacaacctccgcctcccggattcaagcaattatcctacctcagccttccaagtagctgggactacaagtgtgagccaccatgccctgctaatttttttatttttactaaagacgggatttcaccacattagccaggctggtctccaactcctgatttaaagtaatctgcctgccttggccttccgaagtgctgagattacaggtgcgagtcaccgtgcctggcctattcctgttttcttaacgctcctctctcccactgggccgtgactgcctctaaggcagagatgtgttcatttttattattattgtatgtccagggctgggcacaaagtgcaacacatagtagggacatgaaaggctgggcacagtggctcatggttgtaatcccagcactttgggaggcagaggcgggaggatggcttgaggccaggagttggagaccagcctaggcaacagagggaccccatctctatgaaaaaaaaaaaaaaaaattgacagttcaatgtcacctctgataagccttccctgaccacccctgttactctgtagccccatgtcctgctttatttttctccaaagcatttatcatcgctgggtttatatttatttctcttcgggcttttctcactggatcgtaaactccatgaggacagggctttgtcgatttcactcaataccgttattttacaacatccctattgctgggatctcagtatgcactccttaaatatttgcagaatttaagtgccacataagtgaccacgtgggcaacgccctcggggccttaagccgcgccatttttggggctaggattggttggaccctccgtcacgtgacatgcagtcgccggatcgcctttgagtctcgtgaggtacttttggtcccaggctccgcggacgaggtactgcgcasgcgtgggagggtctgcgcatgcgcasaarcactccgggmgtgctgccggcggcggtaggtggcgcgcgggtccggcgggcggttggcttgagcgggaccggagctgaggcaggaagagccggcgccatggtggagaaggaggaggctggcggcggcattagcgaggaggaggcggcacagtatgaccggcagatccgcctgtggggactggaggcccagaaacggtcagggccggcgcggcttgaggccgcnagggtctggagggggcgtctattctgaggcgtttgcggcccggaaggagcgggaaggtgtgatttgaagggaggaggcgggaattctgtgctctgggatcgtctctctcttggggggactggaggagttgattggggatgtttctggaaggtctgggaagtggttgggagggccgttccgaaggatgggagctctgaagggggcgttggggagtcctgagagagcgggagaattcaaactcaggaaatccgaggcccgaaagcggtgattgtggggtttgatcgcggttaggggataagaggggctggggatacgtggaaagggtgaggtgagggacgcagttcattcattcgagggtatgggacctggttccgtgctgcacacaggggagactggactggccaaccggacagacgggagcttacactcttgtgggagctcacgggcgggccagtctgagagaatgcgggttttgaggagttttggagcaagttatctcaaatgggaatcttgagaggctcggagaggctggagggggacggccgtaggctcccgaaaaggttgcttgtgtttggtatggggctgtgtcttgataggacaggagacgtagtttgggcattgtggagtagcttagggaattctttttttttttttttttttttttgagatagtctctctctgtcgcccaggctggagggcagtkgcgcgatctcggctcactgcaacctctgcctcccggattcaagcgattctcctaactcagcctcccgagtagctgggattataggggcccgccagcacgcccggctaatttttgtatttttagtagacacggggtttcgccatattgacgagactggtctcgatctccttacctcaagtgatccacccgcctcggcctcctgaagtgctgggattacaggagtgagccaccgcgscaggacgtcttttgttttgtgcagttgggtgayctcggttcactgcagcctctggcctcccgggttcaagacttcctctcacctcagtcttctgagtagctgggattacaggctcgcgccaccatgcctggctaatttttgtatttttagtagacatgggttttcaccatgttggccaggctggtctcaaactccggacctcaagtgatctgcccgccacagcctcccaaagtggttggattacagacgtgagccactgtgcccagcttgttttttttttttttctttctctgtggcccagtggagtgcagtggtgggatcacagctcactgtagcctcaacctccaaggctcaagggatattccctcttcagcctcccaagtagctgggactacaggcgtgccccaccacatcatccgactaatttttgtttttttttttttttgtaggatggggttttgccatgttgcccagactggtcttgaactcccaagctcaagcgatcctcggcctcaagagatctccccccatctcagactcctaaaatgctgggattacaggcatgagctaccatgcctggcctcattgatcaatatttttacttagcctggacgcagtgactcacacctgtaatcccagcactttgggaagctgagttggggggaggggacctcttgagcccaggagtttgagactagcctgggtaatgttgccaaacccagtctctacaaaaaaatacaaaaattagccaggcatggtgacataagtttatagtcccagcttgtcaggagactgaggtgggagcatcacctgagcccctgggaggtggaggttgcagtgagccatgatcacaccactacaccccagcctgggtgacagagtgaggccccgtctcaaaaaaaaaaaaaaaatccacaagcgtgtgtatatgtgtcagttattaaaggatggtgaagtgagagggttgttttgataggttggccagggaagggctctgaagaggtaacattgagcctcagacttatatgggaaagagccctgtggtcatctgggagaactttcctagctaagagaacagcaagtgcaaattcccagaggcccaggcatgattgtcaaattagagaaataaggtggcaggaaccaaatgatttgaggagtagcttttattctaagtgtgtgggaaaacctgttggagtgttttgagtgtgggagtaacatgatctgttttttgtttgttttttgagacggagtcttgctctgtggcccaggctggagtgcaatggcacgatctcggctcactgccattgcagtgaatccgcctcccaggttcaagcgattctcctgcctcaccttcctgagtagctgggactatcggcatgtgccacaacacccggctaatcttgagtatttttagtagagacggggtttcaccatgttagacaggatagtctcgatctcctgacctcgtgatccgcctgccttgggctcccaaagtgctgtgattacaggcgtgagccactgcggcctggcctggtttgtgttttaaaatgatcgctccagaataggttaaagtggkcagaaatggaagtaaagattctggctggactgttgcagtaatccagttgagataaaaatattggtggcttgaaactcaagagaaggggtcaaataaatatattctggatatattttgaaggtagaagagggaacagaatttggggcagaagtccaggatgacaccactgtttttggcttgagcacctacctggaacgatggaattgccattttgaaagatatggagagctgtaggtttggtggggtcggggaagagtcagttctcttttaggtttcagatttgttttttttgtttgttttttttttttttgagacggagtctcactctgtcgcccaggctggagtgcagtggcatggtctcggctcactgcaacctctgcctcccaggttcaagcaattctcctgcctcagcctcccgagtagctgggattacaggcgcccgccaccatgcccagctaatttttgtatttttagtagagacggagtttcaccgtgttggtcaggctggtgttgaacccctgacctcgtgatccacctgcctcggcctcccaaagtgctgggattacaggtgtgagccaccatgcccggcctcagatttgtttttttatacaactaagtagaaatatgtgaggggttgagttcagaggtaaaatttgggtgatggtgggtattgtgtgagtacagagtatagaattaatggaggggttggggaggcagacacgtcaggagaatttagtttgagggggtgggagctttcagaaggttttagagggtgcagtggtgggatgggaattacctcaggctcatttcagatctgtggggtcttctttgatggggtggggggatgtcatcatgaggcattaacattggtgggagggttgaaggcacctggaatagattgggaattaagtgatgagaatgtgcctctgsacataggtggactgcattgattttagggactgctattttctggatggagtggaaagaggatttatgtgagttggaggaaactttgagraagcttggtgtgttctgagatcctaaagggttggggaggggattctaaggtactggaagggttaatcgaaggggtttgcggcagcagatagctttgtttraagtggggcaaagttggtgaggtttaawctggaatgtagttagggaactttcagagggatggggatgatttttctgagaagcagtgaagaatggatgggggcctctgagtgggagatgacctaagggacaagtcagggtcagggcatggaatttgtgggaggtaggaattattctgagggagtggagctgtaccaaatttggtggagmacatgaaaaggattggctgggggttgcaggagggagggaagaggttgtttgtaatttgtactctatttttagacagtcttagagagtttattaaagtgttttttgtccattttcagccgaggtttttagaaattaaaaatttttttgtgtgagtacatagtaggtgtatacattttgggggtatgtgagatactttgatacaggcatacaatgggtaataatcacatcagggtaaatggggtatccaccaccttaagcacttatcctttgtgttacaaacaatccaattatattcttttagttgctttgaaatgtacaacaaattattgttgactgtagtcaccctgttatgctatcaaatactgtatcttattcattgtatttawttatatttttgtatccattagtcatccctccttyccctccaccccccactacccttcctagcctctggtaaccctcagtctactatctgcatgagttcaattgttttaatttttttagttcccacaaataagtgacagcgtgcaaagttttctttctgtgcctgatttatttcacttaacataataacatccagtgccctccctgttgttgtaaatgacaggatctcattcccttttttttgtagacagggtctctctgtcgcgcagactagagtgcagtggtgtgatcacaactcacttcagccttgacttcttgggctcaggtgatcctcccacctcagcctcccggtagttgtgactatagcacgtgtcacaagcccagctaatattttagtacaggtggggtttcaccaggctagtctccaactcctgggctcaaataatcctcctgcctccctgcaaagtgctgggattagaggcgtgaacagcaatgcccagcctttgtaccacaatttctatttttttttttgaaacggagtctcgccgtgtcgcctaggctggagtaggctggagtgcagtggcgcagtcttggttcactgcaagctccgcctcccaggttcacgccattctcctgcctcagcctccctagtagctgggactacaggtgcccgccaccacgccyggctaatttctgtatttttagtagagacggggtttcaccttgttggccaggatggtctcaatctcctgacctcgtgtaccacaatttctttatccatttgtctgttgatagacatatgggttgctttcaaatcttggctattgtgaagagtgctgcaataaacatgggatttattgcagttttttttcttttgagaccgagcctcgctctgttgcccaggctagaggacagtggcacgatctcagcccagtacaatctccacctcccaggttcaagcgattctcctgcctaagcctcccaagtagctgagattacaggcacctgccaccacgcccggctaatctttgtattttttagtagagatggggttgctgtgttggccaggctggtctcaaactcctggcttcaggtgattggccctccttggccccccaaagtgttgcaattacaggcgtgagccaccacacccagcctgatttattttcatttgggtatatacctagcagtgggattgcatttttacccgagtctttttttttttttttttgagacggagtttcgctcttgttacccagactggagtatggtggcgtgatctcagctcaccgcaacccttgcctcccaggttcaagcaattcttctggttcagcctcccaagtagctgggattacaggcgtgtgccaccatgcccggctaattttgtattttagtagagacgggattcctccatgttggtcaggctgtgaactcctgacctcaggtgatccgcccgccttggcctcccaaagtgctgggattacaggcatgagccacagcccccggccttcacctgagtcttatagcagctctctggagtcggaagggcagtgatttccttctctgttcagatgaggaaggaggctccacagagcaaattgacttgcctctaagagggctctaggtgggataggagggttctaggtgggataggagaactctggagactggagttcctttatgaaacagaagccctggaaatgggcaggctgataaaatgtacaaattgtggggcattttataagacagttatcctacttctcttccaaaagtcagtttcatgggaaaaataagtgaagggactgttgtggattaaaagagagtaaaggccgtcacagtgactcagcctgtaatcccaggactttgagaggccgaggtgggtggatcacctgaggtcaggagttcgagactagcctggccaacatggtgaccgtctctactaaaaatacaaaaaaaattagccaggtgtggtggtgggtgcttgtaatcccaactacttgggaggctgaggcaggagaattgtttgaatccaggaggcagaggttttagtgagccaaggtcacactatcgcactccagcctgggtgacaagagcgaaactctgtctcaaaaataaataaataaaataaaataaagtaaagaagcagcttcctagagcagatttggttgcttaaattgaggccaagtttctggagtttttattgatagttgacaattacaactaaawtttttttttctcgctctgttacccaggctggagtgcagtgacgcagtgacgtgatcttcagctcactgcaacctccacctcccgggttcaagggattctcccgcctcagcccccaagtagctgggaccacaggcgtatgccatatcactcagctaattttgtgtgtgcatggcgtatgccgtaacactcagctgattgtgtgtgtgtgtgtgtgtgtgttgtttttttttttttttttgtgatggactctcactctgtcgcccaggctggagtgcagtggcacaatcttggctcactgcaacctccgcctcctgagttcaagcgattctcctgccttagcctctggagtagctcggattacaggcgcgtgccaccacacctggctgatttttatatttttagtagagacggggttttaccatgttggccaggctggtctcaaactcctcacttcaagtgatctgcccacctcggcctcccaaagtgctgggattacaggcgtgagccactacacccggcctatgtgtgtgtattttatttttttatttttttgagacggaatttctctcttgttgcccaggctggagtgcaatggcgtgatctagactcactgcaacctctgcctcccgggttcaggcaattctcctgcctcagcctcctaagtagctgggattacaggcgcctgctaccgcgcccagctaatgtttgtatttttagtagagaccaggtttcgccatgttggccagggtggtcttgaactcctgacctcaggtgatctacccgcctcagcctccttaagtgctgggattacaggcatgagccactgcgcctggccagaagttaccttctttgtgcctgttttctcagctgcaaaagaggggtaacaaagtgccagcccattagattgtcatgggaattaaatgacataatacatacaaagagcttagtagaacagtgcttggcacatagtaagtgttagataaatgttggccattattattttattatgtaccagatttctataattctgctgatggacacaggtttgttttggtgtgtctattaattcacagccatttgagtaacagtatgtcctaaatgccaaggaagttactggttctagtgatacagtggtttctggagtttacattstaatggaggagggggcagtaaacatataaacaagtagtgtagcttagcacagtggtgtgtggctgtgatcccagctactggggaggctgaggttggaggatcacttgagccaggcaattgagactagcttgggcaacttagtgaggccccatttcaatcaaaacagtgggcaacacagaccccatcttaatcaaaacaaaaacaagtagcataattcgagatagaagaggatgtggacctattttaaattaggtggccagtatggacttctctaaggaggtgacaattgagctgagacctaaagaatgtgtcccttaagaagttgagggaagaagcaatgggaagcactaatgccaaggtcctaaggtgggagcaaggatgggagcaaggatgatgttctctaggatcagcctcccgagtagctgggactacaggcacgtgccaccacgcctggctaatttttgtattttgagtagagatggagtttcaccatattggccaggctggtctcgaactcctgacctcaagtgatccgaccgcctcggctaattttgtgtatttttagtagagacggggtttcaccgtgttagccacgatggtctccatctcctgaactcatggtcctcccaccttggcctcccaaagtgctgggattacaggcgtgagtcgccgcgcctggcacacccagctaatttttttttgttttgtacagatggagtcttactttgttgcccaggctggtttcgaactcatgggctcaagtgatcctcatgccttgccctcctaaagtgctgggattacaggtgtgacccactgcgtccagcctgctgtagttttgtcggagagaaacgatggtggctcaractagagtggtgtttgtggaacttgagggaagtagatggacaatgctgctgtgaatgtgtatctttttttttttttttttttgagacagagtctcactcttgtcacccaggctggagtgcagtggcgcgatctcggctcactgcaagctacaccttccgggttcacaccattctcctgtctcagcctcccgagtagctgggactacaggcacccgccaccactcccggccaatttttttttttttttttttgtatttttagtagaaacggggttttaccatgttagccaggatgatctcaatctcctgacctcgtgatctgcccgccttggcctcccaaagtgttgggattataggcgtgaggcaccgtgccctgctgaatgtgtatcatttttgtgcccacttgggtatttctttttttttttttttttttgagacggagtctcgctctttcgtccaggctgaagtgcaatggtgcggtctcggctcactgcaacctccgcctcccgggttcaagcgattctcctgcctcagcttcccgagtagctgagattacaggcgcctgccaccactcccggctaattttttttttttttctttttgaaacagacccttgttctgttgcccaggatggaatgcagtggcgccatctcggctcactgcaaactccacctcccgggttcacgccattctcttgccttagcctcccgagtagctgggactacaggcgcccgccaccatgcccagctaattttttatatttttagtagagatagggtttcaccttgttagccaggatggtctcggtcttctgacctcgtgatctgcctgtctcggcctcccaaagtgctgggattacaggtgtgagccaccgtgcccagcccacgcccggctaatttttgtaattttagtagagatggggtttcaccatgttggccaggctggtctcgaactcctgacttcaggtgatctacccaccttggcctcccaaagtgatgggatttgtaaacccagcactttgagggaggcagaggcaggaagattgcttgagcccaggagctggagatgagcctgggcaacatagtgagaccctgtgtctacaaaaaaaaaaaaaaacccataaatcagccaggtgcagtggtgtgcacctatagtcccaggactcaataggccgaggtggcgggatcacttgaacctgggaggttgaggctgcagcgagccctgatcttgccactgcccttcaatctgggttcacagaatgagaccctgtttcaataaaacaaaacgtaaacatggtatttggtgttgatggcagttgagtatttaatttaatttaatttaattttttttgagacggagtctgtcacctgggatggagtgcagyggcacagtcttggctcattgaaacctctgcctctcaggttcaagcgattctcctgcctcagcctcccaaatagctaggattacaggtgcccgccaccaacatgcccagctaattttttttttttaaacagagtctcgctgtgtcacccagactggcatgatctccgcttactgcaacctccgcctcccaggtttgagtgattctcctgcctcactgtcccgagtaactgggactacaggcgcctgccaccacgcctggctaatttttgtattttctgtagagacacggttttgccatgttagccaggctggtctcgaacccctggactcaagtgatctgcccgccttggcctcccaaagtgctgggattacaggcgtgagcccccacgcctggccataattttttttgtatttttagtagagagggtgtttcaccatgttggacaggctggtctcgaactcctgacctcaggtgatccacccatctcagcctcccaaagtgctgggattacaggcatgagtcaccgggcccggctgaataatgaattttaaacaactgcagagcagtctgtagagctatgtaggaatgtaggtcgtggagagcagatttattgtcagggactttttatatgtagctgttgctggaagagttcggggagggggagtgcttgctggtattgactcagccatgataaaaaagcctttttttgaggaaatggcattggagttgggttttgaaggggaaaggcgtaggtaggcattgagaggaagaaatggtgcattttgcgagggtggaatgttgtgattaaattttatttaatttttaattaaattaatagcaaactcttaccagcagaacttaaattgtgtgaaaattattcttagttattactaaatccttttcagtatgaataatacatttgctgcagaattattaatgagtttggttacatgatgcagcccaagatcttgatgagttgtttcataatacatgatgtaaagtctgtatttcctttttgaaatctgaaaaaattgtgactctgaaatacttctggttcaagagatttcagataagatatagttgacctattctgcttcctactgacctcagagaagtcttgggatggcctgacctctgattgccttttttcagcctcatcttctgtcactttacagatttaaaaagctaaaaacaaggctgggcacggtggctcatgcctgtaatcccagcactttgggaggctgaggcaggtggatcacttgaggtcaggggttcgagaccagcctgaacaacatggtgaaactccgtctgtaccaaaaatacaaaaactagccaggcgtgacagtaggcgcctgtaatcccagctactcgggaggctgaggcaggagaattgcttggacctgggaggcggaggttgtagtgagctgagatcacgccactgcactccagcctgggcaacagagcgagactctgtctttaaaaaaaaaaaaaaaaaggtaaaagcaattcctgtgtacatgctcttttcatgccaccatgtgttttgcttgtgtgttatacttaactagtgcctcttctcagcacctcttctgctgtcatgctagtttgagccaccatcatcctccctcaccttaactgtgacatcttcctacccccatggctttccatcatgcctcgaagaaaatccagaatccttccattgcatgtaagagccttcatgatgtggccccttgttccaacttttcagcctctctgtcattcctgtccctagaacatgccaagcactcctgcttcagggcttttgcatttgctgttttctctatctggaatgttctgctgccaaatatctgtgtgtttgtcctttatttcattttgatttttgctcatatggcatctcctcagaaaggcttgtatgatttctgtctcaaatagcgttctccatcattcttgattcttgtcacacttgattttcatcactttttcacatattatgtatctatttgtttatctgtctcctactttttcatgagggcagggactatgtctgattcaccgccttatttccacaccatagaaggatgcctggcatagttggtactcaataaatatttgttgaatgaattgttttgtgcagtatggattagagcctgtctctttcctagattcgaggtgtgatgcctcaatgcagttagaaccaaaatgatttttttttttttgagacggagtctcactcttgttgcccaagttgaagtgcagtggcatgatctcggctcactgcaacctccgcctcatggtttcaagtgattctcctgcctcagcctcccaagtagctgagattacaggcgcctgccactacgcccagctagtttttgtattttagtagagacggggtttcaccgtgttggtcaggctggtctcgaactcctgacctcaagtgatccgcctatctcagcctcctaaagtgctgggattacaggcatgagccaccgtgcctggcaaaccaaaatgatttgtgtattttttgttcttctgtgattctgcaagctcactgttctgtatcatcaggttaacaatgtttgtcttacaggctgcgggcctctcgggtgcttcttgtcggcttgaaaggacttggggctgaaattgccaagaatctcatcttggcaggagtgaaaggactgaccatgctggatcacgaacaggtgcgctgttgtgagctcattcctcccctgctctggctcccctttccagcatgaagatctgcagattttgtgagttcctccttgtgccttaagggctgtgaaaggagggctaacattaataaaccattgcctctggagactgaaggtgctattgttgggtttgaattctagctccaccacatctagctggatgagcagtagagactcacaccccctcattgagcttgcctgcctgtaaaatggggttagtaatatctcccttggtggttgcttgtgaggaggtgtagagaagtgtttttccaatttgtgcctaaaaatgacctgagtgactaactgaaaatgcagagtggcctggaggcttcgtggtgccctagctttcacccctagtgattctcatttaggtctgaggcgagctcaggagtatgtgcatttaaaaggtgttttagggctggacgcagtggctcatgcctgtaatcccaacactttggaaggctgaggcaggcggatcatctgaggtcaggagtttgagactagcctggccaacatggcgaaactctgtctgtactcagtatacaaaaattagccaggcatgttggtgtgcacctgtaatcccagctactcgggaggctgaggcacaagaatcgcttgaatctgggaggtggagtttgcagtgagctgagatggcaccactgcactccagcctgggcaacagagtgagactttgccttaaaaagaaataaattaatgaaaggtgtttcaggagattatgatttagatggtccacagacatcactttaaaaaacactggatcaggccaggcacagtggctcatgcctgtaatcccagcactttgggaggctgaggcgggcagatcatgaggtcaggagatcgagaccatcctggctagcacggtgaaaccccatcactactaaagacacaaaaaattagcagggcttggtggcgggcgcctgtggtcccagctactcgggaggctgaggcaagagaatggcgtgaacctgggaggcggagcttgcaaygagccgagatcatgccactgcactccagccttggcaacagagtgagactccgtttcaacaacaacaacaacaaaaacaaacaaaaacaaacaacactggatcagagagaatgtgggcagactgctttgtatagtgcttgaacctaacaagtatccagtaattaggaataatgatctgacatgctgtttgtttgtttgtgtgtttttgcgagacgagtcttgctgtgatgcccagactggagtgcaatggcgcaatctccgcacactgcaacctccgcttcccgggctcaagtgattctcctgcctcagcctctgaagtagctgggattacaggcacgcaccaccacgcctggctaagttttgttttgttttttttttgagacggagtttagctcttgttgcccaggctggagtgcaatggcgtgatcttggctcactgcaacctctgcctcccaggttcaagcaattctcctgcctcaatctcccgagtagctgggattacaggcatgcaacaccatgcctggctaatttaacgtttttagtagagaccgggtttctccatgttggtcaagctggtcttgaactccgacctcaggtgatcctcccacctcggcctcccaaagtgctgggattgcaggcgtgagccaccgcacccggccatgcctggctaagttttgttatttttagtagagatggggtttcaccatattggccaggttggtctcgaactcctgacctcaggtgatccgctggcctcggcctcccaaagtgcggtgattacaggtgtgagctaccatcccctgctgacataatgctgtttgattaatattataatggtagagcccaactccaatgtagctttctctgaccaggctcatcttcaaggtgaaaataagtgctgctctctctacattcccatgcctcagtgacrttttatttattttatttatttattttgagacaaagacttactctgtcgcccaggctggagtacagtgacacaacctcagctcactgcaacctctgcctcccgggttcaagcacttctcctgcctcagcttccctagtagctgggattacataattacttcatctggttgtaagaatccaacattggaggccaatcacagaacagtgcgattctgacaccacaggtgtgaggccactgcacccatcttagagcgtattatgtagtttacattcaacaagcatctgagagcacctactgggtgccctgaagtctgctaggtgctggtgatwgaaagatgctcacggtttggttcccattctcaaggttttttttttttttttttccggaaaccatagcaggctccctgactgaggttgtggtacatgaaagatttcctggagtcctgatctgagctaagtcttaaagaacaaggagggtttgtcaagataagagcctgtgttttaggcaggggacatagcagtgtcacaaaggcaccctacagtgtggtagaaatggaagctaaaagtagtttggtgtttttagagtgtgagacccaaagtggtgggtagggacaggttgctggtgaagtccaagtcaggaggggctcctaggaagccccactgtaagcttttacttaatcctctgggtggtgcagactcactgaagagtttcaaatgacaggaagggtgacatggttagctttgggctttatgtgtagatcagtaattactgtataaactatggttggcacaaaatacagggcagaagaccacttagaaggcagtttttagtagtttaggtgagaggtgaaagtggccttgctgatagggatggcaggaagcacacagatgtgagaaatagatttaggtggtagaattgggaggtctgtgtatgggagcttaaggaaagccaggaataaccagagcagctgacactgaaggggctaggcactgttctcagagctgcagttgtattatctcattgagtcctcacaacacatctgagatcaaggacccattaccatccctgttttacagatgggaaaactgagtaaaaggaagaaaagtactggcccatccaaggccccagtagttagtggtacggccgggacccaggcatctgactccagagcccatgttctcagccacctcactatggaccactctcatggaaatagcaaggatatgaagatgaggcttctggcttgagtgactgggtgggtggctggtggactccggagacagcacacagaagcaggcagacatgtagggtttatggatatctgagagaaaacggctggtgggcagtacagtagagaagactcaggtggatcaggaagaaatctgcaccagaaagagtgatttgaaaaataacagcagattttggtagaaactgaaagaggcattgagttggtttatggagctatacagagtggaaagataagtaattctgagatggaagcttggggacagccacacctaagagggcccaaattgagactagaatgtgtagcacgagaggagagcaaagcaaggaaggtgtgatctgtggactgatagtgatgaaatgataattgtatgtgtatgggtttttttttttttttttttttttttttgaggcagtctcactgttacccttgccggaatgcagtgggcatgatcatggctcactgtagccttaacttcctgggctcagggtattctcccacttaagcctcccagtagttgggactacaggtgcacgccaccacacctggctaattttttgtattttttgtagagactgggtttcatgattgttgctcaggctggtcttgaactttctgggctcaattatatgttttttttgtttgtttttttgagatggagtctcacttgtcgcccaggccggagtgcagtggtgagatcttggctcactgcaacctccgcctcctgggttcaagtgattctcctgtctcagcctcccaagtagctaggattacaggcgtgtgccaccacacccggctaatttttgtatttttagtagagatggggtttcaccatgttggctaggctggtctcgaacttctgacctcaagtgatccacccacctcagcctcccaagctgctgggtttacaggtgtgagccaccgtgcccagcctcaactgtatttttttttttttttgagacagagtctcgctctgttgcccaggctggagtgcagtggcgcgatcttggctcactgcaagctctgcctcccgggttcacaccattctcctgcctcagcctccctagtagctgggactacaggcgcccaccaccacgcctggctaatttttttgtattttttagtagagatggggtttcaccgtattagccaggatggtctcgatctcctgacctcgtgatctgcctgccttggcctcccaaagtgctgggattacaggcgtgagccaccacgcgtggccctcaactgtacgtttttatccatgtcctcgttttatatgggattcccacattcttgctgaggttcacacagttgttgagccaggatttgaatcaaagattgaatccagcctgaattatttcagagccttactgttaaccattgtgtggtacagcttctcagcacataatgagatccctgaagaagcaggatggaatgggtcaaggatacagggttagcctagaatgggaagtgggccagctcattttcttggaggagaaggtagtaagatagagagtgtgctgtggatggttggtaggaggtgttgaggggagattacttctgttgtacctagtcttggtgaaggtggcaaggttatttgcagagattaatggttaaattagatgtttgatgtgtgaagaaatactttgagagcagtatggaatctgtaatcttactggtggctattaggggattatattatcctgtctttgaggctctgctctgctgatgttcagccttaggggtgaaataattcctstgttccagtccccactcatctctccacctctctgagttctttttttttttttttgagacagagtctcactctgttgcccaggctggagtgcagtggcacgacctgggctcaatgcagcgtctgcctcccaggttcaagcgattctcctgcctcagcctcccgagtagctggaattacaggcgtgtgccaccacgtccggctaattttgtatttttagtagagatggggtttcaccatgttggtcaggctggttttgaactctggacctcaggtgatctgcctgcctcggcctcccaaagtgctgggattacaagcgtgagccaccgcacctggccatagtctatctatgttttttaaaagttcatttcaagcattyttaattgtgtctgatttttgcacaagtttgattttttttttaagttttctcatgaggttgcaatttttgttgttttttgagagagggcctctctgtgttgtccaggctagtcttgagctcctggcctcaagcagtgatcctcctgctttggcgtcccaaattgctgggattacagatgtgagctactgtgccaggctgcactggtctactttttttttttttttttttttttttgagacggagtcttgctctgttgcccaggctggagtacagtggtgcaatcgcagctcactgcaacctccgcctcccstgttgaagtgattctcctgcctcagcctcctgggtagctgggattacaggcacacaccaccacacctggcttatttttgtatttttagtagagatggcatttcaccatgttggccaggttggtctcaaactcctgacctcaggtgatcctcctgcctcggcctcccaaagtgctgggattacaggtgtgagccaccgtgccctgcccacactggtctagttttaaaccactggaagacagagatttaatcctttaaactacttgtgtatttccccaaatgcttatagttgggcacatgctaagtatttagtcaattcttgccactgttaatcagtcatttgttagcagttacaaatttgcatagaagaagaaagcatggatttttttgttgacagtgaattttctttataaacacaagggggtgctctttaaccatcaatgaccagtttaaaaaaagtttaaagtcattttaaagccttagaaggaagcctgcataaggcaaattgctacaggaacagtaatacattttagggctgtgcacagtgtttcatgcctgtaatctcagcactttgggaggctgaggcaggcggatcaygaggtcaagagattgagaccatcctggcaaacgtggtgaaaccctgtctctactaaaaatacaaaaattagctgttgtggtggtgcgtgcttgtagtcccagctayttgggaggctgaggcaggaggagaatcatttgaacccaggaggcggaggttgcaatgagccgagatcatgccactgcactccagcctggtgacagagcaagactgtctcaaaaaaaaaaaaaaaaaaaaaatttaggtggtaggtattttagctatcctttaaaatttaaagattctttttaagatttattttccctaaaaatacaagacttaaaaaaatatgtgtattattcctaggtaactccagaagatcccggagctcagttcttgattcgtactgggtctgttggccgaaatagggctgaagcctctttggagcgagctcagaatctcaaccccatggtggatgtgaaggtggacactgaggatatagagaagaaaccagagtcatttttcactcaattcgatgctgtaagtttcttattataaaatctgctgtgggaattaaacaaattaaggtgctagttgtatatactttcaaatcccaaagcaatctgagagcattcaaatatcaaattctgagctttttcccaagaaaatgtataagctgttctattgtttaggcttagtatattgtgtgaatgtgttgctagagaggtccagtctgttgcatctgctgtagttgttggtgacttgctgtctgctggcttcttctctgggcatatgttccctcagccaggtttcgtctttggtgttttgtcttccttccagaatctttgcacataactttaatccatgttattgcaaatgttttcttccgaaaacttaacaagttggtgattaatttctgtggcagcggcatttttttgttagaaatatcaaactacagcttgtgttttgtcttaagaaaagcacacctgatcttgatctatgtctgtctgtctgtttctcacagtcacattgaccatgttgccatggataactagagaaaaatcactgtagtcgtaagtcaaatgaggcatatccagcctcatttagtttcactgccaaatctatgcggaggtgaaaggataaattctttgtcaatatctgcaacctttcagacatagttccctgcattctggaaaagcttaacaaatcttgataaatgtgaaatagtcatagatgagctactagttttttaaatgaaaggccccagtatgttacatgagaggttagaatttgggttgggtagttttttttttttgcacctttttttatttgagatggagttttgctcttgtcgcccaggctggagtgcaattgtgcgatcttggctcatggcaacctctgcctcctgggttcaagtgattctcctgcctcagcctcccaagtagctaggattacaggcactcaccaccatgctgggctaattttttgtatttttagtagagatggggtttcaccatgttggtcaggctggtcttgaacccctgacctcaggtaatccacctgcctcggcctcccaaagtggtgggattacaggtgtgagccactgcacctggcctgttttttacacttttctttctttctttctttcttttttgagatggagtctcactctgtcgcccaggctggagtgcagtggcatgatcttggctcactgcaacctccgcctccctggtttaagcagttttctgcctcagcctcccgtttttacacttttctatttcatatgtgcatctgttcaaatatgggcttggaaggatggatcatctgtgcatttgtcctgttttctttttcctagtcccttctattttttaacttgaggtattgggacactttccatttggacataagtcttcattttcttatctgtagtaaccacatttattttatgccaggtgtcccttgaacttgtagagttagagggtttgttaaaactgaagtgtgaggccagttgattgtgtaatgcgtgtgcatggggccatgttgaccgccttgcaggccgtgtttggctggtccttgcaggttttatagttactttagactctgcagggttccatttgatcaattggttgcatgttcacctgtggatttcttactttttagatgggatttttccttgggtggctgcattctttgaaacaccaaaggaacacatttctctgtgagtgttatttcggtattcaggctgctagacaacagcaaagagggtctatcaagtgaaaatgtccttttgttcaggagaaagcatgtgcaatttggaagttgtcttttgaccatgatcacaaagcttctcccgaaaagatggtattttgtgcagtagaacttagccatttccaatacctcaacttactggaatacaacctggaggccccagagcaacactgataattccactgagtggatcaccagttcattgtctaagcctgaatggaaggtcacttggtctgtaaccttttcttttgtccttaaattcagataaagtttcacaccgcaatctgtggaaaaatgatctcaacaggacttgtttatcttctttatcttaacatatcaatcaaaaggaggggggtaaaaagcccttgtatttaaacatgacctttgggtcaatttaaaaaactggttttgcttgtccctgtagcttatttggattttaatagatttagcagtatagaaacaacttgctaagttattttttttatgagaactatgaaatgtgtatatgttcgtggattacagaaaacatttgttgaatggcttttactttttagctaaacacattttattttggctgcagaacgtgacggtctcataacttatattttctacacattgaaacctgcaacttttcttttgtcttctagccatagggcccaaagaacctgttgtaccagtttgaaacatgctttgagcatgcccagagagactgttcattaagatttatttagacatcagggcagtgattcacagtttgcaaaactcaaacccagccaatttctttctttctgcaggtgtgtctgacttgctgctccagggatgtcatagttaaagttgaccagatctgtcacaaaaatagcatcaagttctttacaggagatgtttttggctaccatggatacacatttgccaatctaggagagcatgagtttgtagagtaagtgttgggagaggagggragaacataacattttctcctttttatactttttttttttaaattatgtatttatttatgtgtagagacaggatctatgctatgttgttcaagctggtcttgaactcctgggctcaagtgatcctcccaccttggcctcccaaagtgctgggattataggcatgatccactgcgcctggtctgctgacatgttttcaagttgagagatagtaaaatgattacaaaatagttgggcgattctggaggcatattcaaccaaagtctaccttggaaaaggtgtccaatatccagagagactcctctggtagaacaaacagacctcatcctctcattttgaacactgaggctgcagaacttggtaattcttacatgacaggacttgccgtgttttgactttgtagtctctaggtgaaagatggcagatgatacattattgtaaaactatatgagttaggtattttggctgcagtttctgaccaccccctccaaaaccctccaacttgctaattgagagggaaagacaggctctgtgagataggagcttcctaccaagagactgagaactcttctcttgttcagcctctcaggcaagtcactgaaatttctctggtctccaagtttcttgcctgtaaaatcaagatgggggaaggacagtcatgttccagacatctcctaactctagtgttttatggctttaggataatctagttctttgggcatattattattattattattttattttttgagacggagttttgctgttgttgcccaggctggagtgcaatggcaccatctcagttcagaacaatctctgcctcctgggttcaagccattctcctgcctcagcctccggagtagctgagattacaggcatgcgtcaccatgcctggctaattttgtatttttagtagagacagggtttttccatgttggtcaggctggtcttgaactccggacctcaggtgatccacccacctcggcctcccaaagtgctgggattacacaggcgtgagccaccgcacccggctattattattatttttgagacggagttttgcttttgtcacccaggctggagtgccatggcacgatcttggctcactgcaacctccacctcctggattcaagtggttctcctgcttcagcttcctgagtagctgggactgcaggcacccgccaccatgcccggcaaatttttgtatttttagcagagacggggtttcactatgttggctatgctggtcttgaactcctgacctcaggtggtccacccacctcagcttcacaaagtactaggattacagccaccatgcctggcttctttgggtatattataaagaagttatagtagtgggaagcaatccagattattttaacataagctgcccacagcagaggggcagaattaagtttggcttttttttttttttttttttttttttttttctgagacagactttcactcagttgcccaggctggagtacagtggcgtgatctcagctcattgcaacctcctcctcctggggtcaaccaattctcctgcctcagcctcccaagtagctgggattacaggcgcccaccaccacgcccggctagttttttgtatttttagtagagacggggttttgctatgttggccaggatggtctcaaacccttgacctcaggtgacacgcccgccttggcctcccacagtgctgggattacaggcgtgagccactgcacccagccaagtttggctatttatttcatgattcaagtagagtgtttacaaagtaatcactttgatttattgagagcagctgtgtgcccagcagtgtgctgagcaacttacgctgctctgtttttcccacaataatttcctgagtgcccaacagtgtaccagactcatcatgttatcaatggcagagctcgatttgaaccgagatctgactccaaagcttttgcccttaaccaccatcccgatctgtgacctggagaggctttttttgattccaayaacatgattcctagggtaaaattacattctctccccttgtcaccctctagggagaaaactaaagttgccaaagttagccaaggagtagaagatgggcccgacaccaagagagcaaaacttgattcttctgagacaacgatggtcaaaaaggtatgtgtaacrtgggggcagaggtcagaaaccctggggccttggaggggtcaggcaatgacgattgaaaaggataagagcaagcacttcttgaaggggtggggcgggtgcttgtcccatctaaagggaggctgccacagcttagtgtcagccagctgttgctgtgagggaatgtgggcccagtgattccagatgggatttttcaagacaatgagaaatgcaaacttttgtaggctctgtcccaaacttttttttttgtgtgtgtgagatggaattttttcttgtcgctcaggctggagtgcaatggcatgatctcggctcactacagcctccacctcctgggttcaagcaattctcctgcctcatcctcccaagtagcacccctggctaatttttttttgtatttttagtagagacggggtttcaccatgttggccaggctggtctcgaactcctgacctcaggtgatccacccgcctcagcctcccaaagtgctgggattacaggcgtgagccaccatgcccggccccataccctttttttttttttttttgagatggagtcttgctgtgtccaggctggagtggcacaatctcagctcactgcaacctccacgtcccaggttcaagagattttcctgcctcagcctcccaagtagctgggactacaggtgtgtgccaccacacccagctaatttttgtatttttagtagagacggggttccaccatgttggccaggatggtatttatctcttgacctcgtggtccacctgcctcagccccacaaagtgctgggattacaggcatgagccaccatgcccgaccagaaaacttttttttttaaagcagcaaaacaccagccctgggttacagtagcaagaccccgtgtctacaaaaaaaatgtaaaaatttgtctggcgtgatggtgagcacctgtaggcccagctactcataggctgagctgggaggattgtttgagcctgggaggtggaggctgcagtgagccatggtcacaccactgcaccccaacctgggccacctagcaagatcctgtctaaaaaaaaaaaaagcaaaacaaaaaattttttgtattttctctactaacaatacaaaaattagctgggcaaggtggtgcgttgcttgtagtcccagctacttgggaggctgaggcaggagaatagcttgaactggggaggcggatgttgcagtgagccgagacggcaacactgcactccagcctggcgacagaacgagactctgtctccaaaaaaaaaagttttctttgcctgtttttttccttttgccaaataacctttaataagaaaaatccttcaatgttgtcttgctgtgtccaggctggagtggcacaatctcagctcactgcaacctccacgtcccaggttcaagagattttcctgcctcagcctcccaagtagctgggactacaggtgtgtgccaccacacccagctaatttttgtatttttagtagagatggggttccaccatgttggccaggatggtatgaatcctcagattcatatttgttaatgtagtttatattaggggctcagcctctatttggattaggtgcaataattacatttatagaaaggagtggagaagggatcagaagacgatggtttctgtagctagtgctggaatctgagatgggaaccatgcgatggggaaagcaagatgaaggggccagaattggtttcattgaactgagaggaaagacatgaccaagcccatatttactctttgctttgtagatttaaatgttgagaaagaaaaacagctggtcagaatgttgagttaaattacgctaacgaggggattctaaagagtgcagaaaccacaaaagagactgcagaaaaccacaaaagtggaactctcagactctccagcaaggcggcgttggagattttctttctcattttgtgtttgtgttggagtagtttggtgctgtaagtgtgatacagargaattaagccctaattttagtgtctattcacagaaccataattatccagagtgaaccttggtgttttggccaaaacttgggtgcctttctttctttttgaggcccagtcaagatttatctgaatagctccgtgaatttggtggggggagataaattgttaacaaacggaggagtacaaaagctgctttgtgggtgctgtcagtttataaatcacaccctcttacaagtgtgacacttggccttggtgtgaagggttttatggcttaagggccttctctgattgaggcaggtctttcacattcaaatggagagagtgcctagctttgttagccattcacagctggaagtttccctggagtcagttctgatggtgcccactggggtggatctggaaacctcttttgggaaccactttatctcgctatgaggagaatgtgggcagcccaggcctttgcccaccattccggagggccctacaggcacagaggtttttgtgcagcctcttcctacgtggagctgagctggaaggtatcaaaatattccccagctgacattgttagtcagctgttacacttgaacaatgcaggctcggattccaaccccaagcccttaaggttacgaggcattcagtgcattcctgctgacaatccctgggattccaaaccttgcctttgtgcascctcaccaagggccctgcggaccgactgggctggactgggttttggccatggctttgtcaccttgcaataacatgcctccttccgttttggcacagatggccctgtgatttcaaggttctcttccaacaccaaagattccttgattcagatgctgcccttttgcctaattgtacagaataactagttgggttgtgctcagagagtgcagggtgggggtggggaagcagctacttcctgtttcctgtgaaaggttttctggttagggttcccttcccctccccgctttccctaggtttaaccaaaggttgtaaagccacttttgcttcaaggtacactttgtgctcctaaattagtaacrttgaaaaacaaaaaggaaaaacagcctgtggttttcacaccctctaggaagctggtgggcctttctagcacctgtgccattctgataaataagggcttaggaaaatgcctagcccagaaataggtgctcagtagtttgtttgcttcctttggtgctcaggagaagatttgagacggatttcgtcacaatcaggtctcgggcacaagcctcacatggacactgacatgcaggagccagaggagacagcaatgaggtggtggtaaggaagtgcccaaaaaggtttcccagaggaagagttgtttgtgttggcatgtgagggacaagctttccaggcaccagagccaagagcagtgctctgtcckaggaagtaggataaaccgaaagacggacgtaggggcagagttgctgtggctgccctcactgccgcagccagctccttccatgagttgcagaatgcctactgtgtgcaaggcactgtgttgagtgcagggaatcacatccagtcttgttgtccccatctatagctgataaaraagctatgagaaattaagtgacctgaccaaggccacacagctgtggaagaaggggcgagagcatagacagtgggtaagggcataggctcaccctatgatttacaaagagggatacccctgaagttgctagggtaacgtgacatattaggaggatggtgggataaaatatgtgaacatcgggatcattctggaaaacctttaggataaaaggccactgtcatgctcccatgttcacgtttctttattgtgagttatctgtgttaggtgctgccagagatgatgagatgcctgacagtggttactctgtaatagctctttaaaaattaaagacaaagtagggtttgttcctgactgtactagaaatacagatttaattttacctctgctcctgaaataggtgactaatttggagtactattaatactcttttcatgaattagttgagaaattccacagttgaggagtgattcattcttttgactccctctttctgagcaatttgttgacagccttctcatcctctcttacacccgtcattaaagaaacagtcgagttctttttctttcatgtggtaccttggtttccactgctggtggcccttaggttgcttgtctctgtctccccgcttccattttaagctccatagggggaaggtagtcttgttcactgctagactcctagtccagtgtstagcacagtcatatccacggaatatttgttcagtgtactggtggctgttaactgcagcataatccagcaaccctggagattattttcttcctttttttttttttttctttgaagcagggtctgactactctgtcacctaggctgaagtgcagtggttcaaacactgctcactgcagcctcccaagtagctggaattacagacatccactacacctggctaatttttaatttttaaaaattattattatttctgagatggagtcttgctgtgtcacccaggctggagtgcagtggcacaatctcagctcactgcagcctctgcctcctgggttcaagcaattctcctgcctcagcttccggagtagctggaactgccagtgtgtgccaccacactcgactggtttttgtatttttagtagagacggtatttctccatattggccaggctggtctcgaactcctggcctcaagtgatccgcccactttggcctcccaaagtactgggattataggcgtgagccacagcttccagcctgattgtttccattttaaaaaagagtaattgaagtaacctttgttaccaatgaaatgaattaaccttctagtatattaattctcacggtttaggttatttgaactaagctgagagaacagaataccaaagaagacaatagacttgcccagaaatatttagaagtaagtcactcagttgcctggattggaaccctcaggccagagaggttcaaaatccygcatttttttttttttttttttttttttgagacagagtctcactctatcacccaagctggagtgcaatggtgcgatctcggctcactgcaacctccgcctcccgggtttaagcgattctcctgcgttagccttccgagtagctggaactacaggtgcgcgccaccacgcccagctaattttttttttttttttttttttttgagatggactctcgctctgtcgcccaggctggagtgcagtggtgcgatctcagctcactgcaagctccacctcctgggttcatgccgttctcctgcctcagcctcccgagtagctgggactacagatgcccgccgccatgcccgactaatttttttgtatttctagtagagatggggtttcaccgtgttagccaggatggtctcgatctcctgacctcgtgatccgcccacctcggcctcccaaagtgctgggattacaggcgtgagccaccgtgcccagcctaatttttgtatttttagtagaaacggggtttcaccatgttgaccaggatggtctcaatctcctgaccttgtgatccacccgcctcagcctcccaaagtgctgggattacaggcgtgagccaccactcctggccaatcctgctaattattaatatcagaactacttggttcaaaggagtggaaatagggcaacgaggggtgtaaatttgcagttaggtggaatgctgatagcaagttttccaggtaggagagttagttggggtgggggatgctaatgttagcttatctctgtatatatatttaattttatatgttatttatttttgagatgggatgtaactctgtagcccaggctggagtgcagtggcacaaacacagctcactgcagccttgaactcctgggctaaagggatcctcccacccacctcagtctccaaggtagctgggaccacaggcatgtgccaccatgctctgctaattttttcgggttttttttttttttttgagatctcttgctgtgttgcccaggctgatctcaaactcctggcctcaagtgatcctcttgccttggcctctcaaagtgctgagattataggcatgagccaccgtacccagcctatattttttttattgtgacatttaatgcacaaaagaagatatgcagcatcaatgcagataatggaacaaaacaaacactatccgccttaaaaacacaaatatttttggtacttttgtaccaatctgtatgctgtttctctatcttctacttcttctccctgtaccctcaccaggtaagtaaccccagagctgctggtacatttgtgtggattaaaaaagacacctggaaggggcagatacagccctgcttgacttcctgttttatcacgtgtttataaatctaaacaatgacatggaacttattatacaatattttaggcataaattaagaatgatttcgctcaccatcatagacctaccactcaatttgaagcatcaaacattactggtatggtgaggccctctggctgtccctccaacagaagttaccaccctcctcagttgggtttctcattcctatgcatttcttcttactacttatgtatgtatttccaagcaacacatagaattgctttgcatgctttttatcttcttaaaaattggttttatattgtatgcatggtgccacctgcttttaaggagaagcaacacgtttgtgaggccatctgtttatatgttgttctagggctttgctgtccattttggtagccactagccacagctggctgtttaaattaattaaaatcaaatcaaatcaaatatttagttcctcagtctcactggtcacatttcaagtggccagtaagcacatgtggccattggcatctgtattgcatagcacagattacattctgttccatcatcacagctagttctcttggacagccctgcagggcatttctttttggtttttgttttgtttttatttttgttttttgctagagtctttgttgtgtaaatacattactattttatatccatttttctatttataagcatttgggtatgctcataatttgctgttacaaattgtgctgcataagcattttgtttgtgtgtgtatagatgatctccttgggcaattgtgttaatttctcttgggtatatacctgggagtaaaattaagataagggcattttcagctttaccagaccccgttaagttactctcaagtggttttatcaatttatattctagaaccaacattatgtatcagtaacatttggtaacttcaggcgttttttttccattctgctgagtgtgaaaaatgtgttttgattatggttgtcatttgttagaatactttgttaaagctttttaaagattcttggtccctctaccctccccaccccctaccccaggaattttgattgggtaggacctggggattatattcatctttatatgcagaattatattacttgttactgttaggcctgatttaagaagtaaaataaggctgggtgcagtggctcatgcctgtaatcccagcactttgggaagccaaagtgggcacatcacttgagcccaggagtttgagaccagcctgggcaatgtggctaaaaccccttctctaccaaaaatacaaaaattagctgggcgtggtagcacgtgccagtggtctcagctactggggaagctgaggcgggaggattgcctgagcctggcaagtgtaggcagcagtgagctgagattgtgccactgtagtacatcctgggtgacagagcaacacactgtctcaaaaaaaaatttttttttaagtaaaataagttcataattccaaatgtggaaaatgcagaacaagttaatgaaatgttaatcctactaccaaatgataactataaccttcctttcagtatttttctatgtatatacaacaaaattggggcactgtttaatacagataatatatatagttagctctccttattaatgggcttcacattcatggattcaaccaactgtggatcaaaaatctttagtgtgcttggagtacatccaaaaaaaaaaaaagaaaattgaaattatgttaataataaaatatttgggaaaaaacattgcgtctatctgtaccaaacatgtacagactttttttcttgtcattattccctaagcaatacaatataacaactgtttacatagcaattccattaggtattataagtaatctagagatgatttaaagtatatgggaggccaggcgcagtgcctcacgcctgaaatcccagcactttgggaggccaaggcgggtggatcacttgaggtcaggagttggagaccagcctggccaacatggtgaaaccccatctctaacagaaatacaaaattagctgggcatggtggctcacacctgtaatcccagctactcaggaggctgaggcaggagaatcacttgaacttgggaggcagaggttgcagtgagccaagatcgcaccgttgcactccagcctgggcgacagagcaagactctatctcaaaaataaataaataaataaagtatatgggaggatgcacgtagagtatatgcaagtactgtgccatttatttatttagagacagagtcttgctttattgcccaggctggagcgcagtggcgtgatctccgtctcccaggttcaagtgatcctctggcctcagcctcccgagtagctgggattacaggcttgtgctaccacacccggctaagttttgtattttaagtagagggcgttttcaccttgttcgccaggctggtctcgaactcctgacctcaggtgatccgcccacatcggcctcccaaagttttgggattacaggcgtgagccattgcacctggcttgtatatgtgtatatatatgtacatggttttgtcttttgcttttttcactcaataagcattccccaaatctgctttggagcacatgattttattttatttttatttttttatttttttgagacgaagtctcgatctgtcgcccaggctggagtgcagtggcgcaatctcggctcactgcaagctctgcctcctgggttcacgccattctcctgcctcagcctcccgagtagctgggactacagacacccgccaccacacccggctaattttttgtatttttagtagagacgggtttcaccgtgttagctaggatggtctccatctgctgacctcgtgatccgcccgccttggcctcccaaagtgctgggattacaggcatgagccaccacgtctggcctggagcgcgtgattttaaatgtctgtgtcatttttcctcttcttgcctagccataatctattttaccagtcacctattgtattgaggttattgaggttattgcagtttcctactatgctaaatggctcctgacaacaaatttgatggttgatgggctatgtggagaattcacctttttttttttttttttttttttttttgagacagagtctttctctgtcacccaggcgggagtgcagtggcatgatctcagctcactgcaacctctgcctcccaggttcaagcgattctcctgcctcagcctcctgagtagatggaactacaggcacctgccaccacgcccagctaattttatttttgtatttttagtagagagggggtttcaccgtgttagccaggatggtctcgatctcctgacctcgtgatccgcctgcctcagcctcccaaagtgctgggattacaggcgtgagccacagtgcccggctaatttttgtatttttagtagagacggagtttcaccatattggccaggctggtctcgaactccagaccttgtgatccactcaccttggcctcccaaagtgctgggattacaggcatgagccaagtctttttttttttttttttttttttttgagacggagtcttgctctcttgcccaggctggagtacagtggtttgattgtgatctcggctcactgcaacctcagcctcctgggttcaagcgattctcctgtctcagcctcccaagtagctgggattacaggcacatgccaccatgtccggctaatttttatatttttagtggagacggggtttcaccatgttggccaggctggtctcgaactcctgacctcaggtggtctacccaccttggcctcccaaagtgctgggattataggtgtgagccaccgcacccggccttgttattagtcttaactagattgttgattgaagtccttaagcccagaaatgtatgtgaaggatggtggagaagagtggctcaggcattctaggcagaggtattcttgagctgaggaagtggaggagaggaggtatgtaagttacctgttttcaggggttcattccagtggatagtggatgccactccctggcagacactgtgggtgcctcacctgaaagactcctgattccctgaaggcattgtcgggtgtattttttctttataagcgtaatgccagtggagtgggtaagacaggtaccaccttttgcatctgctgctacagattaggcagcttggttaagttttgttttgtttttaattgttatgagttagtttgaaccaaaaggattgttaagtrgagtgtaagaagcactgaataactactgttatctgagaggagtagtaaagaccagggccactgggcaatcccagaggcattaggaatttgtggcctttccctttagagcattgtcattatgtgtatctgcatctctgcattccaactttcacattttcagttcccaggagagagaatctgaytggcctggttggggtcctgtgcccacttctggctgtcacctgtggctttcttccctcagttgtagaccacactctggatacctgggacccctgaaatctcctgcccagacaaccccaagcttctcaggactttttgtgggctgcttccctgttctgcctgtgcagtgcaggccttgtcacaatgtctgaatgcttaggccagagacgtgggggtttggtgagaaaggatgagctgggtagctacactcaagtgcagagccaccagtattgtgggacagagccaggcatgggaagagaagtgggcacggatgggggccagctttcccgatgtgccttaatctggcacagaactcctaaggagtgtgaaaatttcaaatttgatccaggccttccaggtggttatgaagaaggcgagtttgtcaagacaggataatacaatatacttcatttaatagcttgttagtgtgatttataactaaatatgtagacatcatatatgggtcttcattcatactcttgccccaggccctgaaagtgttagctaacaggcaagacctgcctgggactgagattctaaaacacaacctccacccccaactccgtttcatcatatagtagcctaacatattagttggttcgttgcttatagtcaggcaaacaacaaagactccgaattgagctcttggtaatttttgaaacctgcctggtaatactgtgtttcctcattctgatggcattcccagaccatattgcaaatgacttgatgtgtattttcagacttgttgagaagggcctggtggtctatatagcaggcataaaatgtcaccaggccgacttcatgacttatcttttgaggtcaaacagacccattgaccaaaagatttgagggcagtgaaaacatcttgtatactatctttaacaatggatttaactcctaaaggaaagccacctaaacatgactgtttaatcttcactagcaatttgaacttttttttttttgagacggcgtctcaccttgttgcccaggctggagtgtagtggtgtgaccttggctcgctgcaacctccacctcctgggtccaagtgattctgctccctcagcttcctgagcagctgggattacaggtgcctgccaccacacccagctaatttttttgtatttttagtagagacagggtttcaccgtgttggccaggctggtctccaattcctgacctctagtgatccacccgccttggcctcccaaaatgctaggattacaggtgtgagccaccacacccggcctgcgcccagataatttttgtattttttttttttttgagagtctcgctctgtcccccaggctggggtgtagtggcacgatgggttcacgccattctcctgcctcagcctcccgagtagctgggactgcaggtgcctgccaccacgcctggctaatttttttgtatttttagtagagacggagtttcgccatgttagccaggatggtctcgatctcctgaccttgtgatctgcccgccttggcctcccaaagtgctgggattacaggtgtgagccactgcgcccagccaacaatttgaacttttatctgtcaaatctatatgcatccttagcaagctttgtaaactgcctggtaactgatagatcttggttcacttagcttcccaaattatgctgttatcatcttgtctctctgttctttaaatatctggttgggagggtatggagagagagggaggaagaaagacacctctgtaagtttgaaattatttgcatcccccccaccgcccaccaccaacctttttaaaatatagagacacagagtctataccacgcctggcctaaaataattttttttagagacgggatctaacagtgttcccccagcttggctatcttaaacttcttaagggtagctagttctaagaactgcttttttctggctaggcacagtggctcacgcctataatcccaacactttgggagaccgaggcaggcagatcacctaaggtcaggagtttgagactagcctgggcaatatagtgaaatcctgtctctactaaaaatacaaaaattagctgggcgtggtggcatgcatctgtaatcccagctactgggggcgctgaggcacgagaattgcttgaacccaggacacggaggttgcagcgagctgagatcatgcactgcactccagcctgggtgacagagggggagactgtctggaaaaaaaaaatgtttaaaacaaaaaactgtttttttgtatgtgtgtttatatgcgaaccatttgtgaaagtggtcccagcatgatgccacatgtgtcatttccaaatatttcagtctgtatttttttctctctctctctgttttttctgtcacccaggctggagtgcagtggtacgatctggctcactgcagcctcgacctcctgtgctaaaacagttctcttgcctcagcctcctgtgaagctggtaccacaggtgcatgccactgcacccagctaacttgtagagattggggtctcactttgttgcccaggctgttatttgactcctggactcaggtgatcatgccactttggcctgccagagtgctgagattacaaaagtgagccaccacactcagccataaatgtgttgttgttgttgtttttgagacagagtttcgctcttgttgctgaggctggagtgcaatggcgcgatctcagctcactgcaacctcccccctcctaggttcaagcgattctcctgcctcagcctcccaggtagttgggattacaggtgcctgccaccacgtccaactaatttttgtatttttaatagagacggggtttcactatgttggtcaggctggtcttgaactcctgacctcaggcgatccacccgcctcggcctcccaaagtgctaggatcacaggcgtgagccactgtgcctggacttgtaaatggtatttcaaagtaaaatatatgtcattgcatttatcaagataatttgattgagctttgtaggtcctagccatccttctgcctattactgggctttttgcaaatgctgttcctgtttccacaacctggagcattgtcccatcccttttattgtttctcttgctgttatttattatgtcatccatcatcattataccattcctctgccaagaaacatttaatttttgtttttgtttactattacaaaaatgttttatagaatattgttagacttacattcttgcccctcattgtggaagtattcctgtagtatgaatacagccagaggttttttagttttgttttggtttttttgaggagtcttactccttcatccagaggctggagtgcagtgacgcgatcttggctcgctgcaaactccacctcctgggttcaagcgattctcctgcctcagcctcccaagtatctgggactacaggcggccgccagcatgcctagctaatttttgtatatttgtagagacgggggtttcaccatgttggccaggctggtctcgaactcctgacctcatgtgatccgcctgcctcggtctccaaagtgttgggattacaggtgtgacccaccgcgcctggcccagtgagagttaaagggccagagtggaagcaggtctttggaagcttggctctgtcttccttcagtgcagggagtttgtgttgtccatccccagcctctacagaagcacacagtgagtgttcaataagcatttcttggatcaaatggcccctgcttcttttaatggtcagtaaactttaaataatgagatttttctgcaatagagaagagcaactgccttgtgattggaagccagcatatgttattcctaagcagttctgccttttttccacagaaggtggtcttctgccctgttaargaagccctggaggtggactggagcagtgagaaagcaaaggctgctctgaagcgcacgacctccgactactttctccttcaaggtgaggtctcaaagcacaacttaccccgggagagcttttggctctgatttctgcaaatgtggttgcaaggtccagatggttttgtgatgtttgccttgggtggcattcttcattggctagttctcagtgatcacttgagaaaggggtggtcacttgaagggggtgaggtctaccattgagctctgggttctaatgacttctcctttttttacttgttgaaatgacctccctgtcaagttgaccttatggtaatagtgttacaggtcacagattgagaaacctctttttttttcttttttctttttttgagacagagtcttgctctgtcacccagactggagtgcagtggggtgcaatcttggctcactgcaacctccacctcctgggttgaagcgattctggtgtcttagtgtccccagaagctgggatgacaggcatgcaccactgcgcccggctaatttttgtattttgagtagagatggggtttcaccatgatgcccaggccctgaagttctgagattataggcatgagccaccatgtgaagcctgatcaaccaacttctcttcaccgccccccgcctttttttttttttttttttttgagacagagtcttgctctgtcacccaggctggaatgcagtagcgctatcatggttcactgtagcctctacttcctgggcttaagtgctccccatgcctcaggctcctgagtagctggtactacaagcacacgccactgtgcccagctagtttttgtatttttttgtagaagcgaagtttctccatgtagccaggctggacttgaactcctgagctctagtgaaatccccgcgttggccttccaaagtgctggagttaaaggcgtaagccaccagtgcttgttcccctcttcagaattctttctctgcctcaaaaccatcctcacgcttatgaaaggtggggttgtttttcctcttgctattaatgaactacttatcagtccatctttgctggtggtcaagagactgttagtaagtattggttggcttttcagtgttcttcctgtacctggcacttttttgtttgtttttgagatggagtctcgctctgtccccaggctggagtgcagtggtgtgatcttggctcactgtaacctctgcctcctgggttcaagcgattcttctgcctcagcctcccgagtagctgggactgcaggcgcgtgccaccacacccagctaatttttatatttttagtagagacagggtttcaccatgttggccaggttgggctcactctcttgacctcgtgatccgcccacctcagccccccaaagtgctgtgattacaggtgtgagccaccgcgcctggcaaacctggcacttttaatttttrttttaattttttttttggagacggagtctagctctgtcgcccaggctggagtgcagtggcacgatcttggcacactgcaacctctgcctcccaggctcaagcaattctcctgcctcagcctcccgagtagctgaaatacaggcgggcaccaccatgcccagctaattttctttttttttgagatggagtctcactctgttgcccaggagagcagtggcgtgatcttggctcactgcaacctccacctcccaggttcaagcgattctcctgcctcagcatcctgagtagctgggatcacaggcacctgccaccacgcttggctaattttttgtatttttagtatttttgtattttttttgtattttcaccatcttggccaggctggtctcgaactcctgacctcaggtgatctgcccacctcagtctcccaaagtgttgggattacagacgtgagccactgcacctggctgcgctaatttttgtattttagtagagacagggtttcaccatgttggccaggctggtcttgaactcctgaccccaggtgatctgcccacctcagcctcccaaagtgctgggattacaggcatggtagttttttaaaaagtattttttttaatgttatttatgcatttatttttttgagacggagtctcactctgtcacccaggctggagtgcagtggtgcaatcttggctcactgcaacctccacctcccggttcaaacagtttccccgcctcagcctccmgagtagctgggattacaggtgcccaccagcacacccagctaatttttgtatttttagtagaaacggggtttcaccatgttggccaggctggcctcaaactcccaacctcagatgatccacctgcctcggcctcccgaagtgctgggattacaggcgtgagccaccacgctcagctggatgaactatttgaaagtcccgaatatccatttgtgtagaaataaatgggttgagcaggaatgagtgttgcatgtgagtgggctgcactcagaaaatgcctcctcttgatagtgggatcaggtgtggaagaggcaccagcagtaagagcagagtcttttccatgtgggaacagtgcctgggccctttgggagaagcttgttgctcactgcctcgcacatagaaagccctcaggaaacaatggcgctaatttgccaaggtttgggtttgacttgagcatctctaactgctgcttatgaaaggagtcaactgggctgggctactaaaaatacaaaaattagccggatgaggtggtgtgcgcctgtaatcccagctactcgggaggctgaggcagaagcacttaaacctaggaggcaaaagttgcagaatccgagatcatgccaaagcactccagcctgggtgacagagctgaactccatctccaaaaaaaagggggagaaacagagtcaatcacagatcatctactccagagwtgaaaagtgtacacgccaaaaaaaaaaaagagaaaagaaaaaaagcacatatcttcacggatgacagagttctctaggacttkctctgtgccgggcgttttccatgtatatcaccttcatctcacaaaggccctcaggcaagtgctattaacaccaccagctacagaggggaatctgaggctcagggaatttaaagtcagtggctcaagatcacccatctaaaacaaaatggcagtgcccactggaagccaggtctgttttgattccaaaggtcttgttctttttctttttccccagagacagagtcttgctctatcacccaggtaggagtgcagtggggcgatcttggctcactgcaacttctgcctcctgggttcgagcgattctacaggcacgcaccaccacacccagctaatttttgtattcttagtagaggcagggttccaccgtgttggccaggctggtctcgaactcttgacctcgtgaaccgcctgcctcggcctcccaaagtgctgggattagaggcgtgagccaccgcgcccggcccaaagtcttgttcggaacaaccatgcaccactgcctgccacagaagtcatatagctactgtttcttcctcaaccacctgtccacccctccaaccccgtaacttctgatgctgatgtccagtagcacctgcactgaatattcactttgctcctagatatcagttttgtcccctcagttcaatgacccctgtgatgttgagatggatgagaaaatactctggaaactgcagaggataaaatcaggatttcctcacttcagcacactactgacattctgtgctggataacactgtcacgggggactgtcctgtgcactgtgggatatttagtaacacccctatcctctactcactagatgccagtaatatctccccacccagctctaacatcaaaaaatgtttccagacaccactgccacatgtccccagttgagaaccactggattatgctaaactcaaaggccagttgactcctttcttttctttcttttcttttttttttttttttgagacggagtctctctctgtcacccaggctggagtgcagtggtgcaatctcagctcactgcaagctcagcctcctgggttcacgccattctcctgcctcagcctcccgactagctgggactacaggcgcctgccactatgcctggctaattttttgtatttttagtagagacggggtttcaccgcgttagccaggatggtctcgaactcctgacctcgtgatccacccgcctcggcctcccaaagtgctgggattacagacgtgagccacttcgcccagcctgtttacccttaattccatccctcagtgggtattatggcaacagtctcatgagtgcctatgaccctttgctggataatatatcctatcatgtttaccactctctcccagatggcattaattatctgtctttttcagttttgagttccagggctttggatatggtaatcaaaacattaaaactatgtgcagtaaatttcttttcttttttctttttctttttttttttttttggtgtggtgaaaagcacataacataaaatttaccattataacttaagcgtataggtcagtaataatcatacaatgttttattttattttgtttttttctgagatggagtttcgctcttgttgaccaggctggagtgcaatggtgcgatctcggttcaccacaacctccacctcccaggtttaagcaattctcctgcctcagccttytgagtagctgggattacaggcatatgtcaccacgcctggcaaatttttttttttttttttttttttttgtgagacggagtctcgctctgtctcccagcctggagtgcagtggcatgatctcagctcactgcaagctctgcctcccgggttcacgccattctcctgcctcagcctcccgagtagctgggactacaggtgcccgccaccatgcccggctaatttttttgtatttttagtagagacggggtttcaccatgttagccaggatggtctcgatgttctgacctcgtgatccgcctgcctcagcctcccaaagtgctgggattacaggcgtgagccaccgcgcctggccacatttttgtatttttagtagagacggggtttcmccatgttggccaggctggtctcaaactcctgacctcaggtgatcctcctgcctcggtctcccaaagtgctgagattacaggcgtgaggcmccgtgcccggcagtgagaacatttacaatcacatattgtgtagcatcaggaaggatttttaagatcaaagttagcacattagaagtggaaataatttaaaagtggccttgattttttttttttttttttttttttgcctactgtaaagtcaagcctcagtaacattctgatttcaggatgcagggtggctttgggggatatccaagttgagtggtaaactttgtaggcactactcttgtttccatgttcctggcacctaagttgatatattttctcacagtcttgtgacaatctttgaagtatagttgttatcccattttcctataaggagaccaaggttgagcatggttgtgattgccgaaagtcatatccgtggttttatagacagtcagaatttagaccatgaggtttgttttacctgtggacttagttttcaacatatttaagatatatctgtagtctgggcgcggtggcttatgcctgtaatcccagcacattgtgaggctgaggtgggcagatcatttgaagtcaggagttcgagggcagcctggccaagatggtgaaatcccgtctctactaaaaaacacaaaaattagccaggcatggtggcacatgcctgtagtcccagctacttgggaggctgaggtgagagaatctcttgaacctaggaggcaaggttgcagtgagccgagatcgtgccactgcactccagcctgggcaacagaacgagactctgtctcaaaataaaataaataaaatatctctaaactaatatatctcattaaatttcagatctggagttctgtgagttagggaaacaggatcaccaccatagtagaaaaaactctggtgcagatagttttagacacaaagattatctgaattcaggcccagataattgtcttctttttccccaagaaacatttgaattgtatttctgttagataagcatcatagtaaaaagtcttcaaagtttttgaaggcagaaaaagttttctttgttaaacccttcccatttttttgtcttctaaatttctaggagaactactgttaagttttttagtatcttgttgaacaatggttaacaattataatcatttgtgtttatgtaatcaaactgtgaaacaccggttgggaacttgcttgtgtacacttgatggcgtaaatggtaggggaagagcatacatacaaaagtggcctcttttgctttcttggcagcatgatgttatattcctttggatgtaccgtcatctatgaccagtctcatcttgaaaggcatgcttattttccatttttcccagtgcttggaatttgtttccaaaattgtttctaggaacatgactaatgtgactgacgatgccttaggaattcctagtggggacaaggtgcttggctgggatgcatacctaagaatatctcacaaagaaacctgattttgtttcactattgcctaatggcgcacatagtaggtgctcaataaataaatattttttgcatgagtggtttttgcttgtctggtcatttgccctattgtagagggagagyagtgtgcccactggagtccccacagggtccttttgcctgcatgcctacccctgtggcacccatcaggcttttgattccaatgttgccctgggctctcactcacaggtagatgttttttattgccccattcacaattcagccacctgctgtccgcatgcatgtgcttgccatgtttagatattgggtgtttttccagtttacttaataagttagtggccagactgtacgcttcctgctgcatttttccactgtcttgagagttggcctcgccatctgtgagcaaaaggtctcttctttttattattctcccatggcatgttgcaaaacagtaagcgtgagctggtttcctgtggcaaaaaaatgactttgatttgttctttttgaggttactgtgagtttatcataacaggagtgctaaaaataccgagtctggtrtggaaacagcattcacttaccagcatgaacaataacatacaggtttagcctagagcaggaagaaatggacttcatctcaagatgagaatacttatcagagaattcttggcaatcttaacttgctcagtctctgttctgatgagttatggaaaagtacttagaccatctttgagccacagaattgaagctgaaaatattcttagaccaaacattttgtgagcacctgctatgtaccagatctcatagctgggactaatcagaggaagaggaatagaataagtgttcttgccaatgtgaaagacaaacaaataattctactccttgtgaggacagctataacagagggctatagaaactatcatgtgtkgttcctggkttttgtktgtktttttycccccccaaaacagggtcttgctctgctttccaggctggagtgtggkggcacaatcataactcactatagccttgaactcctgggctcaagttatcctctcacctcgacctgcaaagtagctgggactacaggcgtgtgccaccatgtccagctattttaaaaaatctgtttgtacagattggggcagggaggtcttgctatgttgcccaggctggccttgaactcctggcctcaagaaatcctctcacctcagtttcccaaagagggactataggaaagcaccaccctgcctggctcgttgttctgtttttaaatacatttgcattattccataataatcaaagtaatttattatgggaacttaggaaactgaaggtctgaccatctttggggagttgtgaagtcttgacagaggaggggagatctgagctgtatttctcggaacaggtatttgccaggtgggaaagagggaagaatattgcagagcaacacatgcacagggccagcaggatagaggctgagcctcggaggggactggagcttggagagagcaggctagtggtttccctattgatagaatatcagaatctggccaggcgcggtggctcacgcctgtaatcccagcactttgagagactgaggtgggcagatcatgaggtcaagagatcgagaccatcctggccaacatagtgaaaccccatctctactaaaaatacaaaaattagctgggcatggtggtgtgcgcctgtagtcccagctactcgggagggggaggcaggagaatcgcttgaaaacctggaaggcagaggttgcagtgagctgaggtcgcgccactgcactccagcctgacgacagggcaagactccatctccaaaaaaaaaaaagaaatctatctatctatcagtcagaatcactgaggaaaccgttgaaaaatgcggagtgcctgcttgtagctcacattactgaatccagatagctaggagtgacttgcatgtctgcatttttctatagcacccaggtttctcaaatcagccaagttaggggaaagtactgtcataggaaagggaagcccatttcccaggtcaaagcctttgcttactcgtttatgtttattttatttttgagacagagtctagctttgttgcccaggctggagttgcaggtgcaatctcagctcattgcaacctccgccttttggattcgtgcaattctcctgcctcagcctccaagtagtggggatcacaggcacacgccaccatgcctggctaatttttgtatttttagtggagacagggtttcgccatgttggccaggctggtctcgaactcttgacctcaagtgatccatgcacctcggccttccaggtgctgagtttataggcatgagccatcgtgcatagcctgcgtttttcttttaaaatgtgttaagcactgtatttcaaattacatttgtgcactgaagcagggaggaaaaaggagctaacccaagtagctgttcaatatagtattttgactgcataccctcaaagtaaagaaaaatctcacctggcgcggtggcttatgcctgtaatcccagcactttgggaggctgaggtgggtggctcacagggtcaggagatcgagaccatcctggctgacacggtgaaacctcgtctctactaaaaatacaaaaattagccgggcgtggtggcgggcgtctgtagtctcagctacttgggaggctgaggcaggagaatggtgtgaacccgggaggcagagcttgcagtgagccgagatctcaccactgcactccagcatgggcgacagaacaaggctctgtctccaaaaaaaaaaaaaaaagaaagaaaaatctctagccggtcgcgatggctcacgcctgtaatcctagcactttgggaggctgaagcaggtggattgcctgagctcagaagtttgagaccagcctgggcaacacggtgaaaccctgtctctactaaagtacaaaaaaattagccagacatggtggcacactcctataatcctagctacttgggaggctgaggcaggagaattgcttgaaccctggaggcagaggttgcagtgagccgaggttgctccattgcactccagcctgggtgacagagcatcttaagaaaaaaaaaaaaagaaaaactctaaataaatattgaactctgcttagtagggattttgttttcagatgaggtcttgctctgtaccccaggctggagtgcagtgtcacgatcataacttactgcagcttctccctcccagctcaagcaatcctcacatcacagcctcccaagtagctgggattataggcaagtagcagggattacaggcatgcaataccacacccagctgattttggtattatttgtagagacggggtttcactgtgttgcccagggtagtctctgtctcctgggctgaagtgagcctcctgcccaaagtgttgggattacaggtgtgagccactttgcctggcctagtaggtttgtttttcacagtgataggggttagcaattctgaaactacttactgttcttctaagattgagcagataggtaagtatagtgttaatagtgagaatcaagttttcttattgtcagaaaagggtgttcctatgaatgtggacagtgggaaaggctagaaggagccatgtggtattggattggaattgaagttatctggatgaactcatggtttcttatacgtagatgtagtaatagatgtatgtgtgtatgcatatccacttttacacgtgtttatttcctagaattgtttcctagaattgttgagagggtttatgcccagagacatcccagaagcactgaacgcactcatgccaagatgttaatacctttcctcactaaagagaaaccagggttccttggagaaatggctgtttccagatctggggtaggaaaattacaggtgagcttggaatatcctgctatgccagaaagtaagraagtgctctaagaatgataggggcatgtcaaaagmacaagaagaataatcaattaatgtaaacaaggaattatgaagataacaaagtctatctttgactatcaccatagtagtaacaattgtttcaatcaagaatcaaagtgctaaaatcaatggggaacagtttgcggtgaaacagtgtagatgtttccttatcagatgcttttatgctatgcstggtggctcacccctataaatcccaagaggmtgaggcaaattgatcacttgcacccaggagttttgagaccagcctgggcaacaaaacgagaccccatctctacaaaaaataaaaaagttagccagatacagtggtgcatgcatgtagtcctagctactcaggaggatgagatgggaggatcggttgagcgcaggaggtcgaagctgcagtgagttgtgattgcaccactgcactccagcctgggagcaagactttgtctcccccgaaaaaraagatgcttttaaatgaattacatagagagacattggagaaccctggcaggttgtacctcagctgagtgatgaaattaacaatctagggatggacagttagacctcatgcctcttggaatatgtaaccctgggttggatctgagaatagaggaaggttttttttcttttgctctaaaggatgttagtggaacaattggtaaaaagaggccccggcgtggtggctcacgcctataatcccagcactttgggaagccgaggcaggtggatcacctgaggtcgggagttcgagaccagcctgcccaacatggagaaaccccatctctactaaaaatacaaaattagccaggcgtggtggtgcatgcctgtaatcccagctacttgggaagctgaggcaggagaatcgcttgaacccaggaggcggaggttgtggtgagccgagatcgcgccattgcactccagcttgggcaacaagagcgaaactctatctcaaaatagtaataataataataaaataaaaaacaaataaaaaggtctgtaggttagatagcagtactgtttccatgttatttatttttacagttatgataattgtctcatggttatttaagagaatggtttttgttttgtttttcttgttttttcttttcctttttttttttttttttttgagatggagtctcactctgtcgcccatgctggagtgcagtggcatcatctcggctcactgcaagctccacctcataggtttacgccattctcctgcctccccctcccaggtagctgggactacaggtgcccgccaccacacctggctaatttttgtatttttggtagagatggggtttcgccatgttagccaggctggtctcgaactcctagcctcaggtgatcctcccacctcagcctcctgaagtgctgggattataagtgtgagccagtgcacctggcctctttttttttttttttttttttaattttacagaattttttttttttttaagacagagtcttgctctaaggctgtagtgcagtggtatgatcacagcttgctgcagcctcagcctcctggactcaagcgatcctcccacatcacccttctgagtaggtgggattattgtaggctaaatttttaattttattgtagagaggcctcactccatggcctaggctggtcttgaactcctgggctcaagtgatcctcccacttctgcctcccaaagcattgggataacagacgtgagccactgcacccagcctgttagataatttagaaaattttctttcctcattcttcaatttcccctcattcacactcccaactttcctgttttgtgatttttaaatgacgttgtctttggatgccggctggatttggtgattagttctcttcagaagaaacttcttattttagaacttgtaacctttgcaaagcaggccataggcagccatcgctatttgggtatgacattccccagtgggtttttggtgtccagtaatgacaaaaactgctgagaaagagacagccacagggaaatgggttccgataatggggcagcagctgagtgcttgttgatttgctgctgtcatgaccacagatgtttaaaaataatttgtaaggaaaaagaaaaaagcgtagtgtgtgtgtgtgtgtgtgtgtgtgtgtgtgtgcgcgcacgcacgcgcgcgcgcacaccactgccttatcagtggtagagaatgcagaccacagtcattcagaaaggaagaaggcaccaccatggaaacaggagaggtgaggagaagggcagaggtgacccacaaatgcggctcagtgccttacagcagagagctcatgagagaacagaactggttagtcaccgactctgctcctcggtctgcaagagaggttcagcaccaagtctatactacacagtactggaaggattagatgaaggcctggcacacattgtgaattaatagttactggttacaggcggggtgtggtggctcaggcttgtaatcccagccctttgggaggccaaagtgggaggattgcttgaggccaatagtccaagaccaacatgggcaacatagcaacaccctgtctctttttttgactgtttttttgaaacagtctcgttctgtcagccaggctggagtgcagtggcacaatcttggctcactgcaacctctgcctcccaggttcaagcaattctcctgcctctgcctccmgagtagctgggattacaggtgcctaccaccacgtccggctaatttttgtatttttagtggagatgggctttcaccatgttggccaggctggtctcaaactcttgacctcaggtgatccacccaccttggcctcccaaagtgctgggattacaggcgtgagccactgtgcctgaccggttcacgtactttacatgcattgtgatcatattaaatcttcatgacagccttactagatcaggtcttgtcctgttttcacatgaggaaattgaatcttggaagggctaagtcatttgtccagggtcatcacacgcagtaagtgttagagtctaaacgagccagagctgtcacactgtcatccccagggccttgtgtttaagcatcgcccaacaaagtgctcagtcagactttaattattagcattactaataataccattatgatgattattttgtctaaacttcacaggcacctcgtgacattttcttattccacttttgcagatgggaaactgaggcccaccaagatcagattacaataatgggcaacattgtcagcaacctgccttgctttttttyttagcaggcccacatctcccccactcccccacccacttggcagtagcctgtgtttgagctgctcacaggccccaaggcccagctgcaattcttgtttaaagcctcacatcttttctctgactgtcagacaacagtcacgggaatgtcctgtgccatcttccctcggcaagaggggttggcagagagcagcagatgcctagagtcaaggtcatgtgctgctcaagtgctgggctggagacaagaccctctctccctgctgcttgtgaccaggcagggtggctctgaatgtagagggctctgtcagaacagttctgtgaccagagggtgtggttggcaaagcaatgcattaggggcccatggaagtttattcttgttgtccacattatttccctgtgacttttagatttttttttcctttttgtaaattagttttttcatactagttagaatgtttcaccktaaaggtgagagtcaagctctggaatcgcctgacatttttaaggaaaggaatagaatattgggctggggctagtctgaaatggtggtttgtattattttaaattgatgggctctgggttaggggagccaaatccattttaaagtgatttttgtaaaaattggcatgtcttctgtttcttctcttttccaaaggtgacactataacgtagaggttaagaatgtggtgacttttaaatccgtcgtgaccataagcctctcctaagccccagttttcctaccactaaaatgggggtggtaacagttgtacctacctcattctgtcttttttgttttttgcttgtttgtttgttttttagatggagtcttgctcttgtcgcccaggctggagtgcaatggtgtgattttggctcattgcaacctccacctcctgggttcaagcgattctcctgcctcaacttcccgagtagctgggatgacaggcacccgccaccatgcccatttagtttttgtatttttagtagagatggggtttcaccacgttggccaggctactcttgaactcctgacctcaggtgatccacccacctcagcctcccaaagtgctgggattacaggcgtgagccaccactgccggcctcgttctgtcgtatttttttacgtaggagagctcagtctgaatgtaggatatgacatggttgtggggttttttttgtttttgttttgtttttgttttgttttgttttgttttgttttgttttgttttgtttttgagacagtctcactctgtcccccaggctggagtgcagtggtgtgatagctcactgaaacctctacctcccaagttcaagcgattctcctgcctcagcccccaagtagctggaattacaggtgcccaccaccatgcccagctaatttttgtagttttagtagagatgaggtttcaccatgttggccaggctgctctcgaactcctgacctcgggtgatccacccgcctcggccttccaagtactgggattataggcgtacttggaaggtaccatgcccggccattatatgctttttaaaaaaacctaaatgttgcaaaaaacatgtgtctaaaatctctgtttcaacatagttttttaatagccatgtaatattccattctgtcaatatgtctttatatgtggtacagactgagtgtctaaatccaagaacccaaaatctgaatttttttttatttttcatttttatttgtttacttatttttgagacagagtcttgctctgtcacccaggttggagtgcggtggtgtgtcggctcactgcgacctccacctcccaggttcaagtgattttcctgcctcagcttcccaagtagctgggattacaggtgcccgccaccatgcctggctaattttttgtatttttagtggacacgaggtttcaccgtgttggccaggctgatcctgaactcctgacctcaagtaatcctcccacctctgtctaccaaagtgctgggattacaggctgagctactgcgcccagcctatttttgtttttttgagacagagtctcactgtgtctcccaggctagagtacagtagccccatctctgctcactgcaacctccgcctcctgggttcaagtgattctcctgccttagtctcctgagtacctgggattacagacgtgtgccaccacacccggctaatttttgtatttttagtagagacagggtttcactatgttggccagcctgatcttgaactactgacctcaagtgatccacccatctcagcctcccaaagtgctgggattacaggcatgagccaccgcaccaagcccccaaaatctgaaatgttttgagtgccgacataacactcaaaaaaatgcttattggccccgggcgtggtggctcatgcctgtaatcccagcactttgggaggcctaggtgggtggatcacctgaggtcaggagttcaagaccagcctggctaacatggtgaaaccccgtctctactaaaaatacaaaaattgaccaggtgtagtggtgggtgcctgtagtcccagctactagggaggctgaagcaggagaatcacttgaacccaggaggcacagcttgcggtgagccgagatcccgccactgcattccagcctgggcaacagagagagactctgtctcaaaaataaaaataaaaaaaaaataataaaagctcattggagcattttggatttgggattcttagatttggggtgctctatyggtaagtacaatgcaaatatttcaaaatctgaaaatacccaaaattcaaacacttctgctccctgacatcctgtgtaaacaacactgcagtgaacatttataggtaattcattcagcgggtaagggtcaggaccttttatagggatccttaataccacatttttacatggttcattgagcattcgtrctcccctctgctgtgggtgagggtgcaggtccctcagccttcttgcttgggttgagtcatcctggtctttaatttggtaagcaaaaaatggcatcttgtttttgagctcgtttctgagaaagtgcatgctccttttccccatcaacaactttcatcsggcgcctcggaacctcttcagtagagagtgagatgcaaatagcgaggcacagcttctttccctcttctgagctgatgcctggtgaggtcatagactgggtttcattgcaaagacgaaagcgtgggcaggacttttggagcacaaaaaggggcatttcagagtagtcttcatgggcggccactccagaggtgaagttttctagagaaagacatgaaagtactgtgtggctgtggcgacagacagaggcttacgagcctgccctctagagactgtgagctccgcgtgtgagggcaaggcctggggctgtctgggtcgcttctgggtccccaccacagctagcatagggtaggggtggagggggggtgctcaggaagtgatttttgaagagtggatgactgaatacatgcacacacatacttttaagtttctgggttaaagaggaaaacagaatgaggtaaacaaaggaaagtaatgtggaggtgaactgagcagatggcaagatgccgtgaatggttagaggccaggagagccagaatcagagtggcttccgtgaagtgtccctacctcctcccccagcccagctatgtcactcctctgagcttcacacctatggactgttctgcaccctagccctcagatgcaacggtgaaagtgggactcctattgggtttccctgttgaggacagacatggtgccctgtgtatctgctgctgcttttttctttttttcttgctgagtattccatgtgtagcatgtttgtaacacttgataagaaacagaaccatcccagatagcttgaacacttttcaattcagtcagtaacagaccaggtctgctttggatttccaggagcttgtgtcactttattttttttctgagccagggtctcrctttgtcacccagctggagtgcagtggtgcaatgtcagctcaccacagcctctgcctcctgggttcaagcaattctcgtacctcagcctcccaagtagctgggactacaggtgcctgccacaacacccggctcatttttgtgtttttagcagagacggggtttcaccatgttggccaggctggtctcaaactcctgacctcagttgatctgcttgccttggcctctcaaagtgctgggattacaggcgtgagccactgcacccggcctctggattgcccgggcctgtgtcactttgtcatgagcccttctcccctagttatcctttattcttcaaacaggcttcctgtgtgacatattttttgagtgcctgctatggggcaagccctgtgccaggtgttcagtatagagtagtgacatcgcctttgccccacagagcataaaaatctaatggaggagacaagccagtccttgtgctagttcatttccacaggtgaatataaaaccacaaactgggcagggcatggtggctcacgcctgtaatcccagcactttcagaggacaaggcaggtggacaacttgagctcaggagtttgagaccagcctgggcaacatggtgagacctcgtctctacaaaaaataaaaaatgaaccaccaggcatggtggtgcatgcctgtagtcccagctatttgggaggctgaggcaggaggatcacttgagttcaggaggtccaggcagcaatgagctgagattgtgctgctcattccagcctgggtgacagactgaggccatgtctcaaaaaaaaaaagaaaaaaataatcacaaactgtgagtaaggtatctaagggaaaaaactgtgctgggagtgaatgtcaggagacagggagatctgaggcagtatcgtgtccagagcccacagctgaattaatggtaatgcaggtaaatgagctactgtgtgacacaggttaccacagcaagtgtatcggcttttctagggcgagtgtgagctgggtttctggactttgcttaagagcagtgacagacctggaagatactgccccaggcactcttgggtgctttacatgtattggttcatttaatctttaaaccccacaagtgcccttgggattcccattttgcagaggaggctcagggtccttgtcacttgcccaaggtcacagtaagtggaagaatagggagtctagagctgtgctcttcgctgctgccctccagttggaaagctgtccaggccagggacaggctttgcagagagaaggtacagaggacgggacaggcaaatattcagagactatgaggactgaggtggttctgccaactgtggagggcctggtcacttgacaaggcacctcattgcacccccctgaggctctctcaaagccccttttcgagttaggacattgttatctcctgtgtagtttttgttgattgccctctgaaatgctgtgagagggtagaccatccattctgccctcgcctgcccagcccagcacctggcacagtcattgctcagtgtatatttattgaatgaacaattgactgaatgtcaggcccagggctttgccttaggaaacaggctgttggataagaggtagtactaccatactttgcartttttctggaaatttatgtcacctgggagtggagcagattaccaggctgtttccagagatagcgactctccataaagtgagccaacctgggggctgggcgcagtggctcacgcctgtaaccccagcgctttgggaggctgaggcaggcggatcacgaggtcaggaatttgagaccagcctgaccaacatggtgaaaccccatctctactaaaaaatatgtatataaatgagccgggcgtagtggtgcgtgcctgtaatcccagctactcaggaggctgaggcagtagaatcgcttgcacctgggaggcggaggttgcagtgagcaaagatcgcgccactgcactccagcctgggtgacagagcgagactctgtcttaaaacgaacaaacaaaaaaaacaaaagtgagccaaccctggggaggagtctaygttcagctgcagggagccagggaattggggccgaggtgtctggcacagaaaagctttgggcctgtctcaggtaaatgaagttttgatatagattcaactcccctgccccccacaattgaactgtttttgggggccagcaattaggggctaatttgtgacagtgactttattttcttcctactaaagtactggtttattcggtggccttggtgattagatttaggcataatagttaaatgtaatagaagtttatgtaacaaacagtgattaataatgttgctgtccagattyccgttatagcgctaacctgatgttatgaactgagattaaatttgaatttgagtgcttacattattttgtaaaggtggttgtatattcacatatccacagttttttctataaataacgtgaaaccgtgcttggtttctcttttccaaagtttgccttttccattacatgggcaagtcctgaacctaagccgagacactagtccatcatctccagcaatgaatgtcatccccccagacttcagcatcctgagttaattaaaaggtgcagatgaagttaatcaagtttggaactctaattttgtgcagtgttttgatacgatttgatgagtcatcttttggtagagcacctctctatccctgacagtgtttgatcttaacggaacagttttataatgtgtaaactggtgggaggtgctcttcagaaatgcagtcaacagtggtatgtgtgcgtgtttggctcttggggcggggcggaaagcagaacaaaggagaatttaataagcgagaacttgtcaggggctagggtcagttctgaggctgctgcctgtcaagaacatggctttcttcctgcccccctccactgctgctaactggagtctgaccttcgagaaagagtgaaaaaagacagcttctgtttgttttgctgcaagtaagtggctggactgattggcccccttcccagaggccctgcaaggacttcagatgtggtcagcgaggtatgtggatggtgccagcctgccggccctcgtccagccaaactgcaccaggaacaggcaagggtcccagagaaacagcggggtcagctgctgccgcctttgctcctgctcttaatgctgtcctatttcttcctaagaggaagctggtttactctctcaagattgatgggcaaagttttatatgaccacggtctccacttctcacccactgaacttacagcttgaaattaacagaggcgaggcccatctggaaaaatgcatttgacaaaaacttgatcaaatgggggatcccctgaggtgggtggcaaagaaccagaccacttggaatcctaggtgctgtgtccctgtatggacctgctgtttcttttggattccattagggttaagaagcacaaattctgaagctagatttgagtttacatttctgctccagtacttgggagttacagtgaccaagtcatttaatgtttctgaacttcagtttcctgatctgtaaagtaggatgggtaggttgggcgtagtgggtcatgcctataatcccagcactttgggaggctgaggcaggaggatcacttaaggtcagaagttcgagaccagcctggccaacatagtgaagccccgtcwctagtaaaaatacaaaagttatttgggcgtggttgtgggcgtctccagcctgggtgacagagtgagactccatctcaaaaaaaaagaagaaamacaaammcragtaaataaatgaataaaaataaaggaatccagccatctgttagtatagccaaagcagaggatattgcatcaaatgttaaacgctagtcctgtcagtcactcctgagagaacagggcaacaagacccagaaagggtatcaacactgcctgagcagatggaggcaaagctgtgcatgggctgcttatagggcacagtctgaggccttgcagcagtcacgtggaaactgaggctgcctgctttccaggtgcaaggtgatggacagtggcaggaaccctgtgctagatgactcttgtgcgatcttatttctttgttactgggrcacaagcaccaactgtcacaagggaccaacaagaggaggtgattttttttttcagctgttaccacaaagcttttcatcttttggtttgaaaacatagctgtgggaataggccgggcgcggtggctcacacctgtaatcccagcactttgggaggccaaggcgggccgatcacaaggtcaggagatcgagaccatcctggctaacacggtgaaaccccgtctatactaaaaatacaaaaattagccgggcgtggtgatggccgcctgtagtcccagctactcgggaggctgaggcaggagaatggcgtgaacccgggaggcggagcttgcagtgagccgagatcgcgccaccgcactccagcctgggcaacagagcgagactctgtctcaaaaaaaaaaaaagaaaaaagagagagaaagaaaatatagctttgggagcaccaaagcccaaagcgttatagtgcctactatgtgtcaggcactatactaaacatttcacatggcttagcactcatgtgatcttcacgataacctggtgagcgggtaattattatcacccttcctactggtttgttgttgttgttgttgtcgtcgttgttgttttgagacagagtctcgctctgtcacccaggctagattgcagtggcacgataccggctcactgcaacctctgcctcctgggtttgagcgactcctgcctcaggctcccgagtagctgggattaaaagcgtccgccaccatgcccagctaatttttgtatttttaatagagatggggttttatcatcttggccaggctggtcttgaacccctgacctcgtgatccacccgccttggcctcccaaagtgctgggattacaggcatcagccaccatgcccggctacttaatttattttttgagacagcctctctctgtagcccagactggagtgcagcggtgtgatttcggctcaccgcaacctctgaatcctgggttcaagcaattctactgcctcagcctcccaagtacttgattataggcacccaccacactttcggctaattttcctatttttagtagagatggggtttcaccatgttggccaggctggtctcaaactcctgacctcaagtgatctgcccaccttagcctcccaaagtgctggggttacaggtgtgagccactgcacctggcctcctttattttatgggacattttttgaaaagaggcttggtccaaacaggcagtacttgccacttctgcagtcatttctctaccctgccccaaaatggttactcagttgcatttatttactacaatcggaataccagcaggacatctacaaaagtagaagtattgggtggtagcagatcagtgctctctggcatccagatcgtctagatggtcacagcctttttttttttttttttggagrcagagtcttgctctgtcgcccaggctggagtgcagtggcacaatctcggctcactgcaacctccacctcccgggttcaagagattctcctgcctcagcctcccgagtagctgagattacaggcacccaccaccatgcacggctaatttttttggtatttttagtagagatggggtttcgctgtgttggccaggctggtcttgaactcctgacctcaggtgatccacctgcctcagcctctgaaagtgctgggattacaggcatgagccaccacacctggccaattgttatagctttgagttgactgccaagtgttgaggtagcattgagggttgcagaagctgtgttcttgaaaaagagaagagagtaacattctcagaaagcaaacagtattcagaagagtcaatgggtgttctggagcttttttcttttctttcctttttttttttaaagaaattaccagctgggtgctgtggctcacgcctgtaattccagcactttggggggccaaggtgggaggatcacctgaggtcaggaacttgagaccaggaatttttctatttttagtgaaaccccatctctactaaaaatacaaaaaattagctgggtgtggctgcaggcacctgtaatccccagttacttggcaggttgaggcaggagaatggcttgaacccgggaggtggaggttgcattgagccgagatcacgccattgcactccagcctgggcaacagagcaagattgtctcaaaaaaaaaaaaaaagaaagaaaaagaaaaagaaattacctcttctctgatatgcagagccccgtctatactggacaggtggaagttaccagagaaatacaggccaggggcctttgtctgacattggcactgagaaaagcatagcccagaagcagggtgtgtcttttttttttacctgggcatctgtggtttgagatcttcttggaacactttataacccatttctgaacgtctcccaggcttcagtggagccacctgttgtagcttctaaaactgtgtcctcctcagttgttctcccacccattgccttcacagatgcagagaccaagattcactcactcgccattggacctttagcacccaggtctgtctggcacaaagtaagtgccaggctggtggagtgaatgaattctacttagagaatggccctcaacacaggctgctcattaccaaaactatttggtctttaaaaagtgtgactctgatgcttcagtctggggtgggtaccaaatacttgtattttttaaagagcctcacagcaacttgaatttaccttaatttttatgtaggaacccttgtcctggtagagagtataatttgctgaataagtctactttttcaatcaacatatacggaagagatatcaatgaaagaactgacaaactgtaaagccccctctccaggtgtaaagcactcagggcttgggcctagaagctgatccatgtctctgtgtctgttctgaaatagcctgtgtgatgtgggagaaagagtattgtccttagagacaaggctcgagactggctgtgccctttccttgggcagtatgtagggaacaagaatgcctgcccgcccgcaggcaggttacctgtggacaaggtgtagtgggcagttagaaggtgttggtatgttaatcagtcttttttttttttttttttttgagatggagttacgctctatcgcacaggcaaagtgcagtggcgcgatctcagctcactgcaacctcccaggttcaagtgattcttctgcttcagcctcccaagtacctgggactacaggcgtgcgccaccacgcctggctaatttatgtatttttttagtagagacggggtttcaccatgttggccaggctggtctctaacttctgacctcgtgatctgcctgcctcggcctcccaaagtgctgggattacagacgttacagacgtgagccaccacacctggccagtctttttttttttttttctgagatgaagtctcactctgttgcccaggctggagttcagtggcacgatctcggctcactgcaacctctgcctcccgggttcaagcgattctcctgcctcagcctcctgactaagtgggactacaggtgcctgccaccacgcctggctaatttttgtatttttagtagagaccgggtttcaccatgttggccaggttggtctcgaactcctgacctcagatgatccacccgccttggcctcccaaaatgcttggattacaggcgtgagccactgcacccagcctaattagtcttttgctcctatttgtctttatttgggataaaagttatagccttgttggggtcttcttacacagtagttctgactcacagccatcatctgaacctttcctctggttcacaaccaaaattaaacatccatttatggggattgagatagttttcatagtaaaggaagttttgtttgtaatgaccttcctgtttgatgggtctaagtatatggctggcccttctggctaaagcaggctttaaactggtcctgcctagaatgtgtacctcccactccttatcatctctcttctaggtcccttcccctttccctttcccttccccttccccttcgcttcttccttccctttgttccttttcctttcctttttttcttcttttttttttttttttttgacagggtctcactctgtcacccaggctggagtgcagtgatgagatctctgctcatgtagccttgaccttctgggctcaagtgatcttctgccttggcctccttagtagctgggactacaggcaccaccatacytggctaaattttttttttttttttggtagcagtgaggtctcactatgttgcccaggattatctcaaactcctgggctcaagcgatcctcacgccttggccccccaaagtgttgggattgcagatgtgtgccatcacactctgcctcttccgggtctttttttttttttttttcccagacggagtctcgctctgttgcccaggctggagtgcagtggcacgatcttggctcactgcaacctctgcctcctgggttcaagcgattctcctgcctcagccttccgagtagctgggattataggtgcctggctaattttttttatatttttagtagagacggggtttcaccatgttggtcaggctggtctcaaactcctgacctcgtgatcctcccacctcggcctcccaaagtgctgggattacaggcgtgagccaccgcgcctggcttttttttttttttttttttttttttttttaattttacttttttgagacggagtctcactctgtcacccaggctagattgcagtggcacaatcttggttcactgcaacttccgcctgctggattcaagtgattctcctgcttcagtctcccaagtagctgggactacaggcacgtgtcaccacacctggctaatttttgtatttttagtagagacagggtttcactatgttggccaggctggtctcgaactcctgaccttgtgatccacctgcctcggcstcccaaagtgctggggttacagctgtgagccaccgcacccggctcttccaggtcttaatagagcctttttcctctactgaaagcttccactgctttctgcccccttcaaactcatatatacttcattgaattgtttcctcggggaagccttcctgataccaccctacagagggtgtcagacgccctattatgctgtcacagcacttttcacagtaaggtaaattgcttttataattattggattgcctctctgactatgtttgttgaataaataaaaaaaggtggccaggtgccgtggctcacacctgtaatcccagcactttgggaggccgaggcgggcggatcacgaggtcaggagtttgagacaagcctgaccaacatggtgaaaacccgtctctactaaatatacaaaaattagccaggcatggtggttcgtgcctgtagtcctagctactcaggaggctgaggcagaagaatcacttgaacccgggaggcagaggttgcagtgagccaagattgtgccattgcactccagcctgggcgacagtgtgagcctccatctccaaaaaaaaaaaaaagtggctttataacctgccttctttttcttattcccagtgctcttaaagttccgtacagataaaggaagagatcccagttctgatacatatgaggaagattctgagttgttgctccagatacgaaatgatgtgcttgactcactgggtattagtcctgayctgcttcctgaggactttgtcaggttggtgtcagtatttatcactgtttagtctggacagataaagtttgttttcaggatttgccttaatttgacragctcttttattagaaacccttcagagagcaccctgccacattctgctcgctcctgtagacttctgcctctccactagaatagcaatatataaaaaataaagaggggacagattctgatttttacaataagtatcttatattcacgtggttcraaattcaaggcaatgtaagatctgtaaacattattctctaccttttttcactttatgtgatcttgttatctcttggggacatctccagatcagtacatagtttgctccctcttttccacagctccttagtattctagagtgtgaagcgatggagtttattgaaccagttgcctgctcactcaagttgtgttcaggcttttctaactgcgtaacactgcagtgtgtgaccttgtgtcgtacgtgtgcaggtacaactgcaggataattaggaggaagggagttgctgggtcagaaggttgtaatttatcatttggtcagcattgccaccttgcctccattggtatcctatcaattcatacccccagcagcaaaaccacccatgttcccagcatcctctcacttggacactccatgctttcaccttacgtgactacctttttgctctcataaacaggcttaggatttgattggagaagaccacatagtgactaggtcacaatctctctctctcttttttttttttgagacagagttttgctcttgttgcccaggctggagtgcaatggcacaatctcaactcaccgcaacttctgccgcctgggtccaagcgattctcctaactcagccttttgagtagctgggattacaggtgcctgccaccacgcccagctaattttttttgtatttttagtagagatggggttttccatgttggccaggcaggtcttgaactcttgacctcaggtgatccgcctaccttggcctcccaaagtgctgagattacaggcatgagccaccacgcgctccatccacatctccttccaagcagctctgggatcatgtacacaccctaattccctttccatgtcttgagaggcttcctaaactcggctttgcagtgcctccagcttgtagcagtgataatgatggctgcagtttactgagcagctgttatgtactaggcatcaggtagtaagtagccaacccagatcccaccccaggtatcattacagtgcttgctctagtagcagcatgctaccttggtttcttatcaacagtaaggtctgccagagtccctagtcctttctttgttgacttcctgctgggaacttcaggtgagcaacagcaaaccccactccatttagggccagcagtggtctttgaagcacctgtggtgccctgacccaaaaagccatgattgtcctggtacagtggctcacacctataatcccagcactttgggaggttgaggcaggcagattgctttgagcttaggagtttgaggccaaccttgacaacatggtgaaaccctgtctctacaaaaaatagaaaaattaactgggcatcgatgactggtgcttgtagtctcagctactctggaggctgaggctagagcatcgcttgagcccaggaaagcagaggttgcagtgaaccaagattgcaccactgcattccagcctgggtgacagagagagaccgtgtctcaatacatatagcgtaaggctgggcgcggtggctcacgcctgtaatcccagcactttgggaggccgagacaggcagatcatgaggtcaggagattgagaccatcgtggctaacatggtgaaaccccatctctactaaaaatacaaaaaattagccaggtgtggtggtgggtgcctaagtcccagctactcgggaggctgaggcaggagaatggcgtgaacccgggaggcagaggttgcagtgagctgagatcacgccactgcactccagcctgggcgacagagcgagagggagactccttctcaaaaaaaaaaaaaaaaaaaaaaaggcagcaatagagtggcagtgcctgagcacacgagactgagacatggaaaagcggtttccccaaagagggtgggcagggaaggaaccactttggagagaaaaccagccagcagctcgttaggctgtggctttcctcttctaggaagcagggccttcaactctgctggccggtgatgcagagccagaccgttcatcactttgaatgcccaagtagtcacttggctgcacactcacggcccagcacacagccccaggtatgctcagtggctgccgcttgccactggctgactggctgggattattggaactgaagccctgcatgacccagtccttcttcctgctgcgaagcacagcagaggaaacacttgcttctcacaaactggtcattcctccaccaagagatgagtgccccagtgagttaccatgagatccaagcctgtacagtgtcatcagccgctgacctcacggtgctgatgttacaaaggcaccttgtaaactgctgcctatgtttagatgatggctttttttttttttggagacagagtctcgctctgtcccccaggctggagtgcgatggcatgatcttggctcactgcaagttccgcctcccgggttcacgccattctcctgcctcagcctccccagtagctgggataacaggcgcccgccaccacgcccagctaattttttttgtattttttagtagagatgtggtttcgctgtgttagccaggatggtcttgatctcctgacctcatgatccacctgcctcggcctcccaaagtgttgggattacaagtgtgagccaccacgcccagcctctttttttttttttttttaagatagggtctctctctgttgcctaggctagagtgcagtggcacatcatagctcactgcagcatcaacctcctgggctcaggcaacactctcatctcggcctcttgcgtagctgggactataggcgtgtactaccaagcctgcctaattttttttttttttttttttttttgtattgacagggtctcactatgttcaccaggctgtttcctattttttaaagttatgaaccgcataacaagagagtatacaaagcacatctgcctgagttaaatgataattaatacttatttatttttgttgtagagaygggggtctcactctgctgcccaggctgttctcagactcctggattcaagccatccttctgccttggctttccaaaacttctgggatagacaggcgtcagccacttgtatctcttttaatttggaatagcccttggcaaactggcttgccacctctttttgtaaataaagttttattggcacacttactcatttatatattatctgtggcagcttttgtgccacagcagggttaaatagttataacaaagaccatatggcccataaagctgaaaatattttattatctggttcttttgtttgtttgtttgtttttgagacaaagtttcactttgtcacctaggctagagtgcagtggcrtgatctcggctcactgcaacctccacctcccgggttcaagtgaatctcctgcctcagcctcctgagtagctgggattacgggcatacgccaccatgcccagctatttttttttatttttttattttttttatttttttttgagatggagtcttactctgtcacccaagctagagtgcaatggcccgatcttggctcactgcaacctccgcctctgtgctctgtggttcaagtgattcttctgtctcaacctcctgagtagctgggactacaggcgcgtgccaccacgcccggctaatttttgtatttttagtagagatggggtttcaccatattggccagactgatctcaaactcctgacctcatgatccacccagcttggcctccgaaagtgctgggattacaggcatgagccactgcacctggcctgttatctggttccttttttttttttttttttttgaatcagagtcttgctgtgtcacccaggctggagtgcagtggcgtgatctcggcttattgcaacctctgcctcccagctttaagtgattcttttgcctcagcctctggagtagctgggactataggcacgtgccaccacgcccagctaatttctgtatttttagtagagacggggtttcaccatattggccagactgaactattcctccaatacggccaaaatgagattctaccagcaatgggaggagtttttttaattattattattgggagtctctctctcacccaggctggagtgcagtggcaccatctcggctcactgcaacctccacctcctgggttcatgcaattcttccacctcagcctcccgagtatctggcattacagctgcccgccaccacacccggctaacttttgtattttagtagagacggggtttcactatgtaggtcaagctggtcttgaactcctgacctcaaatgatccacccgccttggcctcccaaagtgctgggattacagatgtgagccaccgcacccagccctagttctccatgtattttagagctctgtagtggaccttgataagcaggaagatgttacccctggatgaacaaaatgggaatgtgctggtcctrgccagggcgtaaggagccggaggtgcctttggacacagctcttgggattggaatggatacagccttttgggagggcattttggcaatacatatgaaaaactagcattgctatatttagaaatttgtcttaaggaattatttcgacgcctgtgtctttgtcaagatgtatgattacagtgttgaacagcttaaatgtccctcaataggttatagaacagaagagtaatagttgataatatttgggtttaaaattatacctatttatttatttatttattttttgagacagtcttgccctgtcaccaggctggagtgtagttgtgcgatctcagctcactgcaacctatgcctcccaggttcaagcgattctcctgcctcaacctcctgagtagctgggactacaggctcaccccaccacaccaagctaatttttgtatttttagtagaaacggggtttcaccatgtgggccaggatgatctcgatctcttgactttgtgatccgcccacctcgacctcccaaagtgctgggattacaggcatcagccactgagcccgccctaattatacccgtttagattgtgcacttttaaaaatgtctagaaggggctgggcgcagtggctcacacctgtaatcccagcgctttgggaggccgaggcgggcggatcacgaggtcaagagattgagaccatcctggccaacatggtgaaaccccgtctctactaaaaattcagagtagccgggcgtggtggcgggtgcctgtagtctcagctactcaggaggctgaggcaggaaaatgacatgaatccgggaggcggagcttgcagtaagccaagatcgcgccactgcactccagcctgggtgacagagcgagactccgtctcaaaaaaagtctagaaggatgtgcaccacactggggagattggaggtagttctgtagggaggctttccctttcacttgtctgtgttccagtttgcttggtgagcacacagcattgtgttcaggagtaggagctggcagagcacacttcctttggggaagtggtggaattaagtgatttgcttactaggatgggtaacttggaggggcaggtgactgtgtcatctaaaatttgtcctctagatgccccatcctggcccagaagggctggtttctatgtgggttgtgaagactttttctgccctcatactttaatttcacgcctcaaatttcccttgcttcctacatgttaacacaggcctgctccctgacatttgtctgggaatagcatatagaacccactggccattatgggtaagaagagaattgcgagaatgtgaccagggcactgaaacatctgatatctctaggacagatataggaagcacagatatagtctttcctttaacttataaaggtaaaaataaaagtattgtgaaagaatttctgcttgccaaagttcaaaggtcttttccaaccacttatgaatcccttgctcagatttcattttcacgcctagatgccagcattaacactgctatctgaatcgggccctcctgctagaagttgtttttattcaggagagcctactactgaatttctccagatgtcatggtcacagttctgttcccagtgctccattttccttgtcttcctctcttttaggtactgcttctccgagatggccccagtgtgtgcggtggttggagggattttggcacaggaaattgtgaaggtaaaacatcactgtggagcagaaaattgttaaccatgactttgtatatgtgctgacagagagaatggaaactgtcttagacagctgcctgctttctctcaccccattcatctttgtttcatgccctccccatttccacctcatcccattttctctggcccatccaggtgccattcagcaaatgaccttggagtgcctgctctgtgcttagctcacagttggccatagtgcctcgaaggtgtgatctgctctcccctaactgtattagttatccagtgcctgttgtattggtcagggattctgcttctcatagctctataagtgagtactatcatgatccccacttaagaggaagacacttgggcccatgaaagggactccagaacctgtgctcttaacctctgtacagtttatctctattcatcaccatgacatcaaagccctcccttttttttttttttttttttttttttttgagatggagtctcgctctgtcccccaggctggagtgcagtagcacgatctcagatcactgcaagctccacctcccgggttcacgccattctcctaccttagccttccaagtagctgggactacaggcgcctgccaccacgcccagctaatttttttgtatttttagtagagacagggtttcactgtgttagccaggatggtctggatctcctgacatcgtgatctgcccacctcagcctctcaaagtgctgggattacaggcatgagccactgtacccagccgcacccccccccctttttttttttttttgagacagaatctcactttgtctctcagactggagtgcagtggcatgatcttgactcactgcaacctccgcctcctgggttcaagcgattctcctgcctcagcctcccgagcagctgagagtacaggttcccaccaccacaccaggctaatttttgtatttttagtagttcaccatattggccaggctggtctcgaactcctgaccttgtgatcctcccacctcagcctcccaaagtgctgggattataggtgtgagccaccgcacccggccaagcccccgtctttttaaccacacactgtaggtatttgtagagaaatcagtttctgtgtccccatgaacacaccaggagcccctcaaggctctgtacaggatgacccgtgaccctgttaggtaggtgttagtgtgtctctcagaagggaagcatcttatacagggtcacataaccagtaactagcacagccttttgagggtcttctggaacatttgggttgctaaaactataccatacccccaaatatattgtacattctttgcagactttgctatttgcccgaagatgttaaatttgccttttgcaggttcttggctgccttcgtggactccggtgaggctttttccttctttcttatggagcagagtcgtgcctggttaaatgattggccatgtccatgtacatgtcaagtttgagcttgggaggacagtttggaggccagcccttaacactttgtcttggggtctgtacattctggaggcgtttggctcaatttgttagtcacaccgttttcctaaggctactttttttttttttttttgtctattttttctgatccttctctctggtctaaattcttcctttgatcaaatctaactttcttctatgtaatgggcaccgaggagatatttggagggggaagaaaagtgtgcaatggccatacctctttccttgctcacattttatacatagcccagagtgatgtgaaaattacagtttatatgcccaatctgagaagagggtaatggccacccagaggactgttcgagcaggattctgaggctccctgtagacaaactgcaggaaagagtgcagcaatgggaatgttctaagtggggaatgggaatgtacatatttttgtagcctaaaatgacgacaccaccaataatagacaagacttactgaaagcccactgtctgccacacaaagacagtgttttttacgtggatactcatttcatctcccaccggccctatgaggtaggaactcctgtgatccctggtttataaaagagagactaaggtgcaggaaagaagatgcttgcccaggctagtgagtgtggtgccaggatgtgggcccaggcagtctggtttctgagcctgtcctcttcaccacggggcagtcatgcatcaggtgttgccttcaatggcaccatcatgtagagactgcatggaccccagggccgctgcccttgcattgtcagccttacttctgcacatcccattgaggggctccccctaaatttttcatgtgggatggagactggaggttggggcaggtagccttgaccccattgttggtggtagtttctcacatccccatcctcacacagccccctccttcctgcctgctggagacagctggtgcccagcatcttgtttctgtttatcccagatagccagagtactctgcattcttcgttgctgggtgtgtttggaatctcctcctaccccatcttgcttgggaagcactttaccttttgccccatgtcaccccatgccctgctctcatccccagtactccttcatacttattactggtcagccttcagccagctggcaggcggggcctgcagtccaagggcctcagactcacctttctctcctgaggcactgtctgagcgcctatggaaagcttacactaggagatgggtcaagcgcaagtctgctcctttggaatcatcttttgcgtctttcctttcttacgtccttctagataccctattttatatccatgtctacttccttgggtttaaagcagttttcctttctctccatccccaccgtccacggcaggtctccctgtctatggtaagagaggtgatagtgaaagcagcagccatcccaggttcatggtaaaacacataccatctcctgtatcttgggtttgagggtctaagagttccacctgtgtactgttggacccttccacctggctaggttggtggcatccccagtattggtaaaggactcctggccctattattattaatagcagctcctacttactaagaatttactacgtgctcggcactttacaagcctagtcacatttcattctcaccaaaactctagcaggcaggtgctttttatttgcctatttgcccagagaagcaaacttctttctgatccaagctccatgtggacagagacctcagaatccttaatgtctagctgaatacctggcatagagtagatgcttaataaatgttcccttgactgggtgcagtagctcatgcctgtaattccagcactttgggaggattgcttgaacctagaagttcaagactagcttgggcaacatgaggagacctcatctctacaaaagtcccagctactcaagagggtatgggaggatatctggagctggggagacggaggttgcagtaagccgagaatgtgcctcccacctgggtagcagaacaagatcctatctcaaaaaattaaaaacatttacaaataaataaaatttccctggaaaaatggctgactaacactatttgtatatggtagatgtgattgtccctgttttatggatgaggaaaagggtttggtgctgagtttgaagaggagcagttcaggatgtgtagccccaccttcctcatgaatgatgggacggtgctcctgggaaccgttaaaccctgccctggcagcttgcctaggtgatgtcttcctctttaaatggtagcttgtggtgaaatttcaatcctttctgggttaaggacctgtttgaaaatttgtgacaattgtgaaccctttctcagaaagatgtatgtgcatacaagactcagtatgttgtttcgggggctgaccctgcctcaaaagacagggccacgtgctcactctccttcccacccctctctctcgctctctgttgcccaggctggagtacagtggtgccatcacagctcactgcagacttgatttccctggacttaagtgatcctcccacctcagcttcctgaggcactgagactataagcacacgccaccacatccaactaattttttttattttttgtagatatggggttttgccatgttgcccaggctggtctcgaactcctgggctcaagtgattctcccgcctcggcctccctaagtgctgggattacagatgtgagacattaagcccagccctgttcttgtattttaaagtgctctgtctggtaaccccacaagataatcaccattgccattgctaaatagcattgtccaggccctctggatcccagccctgaccccctgtggaagcctagcgactctatgtcctcatggaatagcccccgcttctgcatcagtgtgttccttgattaaatgtgtccccttaggtgataaaggccacagcctaagaactgccacctttctcagttgaatagtcatgaataattatttctgctgtttgcccaatggtggtgcaacacagtgttagtcattgttttagttttaaggtgtttttttgtttgtttgttttttgttttgagacagggtctcactctgttccccaggctggagtatagtggcactattacagctcactgcagcctcaatgtcccaggctcaagcgatcctcccacctcagcctcccgagtagctggcaccttgggcatgcatcaccatacctggctaatttatgtcatttttctttttctctttttttttgagacagagtctcactgtgtcgcccaggctggagtgcggtggcgcaatctcagtttactgcaacctctgcctcctgggttcaagcaattctcctgcctcagcctcccgagtagcatgccaccatactcggctaatttctgtatttttagtagagacaggtttcaccgtgttggccaggctggtctccaactcccaacctcaggtgatccgcccacttcagcctcccagagtgctgggattacaggcgtgagccactgcgccccacctattttagttttcatatagacgggatctcaccatgttgcacagactggtcttgaattcctgggctcaagtgattctcccacctcagcctcccaaagtgctgggattacaggtgtgaatgtgcctggccctggcctgttttacatttttgagatacatagtttaacccaggcaaatacatttcttaatctcatgttaggaaaataaggtaatgtttggagaggttaaataatctccccatggacacacagcttgtaagggacagagcaaggagataggacaatcaaaattgtctccagacattgccaaatagccctttgggagcaaaatcgaccccagttaagaaccactgccctagactgcttttagaatttttttttccctctattcctcttaaagcacttgagctaaaccctcttttcatttttctccccaggccctgtctcagcgggaccctcctcacaacaacttcttcttcttcgatggcatgaaggggaatgggattgtggagtgccttggccccaagtgaactcaagatttggcagccccagagatgccaactgcagcatgcccacctgtattccctgtccccttccttcatgaaggcatctccaggcaaggaaaactgaagtcattggcccgatacaaaacatttcctgcaacgaaggaggtggtgccgacgtgctgcttcccatcaccagcagctgctcgacaaggggcgcagggtggctgtctttgttccagcactgttcaggctgcctgtcatcccgggcctgccagctcccctgagtgatgagcacttccaagcacccctctgccctttctctgtccttatgctgtcccggcctcgccagccctctggggmattgtgggagatgcctgccaggaatgagcaagctctgttgctcgggagcctcttgtcaccttcttggacttattccccacctgataccttatagagaaaagtgtgaattcaggtggagagtaggcccaggccccatgaggcaccagtggaagcacagctccaagttcagacaggtgcccttagagaggaaaaccatgacaggcaaatgcatttcctctggagtttgagaccctgacaaacaacaggtggcatctggtgtgctgttcttgagttttcgtttaggattagttgagttccagctgggttttgggagaaaggagatgctaccaagtcttggatgttagggcgagaccctgcaagttgagtattagagagcttgtctttcaaggcaggttcctggggcttcagggctaggagggaggagcctgcccttttaacagaaccccagtcacatgcggctcaagtcactcagaggctgttgcatttcagggctatgttggtcctttgtttacctcctaaaccacagctgtttgtgtttcacatatgttgtgaattttccttggttctttttaaaggaatgataataaagttacttgctttaggatttgcttgtttttcttccacttcagaagcttctgagagggaatgggatgatcctaccagttgccttttcagacctgaggctctaactcaagagattcctcctctccctcaccattcctgccaccattttttctgggtgatgcagcaagagttaaattgttcacattctagaatgtgtagaagcttctggctccagttgtctaatggataattcagctaaatagtggctattttcagtggcaagaattataataataaagggaagtcaaaagtgatgcttcatatgccccaagtgccacagccgctacgggtcagagcttttattggaagaccaggtttgccttgatgcagccaaagtgcgttccagttcaccccactcttgcttgtgtttcttctttatgtaaattgtgtgatgtttcaataaatcagtctctttcctattctgatcctgcagcagttagtcggggagaaaagtggtcttcactacagaagggcctctgttcctcaaccctgcatcacctgctcccgccggaggtgagacaggggctgcatttcggaaaggatccgtgtctcgccacctttagtgcaagtcagtggcgtcagggtcagcagttacattgctgcatgaatttcacgtggtctttaaattctgagctaattatactcttgactgtaatgtgcagccttggtcacaagggggagcaggtgggtctggattgataaaaacaaaattgtagaatcgtcccggaagcttcaaacttttccaccctgtacctctaacggcagagattaagtcacccagaggacccctcaggaatcgaggggaaagctgccagccccaggcaagaaatgtctagtttctacaaatttcataaactgccacatgatgtttgtattaatcataaaaatgaagaaaaaaaggccaggcgtggtggctcacgcctgtaatcccaacattttgggaggctgaggcggacgaatcacgaggtcaggagtttgagagcagccaggccaacgtggtgaaaccctgtctactaaaattacaaaaattagccgggcatggtggcgggtgcctgtaatctcagctactgggggaggctgagacaggagaatcacttgaacctgggaggcggaggtcgcaatgagctgaggtcgcaccactgcactccagcccgggtaacagtgtgacactccatctcaaaatctgcagtcagtcaggcatggtgggaggctgtggcgggagaagcacttcagcccaagagttcgtgaccaacttgggaaacaaagcaagaccccatctccacaaaaaaagaaatagctgagcatagtggcttgtgcctgtggtcacagctgcttgggagactggggcaggaggatcacttgagcccaggagtttgaggctgaaatgacctggatttcaccactgcactgaagcctgggtgaaagagtgagacactgtctcgaaaaaaaaatcccagcactttgggaggccgaggcgggcggatcgcgaggtcaggagttcaacaccagcctgaccaacatagtgaaaccccgtctctactaaaaaaaaaaaatacaaaaactagctgggcatggtggcgcgtggctgtaatccagctactcaggaggctgaggcaggagaatcgcttgcacctgggaggcggaggttgcagtgagccgagatcgtgccactgcagtccagcctgggcaacagagcgagactccatctcaaaaaaaaaaaaaaagttatcttgacgtatgttctattagctcattacaggtgtggaagagatggcttaggttgcaggtggtaagtttaatgataacaaccaatggtcattatacccatgcaacctgcctggtacttttcagaatccttgttctttgagttggaatccccacagcaaccccatggggatagatgctgttctcctacccatactggagataaggaaacaggctcacctcacaagcaagggagagatggaaatggcgctgactgggaaagctgcggtgcggggcactcagtagagattcatgtagtggcacggcttgttcgctcagtgagaacaagattttgggcttcccttcacaagtccctgagacccagtagtcactggaaaacatcatgtcggccttcataaaagagggccttcaactaggtccaaaagggtgggtggatttggttcctaagcttgtacgatattcaagcaatatacaagcataaagagaagattcctctccgctgcagggcacagcctgtcagcacaatgttggccacataataagagcagctgacttcacagctaaactgcattttggagagaaatatgagatgctttttggacatgttagctgtatccactttctttttttctttttcttttttttttttttttttttaatagacggagtcttgctctgtcacccaggctagagtgcagtggtgtgatctcggctcactgcaacctccacctcctggtttcaagcaattctcctgcctcagcctcccaagtagctgggattacaggccccggccaccatgcccagctaatttttgtacttttagtagacagggtttcaccatgttggcctggctgctctcgaactcctgacctgaagtaatccacctgcctcagcacccaaaatgctgggattataggtgtaagccacagcgcccagcctagctttatccactttcatatccactccccggaggtcacccctgttaactgttgagagtgaatccttccagactgccatgttcaaacctagactctaccactcagccatgtgaccctcgctacactactttctgttaccccatccctaaaatgggtagaatagtggcacattcctcagatatgtggggattaaaaaatcagtctttgaatcaaaattgctcaatgttagctgctattttacatattcataaataactttttctccaatgtgcttttttctcaatatgtcttggagatccttgtcagtatttcatgcatcaaattccataaccaaaacaggtgaaccattaactattgaatcagtctgctgctgtgtgacattgtgcacacttaggaaagacttcccaaagccaagttccagggttagcaagtataaaaatgcattttaggagttggttcttgttttttattttgttttgttttttgagacagagtcatgctctgttgcacaggctggagtgcagtggcgtgatctcggctcactgcaacctctgcctcccggattcaagcaactcctctgcctcagcctcctgagcagctgggaccacaggcgcccaccaccacgcctggctaatttttctatttttagtagagacggggtttcaccatattggccagtctggtctcgaactcccaacctgatgatctgcccacctcagcctcccaaagtgctgggattacaggcatgagccaccgtgcccagcctgttttgtttttttagtgatagggtcttactctgccacccaggctggagtgcagtggtgtgcaatcatggctcactgaaatcttgattttgagggctcaaagtgagtctcccacctcagtctcttgagtagctgggaccacaggcaggcaccaccatacctggctaattttttcccccggctaattttttttttcttttctttttcttttttttttttgagttggagtgttgctcatttgcctaggctggagtgtagtggcatgctctcagctcactgcaagctccacctcccgggttcacgccattctcttgccgcagcctcccgagtagctgggactacaggcgcccgccaccacgcccggctaattctttgtatttttagtagagacagggtttcagcatgttagccaggatggtctcgatctcctgacctcgtgatccacccgcctcggcctctcaaagtgctgggattacaggcgtgagctaccacgcccggcctttttttttttttgtatttttagtagagacggagtttcaccatgttccccctggctaatgtttttaaaattattggctgggtgcggtggctcatgcctgtaatcccaacattttgggaggtcgaggtggctggatcacctgaggtcaggagtcaccagaccagcctgaccaacatggtgaaaccccgtctctactgaaaatacaaaaattagctaggtgttgtccacatgcctgtaatcccagctactctgaaggccgaggcaggaaaatcgcttgaacccaggaggtggaggttgcagtgagccgagatcgagcagttgcactccagcctaggcaacaagagcgaaactccatctcaaaaaatatatatacatatttttagtagccatgaggtctcactatgttgcccaggcttaaactctggcctcaagtgatcctcttacctcagcctcctaaagtactgtgattacagatgtaagctactacgtctggctggtacttttctttcttttctttctttttttttttttttgagatgaagtctcactctatcgcccaggctgtagtgcagtggcacaatctcggctgactgcaacctccgcctcccgggatcaagcaattctccaacctcagcctcccaagtagctgggattataggtgcacgccgcccagctaattttttaatttgtaatttttttactttttatttatttattttgagacagagtttcactcttgtcacccaggctggagtgcgatgatgtgatcttggctcactacaacttccacctcctgggttcaagcaattctcctgcctcagcctcctgagtagctgggattacaggtgcccaccaccacacccaactaatttttgtatttttagtagagacagggtttcaccatgttgaccaggctggtcacaaactcctgacctcaagtgatccacccgcctcagcttcccaaagtgctgggattacaggtgtgagccaacactaccggccagaaatttacagatgttaaaggctcagtgaatcccaaacgggataaacatgaagaatatcatgtttagaaaaaacatctaggtggccgggtgcagtggctcatgtctgtaatcccagctgctcaagaggctgaggcaggagaactgcttgaacccaggaggcagaagttgcagtgagaatcatgtcactgcactccagcctgggcgacacagcgagactcagtctcaaaaaaaaaaaaaaaaaaaaaggaggccgggtgtggtggctcacgcctgtaatcccagcattttgggaggccaaggcctgaagttgggagtttgagactagcctgactaacatggagaagccccatcttgactaacatggagaagccctgtctctactaaaaatacaaaattagccgggcaaggtggcacatgcctgtaatcccagctacttgggaggttgaggcaggagaatcacttgaacccaggaggcggaggttgtggtgagccaagatcgtgccactgcactccatcctgggcaaaaagagcgaaattctgtctcaaaaaaaaaaaaaagaacctccatctccatgcttaaatacttgtgagcagggcaaaggccatgcagagagtgttcacacccagaccaacgccctgcttcgccttcactgcagtgcatgccatccctttggtagaggatgagacaccttcccataactggctcccctttctcataatatgtcttagaattattaacatggttgaatttaggtctaccatttgctttccatttgtcccacttttgttcccctgtttctcctttcctgccttctcttgaagtatttgattaattttttttttttttttttttgagacagagtctcactctgtcacccaggctagagtgcagtagcgcgatctcggctcactgcaacctccacctcccagcaagtagctgaggttataggctcccaccaccatgccagcgaatttttatatttttggtagagacaaagtttcaccatgttgatcaggctggtcttgaactcctgaccttaagtgatccacccacctcagcctcccaaagtgctgggattacaggcgggagccacctcactcagctaaatgttctaataaatacccatgtacccactattttgccacttgcagtttttattcatcattatctgtcatttttcttcatgttggtaaagctctagttcattcccgctaatggatgtatactattctgttgtgtgattacatcggacaaaaaaagttttttgttttttttttgagacagagtcttgctctgttgcccaagctggagtgcagtggcgtggtcttggctcactgcaacctccacctcccgggttcaagcaattctcctgctttaccctcccaagtagctggggttacaggtgcccactaccacaccggccaattgttgtatttatttattatttatttattttttattctttttgcgtctcactctgtcgcccaggctgga

SEQ ID NO: 94808 - DNA, 129357 bp, Homo sapiens
  misc_feature (1)...(129357): n = A,T,C or G
agtgggaggggttctagatggggagtacacgtggatcaggcttctgggatggaacatggcgacagagggctggccagggtatgggttccatacacatgaaggttcccagcatctggggttgttcagaaggattccagctgttcgggtcctggagattgggatttagatgaggaggctccacttgggaagcttggatgggatcccagacaaagcgaggtgtggacccgtgtgctggctcacgcatcctggcattgggaggaggatttataatacactagactacaggtggaagattggtccttcaggctgcgagttagcaggatcagacacagtccctcgttctttttctctctatgctaaggtaatggtgcacgaccatttcaacccatgctcccctcagggcacgcagacaagggatggccagggtggcacactcctctgaggattcccaaagctgttccccattgcactgagcccttcccctgtcctctgccacagcacacaggctgctgtgtttagctcctgctagagctcttgggctagcccagggcctgggattctgccctgtggtgcctggtgagaggaccagcccgttggttcctgcattgcttgaccccaggacatcctaagtcagggtggacgttaataagcccgacctttggaactacgtgggtgagagagctggagggaagggctggaagaccaatccctggagagcagaggtcagcacagcccttaccctcctagttattttggtgccaaaatgtctcgatacgccctccaggtgctggcttgtttatggcctgcagctggccacgctggggagggagttgggggaggaagcgagcagccagctgccctgagcagaaagtggaagcttggctcagctcagcctgcacatgtgtggggctgtctactggcatgtagtgtcccttggtatcaggaggcaggaagtctaygtgcaggttgaatgtgtggcccagagtttttgggacagatgcagtgcaagaaacggggtacagagcagttgaaggtgctgcatggagaaagttctgcaaccagcaatgaagggctggagaagggggatggatccctgctattgatggagtgcctaccttgtgccaagtacttcacatctgacatgtaaccatttcagtagtacttataaatcagtagcatcattcatatttcttagatgaggaaattgcggttcagaaaggttatgtaccttacacataggtcacacagctagtgagagtcaaggcttgaatgctggtgtccctgagtctataactagacctttgcccactgtatggtgctgaatggaagtaggagagtttggtggagtggggggagggagattagcatttaggattcaacaacaactgcccttggcccttgctattttttttttccattgaaattttcaggctgggcgaggtggctcatgcctgtaatcccaggactttgggaggccgaggcgggcggatcatgaggtcaggagttcaagaccagcctggccaacatggagaaaccccgtttctactaaaaatacaaaaaattagctgggcatagtgacaggtgcctgtaatcgcagctactcaggaggctgaggcaggagaatcgctggaacccaagaggtggaggttgtagtgagcccagactgtgccattgcattccagcctgggcaacagagcgagactccatctcaaaaagaaaaaaaaaaagaaattttcattgagagacttgcacattcacatgcagttgtaaggggtaatacggagagaccccaggaacgctttacccaacttcctccagtggcaacatcatgtaaagctacagtacaatatcccagcggggtatcgacgtgggtccagtctgctcatctgactgagatctccacaactggatttgtactagtgtgtgtattcagttctctgcaattttgtcacatgtgtggttaattcctttttagggtgtctgttttcctactcctttaacatttaaaaaacctttcttccttccagtttcatttcacaggactgagtcgcatttactgatctttgaggagtagggcaggtgcggggtgggagttggggacatttggaaatgtgtatggtggtttttggttttcacatgcttggggaccagaagctctatgtcacatgcagtggagaaatgtgctgctccaaatgacaatcatgaccctagttcagggtaaaaattggatgattcccatgttttcaagtttcccttttatattctccaatgtgaagtggttctttctgacaggagttgcgcctcttcactgacgtgtcacaaagaagrattaggttggacgtgaagtgtgttattactgccatcttgatatgccctcaaggtggggtagactcagggagcaggctgtcgttagagatgattcatagtgtgactcattcaataaagaggcaccggagggaatgtgctcttccaggccaccgctttgggggagttgatgtctcagcccttcctgagatctccaggggaacagcgctgtgcgctcaccaggagaacaaaaaagctgcttcatcatcaaagaacatttatgccagttttctttgctttaagaatataattcttaccaagcctaatcctctttttttaaaatacactttttattttgagtagttttagatctacagaaaagttgcaaagatgttatactgaggtcccccacacccaaaaccccctattattaacccttacatgagtagggtacatttgccacactgagtgactcaaatgttgtttccagtaaaatatacttatttctttccaacttttattttaggtccagggggtacatgtgcaggttttttacatgggtaaattgcatgtcatggcggtttggtgtacagatagatacttttgtcacccaagtaatcagcacaataatccccgataggtagttcttcaatcctcaccctcctcctacccgggaatcaatattgatgcattattattaaactaaagccccatacttaattctgatgtcctcagcttttacctaatgtcctttttctgttctgggatcccatctaggaacccacgtgacgtttagtcatcatgtctccttggctcctcttgtctgtgacaatctcagtactttctggtaattgcagatttcctcctctccagccacggtttctgcttcttaaccgtcacgttcatgcccttgcctccttgactctaaaatgatgagttctggggcctggatgtcccctgagctcctaacaggtgtaggcaacagcatttattattattattattattatttttgagacggagtctcgctctgttgcccaggctggagtgcagtgacacaatctcggctcactgcaacctctgtctccggggttcaagtgattctcctgcctcagcctcccgagtagctggaactacaagcgcccgccaccacgccaggctaattttttgtatttttagtagagacgtggtttcaccgtgttagccaggatggtctcgatctcctgacctcgtgatccgcctgcctcagcctcccaaagtgctgggattacaggcgtgagccaccgcgcccggccggcaacagcattttaatggcctccctatttctagtcttctctcctatggatcattctctgcccagacacatgagttcctctgctttcccaaacccccttgccagctccagtgcccacgggactgaagtccttgcctcagagcagggccgggaggctactctgcatcctggcgccgctgctcacctccctgcctcccgcacccgccttgctaccggcttcaccaaaatccctcgtcacccgctctgctcacctggtaggggtagtctccccgtttttgcgttttcctgggaaactcccttcatatctgacctctccattccaatcccaaaccctgctcaggtcacccggctcccccgcggaatgaaggaatgaactgtttcttcccctgtgcgtccccgcccctcctccgccttgcacactcctccagggttttgcctctgtgtatcactccacatgtagttaattgatagaaaagtcccaaccctgtggggaggctggagccctttgtgcctgcatgagttccctagggctgccagagcactgcaccataggccgggcggcttccaccacaggaattgacgctctcggttctggtggctggaagtgcgagatcacggtgtcggcagggggagttccatcggaggcctttctccttggcttgtagatgccatcttctccctgtgtcttcacatgggctgccctctgtgtgtgtctgtgtcctcatctcctctttttatgaggacgccagtcataccggattagggatcacccctgtgacctcattttaacttcattacctttttaaaaaccttaactccaaatgcagtcacatgctgaggtactgggggttaggacttcaacatatgaattacgggaggacacagttcagcatgcgactgtgctgcagaactttctggggggacgggggaagtgttttatatttgtgctatccagcgtggcagctgctaagccacatgcggctactgagtccctgaaatgtggctcctgtggctgaggaacggaatgctgaattctaactaattgaaatttaagtagccacatgtggctagtggctatagtaccctggggcaccatggggccttcggcctgtcccggactgttcctgccttaggccttgtcctcctctgtcctggccgtgagcccatgcccctggccgtgtccccatgccagatgccactctgcagccccaggtcactgcccagggcggcgcggccagcgaatgcctattggcaggcgaggtctctagcggcagccctttgacagggagagggcacacctgggcagtcccttactgatttgcccctcagagcagggcagacagatggacagcatttcctctgggtggcaccaagccctgctccacctggatggcaccaaaaacttagctgatctcatctccagcttcgcttcctcctcttctgcccagagcagcgctggaccccacccgcccaccatccagcagcccccctgggaaacatgggactcgttctggtcacctctgtctccctccagtcgctggtcactccccacctggatctcagtccacgtctctatctctcagcccctcggtaatccagggcgtccacctgccctgataacttcaaagcccggatcacaggccccagcgtggtgacccagccccgcccagggttaaatccctcaagggcttcctgctgccttccatccccttatctggtttccaaagcccgcttcgacctgcccgccccgaggctcatatcttaatgccattttccttgctctaagcaccagcttccctttcttcccccgtcttcgcccaacactcgttctttcttgcctccaggcctttgcacaaatctggtctctgcctagaacatggttccctctctagtcacaactcctgctcacattttccatctctccttaagaaccgttttctccaggaagccttcccagatggagcggtgcatcccagctctggcgtcccgaggcccgtcccagtaccggggtctctttccagcacgcgcgcgcgcattcgagctcgccccaaactcggccacacaaggctgggcaggacagacacagccccagcctgcctgaggttacctacattctgatgcggaagagtagagatgttttaagaagtgaatatagaaacaagaacacaaacggcgttccagaaataacacacagaagccacggcccggagaggtgggcggggggcccgggacgcttcaggtgggggcggggaggggccgcgcggcgccgtctgcagctgcgcgcatggccggcagggggcgcggcggggagaggcgggaggccgcccccaccgcccccggcccggcccgccctcggccccgcccctcccgccggccccgccccgcccccgcccgcggtgcgcgcgctggcccggcagcatggcggcggcggcgggcgcccctccgccgggtcccccgcaaccgcctccgccgccgccgcccgaggagtcgtccgacagcgagcccgaggcggagcccggctccccacagaagctcatccgcaaggtgtccacgtcgggtcagatccgacagaaggtgagcccgcggcgcggcggcccgggcgcgcgcccctcacgccgcggcagccccggccgaggcccgtggccctgcccgagcggccgcccaggcccggctcggcccggcccggggtcccgcgggcgtcaccgcccctgtcgagcgtgccccgccgctgtaacgggccggcgccccgggcggagcgcgcggcccccgacggacggcgggcggctgtggggccgggcggggggcgcgcaggtgggcgccccgggcgccgcgcgctgggcggggggcgcgcgccgagttgggccgcgaggacccggaggaaactgaggcctagatgcaggggactgcgctcgtgccaccgagcgggtcccacgcgggggctcccggctgcgccccgcgggcgtccgcggtccccaaaccccggttctgcacgtttctcaggagcggtcgggtggtgtcccgcgagtgccctgcagacttccctgtggtgccctcagaagtccgctcggacccgggtgcgagggatcaccccttcaccccttcatcccaaaagggaaggaagggatgcgcgttcagtgaccgtctctctcagcaaagccgggaccgcgcacccgcttggcacccaactctccacggagaactcctgacgctaaatgttagataaagacgcacgtcctttttgcaggaggaaagttgcaccgtttgttttcccattgtgcttcctattgaaaacagcttacggtttttgctccaggtgagcccgcccggttagaacactgcttcctcargcaggtggctggacaggtggctgcgagcaggctgggtccctggggcagctctggcagatccggttggcacggactttctcctcctgctgcagtgcgcttttcctccggggcggattargttcagccgttcccttcaccgtgggagccttctcttctgtcagcctttgatacctgcgatgggggaacctgaggtcctaacatgttacaaacaggtttgttgtgaagtgctccagttattcagcaaataggtaccgaacacctgctttgttccgggtataacagtagcagtagtgatgataatgatagcaatagcaaataacaattctttaataagccttctatgtgccaggcactttcttgggttagctttacagcacttgacatggttagtttattrgtactggtgagaacccaataagttggatgctatcatctccgtcttttggaattggaatagaaatagaatcaaggttaaatgacttgcccagggtgtcacaggtcgtaaatgtggatgtgtgttggaaccatggtcaggaccgtaagatggaaggcagtttctacacctagggattctcagtctagttgggagatggacgcctgtgcacctgacatgacaacattgtaagtgccgcggaaactcggggcagagacctgccctggggaggcaggagtggtttcctttaaggtgagatcttgagggataaagaattcaccaggctaagtgggtaagaaatggccttctacatatttgaacsttgcgtctagagctttaggcacaactgcgaaatgatcagaagttgggccagaggtggatcacgttgattagacttattagttggaagggttggttagggctgaatttcgaaggggtggtcctttgaggggtttgctttttggccttgggcaagaggtggccacagaggattgttcaaagtatgggggtgatggatcagatgtgcttttgggaagatctccacatagccctaaatgatactgataggagttgctttctcctgttgcccaggcaaggtactgaccagtgtggggtagatcatgtgatttacaaggttgattaagatcaagattgtgttgagagagatttgattcctgggagattccagtgtttagaattttgttggttaggaggtgtttttgctttccttcttttttctcctaaaacaatagctgctataccagctgttctggttgaggaggagtgatgggtagactgttaaaaatacaccccgaggacttagagtttctgaatacagtcacatctgctgtacagatagcttaaggctgatttttcttctgagttgttaagagattgtcagaatgtgggaatgcgaggttgactgtatgtaatagctccattttttttttttccagcagataagccattcacaaaattcctctggtatctatggtacataatagaaacatcaaaaatggtatggggtagcagtctgagtctaaaaagaaaaacagaactcaccttaagtatttggaacagaaggaatgtaatctaggggagtggtcacacaggtgatgtgagaactgagaatgcaggctgcaatgaggcaagccggagatgaggcaacaagcaggaaactgctgccacccctaagttggagggtgaaggaaggagatggcatttcagactccagggacagctgtcacccaccaaaaactggggtcacaaggggtccatctggcagtggctggagccttgcaagggcacagctgctgctgcggatgtactgttcccctcctgcctgggaaccctggccttgctggggtcacctcctccacaacttggactggagcrgaaggacaaagaatggatctgaggacaagctggcccaggaccagaactgtatgtatgtcaggcttttaaaatattagtctagtgcaagtcagagctgtcttaatgaagagaaaaacaaaagagaatgtcttagggcagtgctcctcaaattttaatgtgcagacacatctcctagggatcctgttaaaatgatgattatggttgagtaggtctagggtgggtggggccttagaatgtgcatttctttttctttctttctttcttttttttttttttttttgagacaaggtctcactttgtcacccaggctggagtgcagtggtgcgatctcagctacggcaacctttgcctcctgggcttaagtgattttcctgcctcagcctcccaagtagctgggactacaggcaaatgccaccatrctggctaatttttgtattttgttgtagagatggagtttccccatgttccccaggctggtctcaaactcctgagctcaagtaatacacccacctcagcctcccaaagtgctgggattataagcttgagccaatgcacctggcagaatatgcatttctaacaagctcccagaagatgctgatgctgctggtccatggaccagactttgaaaaacaagaccttatggcacacatgtaaagagaagcctctccaaacttcaaataattcttcaggttatagatctttagcatattgaaaatttgatgtgtgcagatttgtgatggccatttatcagtttagcatttcatgcatgtctgattttttaatatgttcgagctctttagagttgaagctgtccacagcaaagacattacttcatttgtatttcctgactacagtacacagtaatgactctgtagaactgcatagctagaatggaaagaaagaaaatggagctaacactcygaccagcacattcaccagcacattataaggtattttgaaatttcagtgaagaaccgtgtaattctgcaaagctatcagttaaaagagtttaatttatttaaaagtttctagaaagttaacattttttggatatgagcatgaaagtgcttggattcctgattttaaatttaaacaaagcattttttccattgtgaaatgaagactagtaaaaattaggtaaagggtttaagttgtaaaaaacttaaaaaaatgcaccgcagttttatgagatataattcacatgggatacagttcagtggttgttagtatattcgctgttttgcaaccatcaccacagtcaattttagaacattttcatcaccccgtttcctctcaactccctcaaccataggcaacaagaatctactttctgtctctgtgtttgctgattctggtcattttacataaatggaatcatacaatatgtggtctggcttctttaacttagcataatatttttaaggttcatccatgtcatggcatgtatcggtacttcatttctttctgttgctgggtaatattccattctacaggcacactgtattttatttatccatttatcagttgatggacatttgggttatttctactttttggctattctggataatgctgctgtgaacattcatgcacatgtttttgtgtggacataggttttcatttatcttggctatacacctaggagtggaagtgctgggccatatggtaatactaccggactattttccagctaaaaarctgccgtaacattttacattcccaccagctgtgtatgaggagggttccaatttttccacatccttgtcagtaactgttattatctctcttttgatactagccatcctagtagggatgaagtaatgtaaaaggtttttaatgccattttattgtcggatttcaaagtctaaactttggtgtcagatgaagtcacttcagaccctgcgcttctagttatgaarcatgcgattgtggacagggtgtctaaacctcccttaagacgtggtttcctcatctgtaaacatggaaaatattagttcttgggttggttgtagtgaaagtaaatgttaactctgtgttcctgagtctcagtttccatgtctgtaaaatagaaataacagttgttatatccataaaataggaatggggatgttaactcatagaattaaatgggataatttgtgtagaacacctaacatagtggctgatgtatagtaaatgatcactaaatggttgcttttggttattttttgtctttctgattttttttttttttttatcccagataggaatcatttccctgattccatttttctccagctcaggctggtctgagtctccatctctcggctccagaagagcaaatacaaacaaatctggctgaaaattaacaaagaccattttttaaagaaatcgttaatttattgagtmctagtgggaataccatgggctaggtattacattttgtatttcactggttcagtttaacagcaaatatttgagatcttaacattgttaactgttgtgcgaggcaccaggggtatcttattgagtaacaacaaaaatttttagagatgatagtctagaagacattaataaaacaatcacacagttaatatgaagttgtgatggggacgggtgctgatgaggagagggccagaatactttgagaggacatcataggtgaatttgacctgatatcagggaggtctaggagggcttcttgaggcagtgactggctgggtctggaaggtgagtagggagcagtgccttctgcttctggcagtggtgagctgagtgactgcagcgccactcttccaagcacagtctgctaatragatgatgctgaatttctggactaggatctggggtggctgaagatctgtggaagtgagtgtggtatttggggctgcttttgaccttggaatctgtagtggcgtctgtagtggatttggcatctctaccaaatttggtccacctagaacttcaggatgcccacataataagatattagttaaatatctttaaaaaaattttttttctttttttytgagacagggtcttgctcggtcgtccaggctggagtgcagtggcatactgcagtctctggctgggctcaggcaatcctcctgcctcagccacctgagtagctgggactccagatgcrttccatgatgcctggctaatttaaaaacacatttttatggagacgagggtctcactatgttgcccatgcttggggtctcaaactcctgggctcaagcgatcctccccctttggcttcccaaagtgctagaattacagacatgagctactgtgcctggccaaaattttttattttgagatagggtcttgctatattccccaggctggtctcaaactcctgggctcaagtgatcctcctgcttcaggcttctgagtagctgggagcgtaggctcaagccactgtgcctggctaattaaagattttgagagtaaatcatcgtgaacttaggagaaactctaaatccagtgttggtttctttataagaggaaggggagggagatttggacagaaagacatgttgggaaaaaggttatgggaaaatagagccggagattagagttcgttgatgcaaaccaaggaatgcctggggccaccagaagctggaagagataacagatggaatctcccctagagcctttagagggagtgcggccttctgatcccttgatctccgacttccagcccccagagcagtgagacagtcaagtttttttttttttttttttttccaagttttgttttaagccttgaagttttatggcagccckagggcagccctggggaamgaacactgggccctgaacaaaacatgggagccaagaggctgagccctgtgagactgtctgagtgccttagcagggctgaggtgccaggttctgccaaagggcaacagtcctgggtgacaccctcccctcacaatttggattgggatccaaagaagccacttccaaggaatgcgcaggagccagaagtattggaaggactgcagccctgcttcaaatyacctcagtcctctgaaattaaagtaatcccagtgtactagtgtctctagattcccaacagaagcaaactttaatcctctctagagggagatatctccctctaatcctcccagttatcaatggaggcctctaatgactttcacgagtctgtttgtacgttcatgattgtgcatacagtaaaaaaatagacatcaagggaggcgaggcacttgagctaaaaccagtcgaaactacaggctgtagacagacccacagggcttccagactccagacccagactttataacaactgtgctcgttgtgttggaggagacacgagatcagatggagagttttggcagagaactagaaactatggaaaagaaccagatgaaaattctagtccacactggccagatggctcacgcctataatctcagcacttttggacygaggcaggtggatcattggaggtcacgagtttgagaccagcctggccaacatggcaagatcccgcctctactaaagatactagacattttttttttcttttaagacggagtctcactcttgtcacccaggctgtagtgcagtggcatgatctcagctcactacaacctttgcctcctgggttcaagcaattctcctgcctcagccccccgagtagctaggattacaggtgcccatcaccacgcccagctaattttttggtatttttaatagagacggagtcttaccatgttagctaagctggtctcgaactcccaatctcaggtgatctgcccgcctcggcctcccaaagtgctgggattacatgcgtgagccacctcacccagccaataaaagaaaattataaaattgaaaaagcatagtgatcaaaattaactaaccaaaaaaagagcagattagacccaggctgaaaaaattgtgtgaaccagaagatagctcagaagaaaatacccacaaggaagcctggagacataaaaaatggaaaaatttggagagggtgggagacagatatagtaagaaggtcttacttgtgtttaattgtcacaagagaggagaagtgagagaaaattgaggagacacaatatttgaaaagataatgtggccaggtgcagtgactcacgactgtaatcccagcagttttggatgctgaggtgggcggatcacctgaggttaggagttcaagaccagcttggccaacatggtgaaaccctgtgtctactaaaagtacaaaaattagctgggtgtggtggcagatgcctgtaatcccagctactcgggaggctgaggcaggagcatcgcttgaacctgggaagtggaagttgcagtgagctgagaccacaccattacactacagcctgggcgacaagagcgaaactctgtattaaatagaaaaaaaagaaagaaaagtaatacctgagaattttctacaacaaataacaggtaccatgaacagattcgatagccgtatgaactgaaagaaccatatctaatcaattcctggtacacccttgtgctctgcataatgatgtttccggatgatgatccacatggacaaaggtggtcccataagattataatgaagctgaaaaattccaattgtctagtgaygtggtagctgttataatgttgtagggcaatgaattacctatgtgtttgtggtgatgctggtgtaaacagacctactgcactgcaagtggtagaaaagtatagcacatacaagtatatacagtacataatagttgatgatgataataaacaactatgttactggtttatgtatttactatctatactttttattattttagagtatattcttcctacttatagaaaaaagaaaaacaaattgtaaaacagcctcaagcaggtccttcaggaggtatccagaagaaggcattgttatcataggaggtgacagctccatgcacgtcattgtccctgaagaccttccagtgggataggatgtggaggcggaagataatgatactgatgatcctgactctgtgtaggtctaggctaatgtgtgtgtttgtttcttagtttttaacaaaaatatttaagaagtaaaataattaaaaaaattaaaaatagaaaaaaggttatagaataaggatataaagaaaatacttttgtacaagtgtacagtgtgtgtttcaagctaaatgttactacaaaagagtaaaaaattaaattaaaagtttataaagtaaaaatattacagtaagctaaggttaatttgttattgaagaaagaaagtctttcaaaaaataaatgtagtatagcctaagtgtacagtgtttacaaagcatagagtactggtcagtagtgtcctaggccatcacattcactcaccagtcattcactcactcatccagagcaacttccagccctgcaagctccagttacggtaagtaccctatacaggtgtaccattttaaaaatcttttatgacatatttttactgtactgtttctatgtttagttatatttagatacgcaaatacttgccgttgagttatagttgcctacagtgtcagcacagtgatgtgctctatgggtttgtagtccargagcaataggtcatgccatacagatgaggtgtgtgccatctagatttgtgaaagtacactctgtgatgttcacataggatgaaatcacctcataacacatttctcagaatatatgctcattgttaagcaactgataactgtagcaccgttgaaaaccatagatgaagagaaagagagaaaggcggaggttgcagtgagtcgagatcacaccactgcactccagcctgggcaacagagcgagactttgcttctraaaacaaaaaccaaacaaaaaaagaatgacagctgtgttcttaacagaaataatggaaaccaaaagtctattgaaatttaagtcctcaaagaaagttactgtgaacccagaattctgtatgcagcaaaaatgtccttcagaaaatacagttgaaataaagatactttcatataaacaaaaacaatgtttttgccagcagacccacactaaaggaaacattaagtgttttttgtttgttttggctaaaggaaaatgctcaagttaagcgttagagttacaggaaggaatagagacttaagggtttctacgtgggaaagaccaaatgattattaactataaaaattatgcctttgggtttaaattatatagaattaaaatacatgacaacaatgtcctgtaggttagaaaggaggcaaatagagtagaacttttctaaagtctttccatttccaggaagaagaacaaagatccaattatattagacaagtcagggatgcatgttgtrtgtaatctgtgtggtggccaccaaaattgtgatagtgtgtgatagctaagctaaacaagaaaaatagaatcagagattctaaatctgaaagaaggcaagaaaggagagaaaacactgaacaattgggacaaagagaaagcaaacagtaagttagtagactgaaatcccagtatgtcagtaatcacattaaatctaggtggacttaaatgctccagttaaaatacagagattgtgagatgggatacaaaagcaaatcctgactaggctatttgaaagagatacgtttaaaacataaggatattaaaagattgaaagtaaaagaataggaaaagatactatgcaaacactaaccaaaagaaacttggtgtagctattttagtatcaaagtagattttaagggcaaaattattaataaagatatgctgataaatgagaaaaagttcattttggatataataatttaaaatttggaagtaatgacttcaaaatatatagaagaaaaattaacacaattgtaagggaaacaaattcataatcatagtgagatgttttaacacacctgtcttacatgctgtatacatcaagtagacaaagaaatttgtaaaagtgtagaattgaacaacacaagaacggaacttttttttttttttgggagacggagtttcgctctgttgcccagactggagtgtaatggtgcaatctctgctcactgcaacctccacctcccaggttcaagtgattctcctgcctcagcctccagagtagctgcgactacaggtgtccatcaccatgccaccatgcttggctaatttttgtatttttaatagagatggagggggggtctcaccgtcttggttaggctggtcttgaactcctgacctcaggtgatccacctgcctcggcctcctgaagtgctgggattacaggcgtgagccactgcacctgccacaagtactaaacttgacctaatggaaatgtatggaacactgtacctaacaattgtagaatctaagtttttttccaatgcacaggcacatttgtcgaaattcactatatgctggccataacacaagtctcaacagctttcaaaagagttgaaattatagagtatgttctgacaacagaattaagccaggatcaataaaaagaaaatctcaatgtatttggaaattttagatgtctatttctaagtaatttatgagtcacagaaagcttaaatattttgagttgaacaatagcaaatatgtatatataaaatggggtacagctgaagtcatgtttagagggaaatttatagcttaaaatacgtatattagaaaagaagacatgctgaaaatcaggtagttagaagaatagcaacacattaaactcaaaggaaatagagtatttttttaaaggatttatagaagaawgaggaggaggagkttgctgatcaaagaggtatgcaaaggccctgtggcaagagggagcttggggaaatcttggggctgaaagaaggctgtggtggttagggctggtaagcatcgggagcctttggttgggatctgacactggagagggttggaggctgtgttagggagctctgcctattttcccccagattagtgggatactattgctttaagattttaggaaggaccatgacctaattggatcgtggttgaaaagatggctctagctgcgctgcggttgcctgagtggatgctggctgacccaatgcagtgaaagatgctggcagcctgggcctgtgctgtggctgtggcgatgggggaagtagctggatttgagagatgctgaggaggtgacattgtgagaactcagtgatggtttggtgtgggtgttgggggagaggaggtttgtgattcctgtgatgagctggataatggaactcttctctgatataaggagctgtggttgaggacagctttggggattttgctgttacctggctctgctgcatgctatcctggaacctcttattctccactaccccagttttgccaatgaacgacatagattcagcagttaggtggcttgctagtgtgccatgaagccatgtaggtctcactgaacccagatagggcctcctttgtcccttcctccccagcccccagtcatgcagcagcagtgaggatggttcatctgagcccgagagtgaggacagtgtgacggggtcagggcccgattggatgctggggccgttggcttttaggaggtgggcagaagaggaagaggaggactagtcaaagaaggaaggactggcaggggaggagaaagaaagggggctgcagagaagccccagaaccagcacagtttacctctaaatacctcagtgtatgtctccacaacatgaggatattttcttatataacaataccattatacctgaaaaaactttttaacatttaatatccagatcattttcaaatttccccagttgaaccagaaatgccatttatgaccttccttttgggaaccaggtacccatcaagttttacgcatcatctttggttgttgttatctctttagtttgttaaattagaacagcttccactgttctctcttcccgttccctacctgcctataacatcaactttttcaagagacaagggcagttgtctggtattaatgactttttttttttttgttcagacagaatctcactctgtcgcccagactggagtgcagtggtgcgatctcggctcactgcaacctccgcctcccaggttcaaatgattctcctgcctcagcttcccaagcagctgggactacaggcgcccgccaccatgcccggctgatttttttatttttagtagagacggggtttcaccatgttggccaggctggtctcgaacccatgacctcaagtgatccgcccacctcggcctcccaaagtgttgggatgacaggcatgagccaccgcacccagctgtattaatgacttttaatggcaaaaacctccattacttttgtaccaacctaataatctttctggatttttctgattgttttcccatcattcttttacattgttgttttatctcctatatttcctataaagtagaagtaagcagtttcaaagactctcacttctatattttggttgacattttgggcatatccctaaatatggaatgctctgtgctctaccgcatcccacttggaggtgggtgtgtcctgtcaggctgtccccctctgctgtgtcatcgcttggtttacagatttctaggtcttttcttcctctttttyttttctttttttttttttttttaatagaagtgggatctccctacgttaagccagtctggtcttgaactcctgacctaaagtgatcctcctgccttggcctcccaaagttctgggattacaggcatgagccaccttgcctgaccagatcttttcattggagatgtgatttcccctttacagttaggaagtaataggtgattcctgggcactgtgcaaatatcctttaccccaaatggtttccatattcatacacaatacaggacttgcctgaagcaattttattataagagtttttaaaatggagattcctgccacccccattgtgtcatttattccacatttatctgttggtgttattctgtaaagatattttcttggggccaggcgcggtggctcatgcctgtaatctcagcactttgggaggccaaggctcaggcgatcacttgaggtcaggagttcgagaccagcctggccgatatggtaaaaccccatctctactaaaaatacaaaaaaattagctgggcatcgtggtggacacctgtaatcccagctactccagaggccgaggcaggagaatcgcatgaacccaggaggaggaggttgcagtgagccaagatcacaccactgcactccaggctgggcgacagagcgagactccatcaaaaaagtgaaaataaaaggatatttgctcacttcaaccgagttaaggaccacagttcctcctaaaaaggcaggtcaattgctggattctttgtttaattaccaatgttcgaggtaaggatttggtaaatagtcatccccagtagaggcaaatgtttctctccccccaaccctaaacccccacacccaccctgagtatcactatatggattcatggcaatttttattcagtgttttacaatcagttacagtcattctttttgatgctaaaattatcctgattttcctggaaacacaccttcatctggctctttggtctttaaaggcttgcttgctatgttgcgatctgttttcatcttctggatagagtcctggagctggagtttcaggtagaagggacagtgtgcgtcctgtggccgaggctgccagcccacagcgtgcattgctgcccatttcctgccagtcctgggacgagagtgcctaggagtttcaagatttcaggctggcaggtctttgttttccttttttggattggcttaggtttagggttgtctcagcctcataaagtgagttgggtagctttctgtgaggaaggcttttgtctctgcctctcatattgcatctccatttattttattttttggggggaggttctcatctgtaggttagaccatctgtctccttaccactctgtccatctcagtatttttccctgtccactgtatccatcagcattctgggggcctcagttttgtctttttgccaccagtgacattttctgtaatgtacatttttccctttgactccttccagttggattttaatttttccgtagtgtgattgtttttgttttctaatcttggtcagcatcttagcttgttgtcttttaatttcaacctattctcattttggtgctccctgtcttttaaaaacattttaattttaactttttaaataaaggccacgtcttcctgcatcttaggacaagaatcacatcttttctaaaatggtcttccattttctgcaatcattcatttcaggtttgtgcatgtactttatggcatgtttttccatcagcctctcccctccccctttctgttctgatgtgatgttccttgaatggcgtttgccaggctgcgggtttgaattgctgtttcctggggacttggctgggcacaatctggggctggccgtggggtgatcggccacgggcccaggctgtgtctctgctgctctgggcgggctctcccctcaccttgaattcatgtgcaatggccccattttccgtgtccatgtgtgttcctgagtagtgggtgtttgctgatcacctgctgcccactctgctggctctgctcttctgtgtctgagggtaaagggtgtctgcctccctttccyctgcaggaagggctggactctcatcccctgatgaatggtgctttgtccttatagaatgatggaagagggacactctttttcttttaaacctgctattttaaccattttaaagtgcacagttaagtgccattaagtacattaatggtattgtgtaaccatcacctctatctagtttgggaacttctgtatcccctacatggaaatcccttccccatcgtgagtcactcctcatttccccctcctcccagctgctgacaaccactaatctgctttccatctctatggatttgcctattctggatatttcatttattatttatttattttttagatacagtcttgctctttctctcagggtggagtgcagtggctcaatctcagctcactgcaatctctgcctcccaggttcaagcgatcctctcacctcagcccccccagtagctggcattacaggtgcactccaccatgcctggctaatttttgtatttttagtacagagggggtttcaccatgttgtggccaggctggtctcccaattcctgacctcaagtgatctgaccgccctggcctcccaaagtcctgggattacatgcgtgagccaccgcacccggccactgagcactgtgttttcaaggcttatttacgttgtacgtttcagaacttcttctttttttttttttttttttgtttgagtgaataatastctgttctgtcaatgtaccacattttgtttgctcattcatcgsttgacagatatttgggttgcttctaccttttgactattgtgaatagaactgctgtgaacattcatgtacaaattattatttaaatacctattttcatttattttgtatttttttttaaatttttgagacagggtctctgtcacccaggctggagtgcagtggtgcagtcatggctcactgcagcctccacatcttgggctcaagcagtcctcccacctcagcttcccaagcagctgtgactacagatgtgtgccaccatgcctggctaattttttaattttttgtagagatgaggtcttgctgtgttatccaggttggtctcgaacactcgggctcaagtgatcttcttgccttggcctcccagagtgctgggattacaggtgtgagccactgtgcccagctgacctgttttcatttcttttgggtacgtacatgtgagttaaattgctggataattctgtgtttatcttattgaggagctgctaaaccacaaaggctgcaccattgtatgttccctccagcagtgcatgagagttctgatgtttccacacttgccaactcttgttactttccacttattataatataaatgttataatatttaataatttaagaatattatattattcagttcctcaatgactaacaatgttgagcatcatttcatatgtttattgaccatttgtatatattttttgaagaaatacctattcaggtccattgcccattttccaatcgggttgtcttcttgttgttgaattgtaagagttttttatatattttgggtactagaactttatcagatacatgatttgcaaatatttcctctcattctgtgagttgtgttttcactctcttgatagtgtcctttgaggcacaaaagttttgaattttgatgaagtccaatttttttcttttgttgctcgtgcttttggtgttatgcttaagaaaccattgcctaatccaaagacaagatttatacctatgttcttccacgagttttgtagtttcagctattattaatatatttagtctttgatccattttgagttattttttgtatgtggtgtgaggtcaggttccaacttcattmttcctgtgtggatgtgcagttgctccagcaccagctgttgaagaggagcgctctccagttggagtctgcctccccagctgtgcagacagccctgcagtattgaaaaacagccacagagctcctcaggagtgcttggaaatctcaatggagttcataaagtgattcttaatagaatcattcttatgtatggttatgagacatttacatatttaaagagtttaaaaggaagtatctgcatttcagaatttttactgccatggaactcatctacattttattttgttttattttatttttttcagacaggatctcactgtcacccaggctggagtgcagtggtatgatctccgttcactgcagcctctacctcccgagctcaagtgatcctcccagtcagcctcctgagtagctgggaccacaagcatgcaccaccacacctgggtaatttttgtattttttgtagagacgggttcttgctatgttgcctaggctgtcctcgaattcctgggctcaagcaatccgcccgcctcagtctcccaaagtggctaggattacaggcgtgagctactgagcccagcctcttctacattttatgtttgagaatatggacttgattcagttctttttatagtttggtaaacttgaaataacactcatctcattaaatccagtctcatttgacattctcagtatttgaactctgataaaaatggactagtactcagaagctgggcagaagggaagtctgagaagttgttctctatctcctttctctctgtggttgctgaacatttttgtgtgcttcaagagggcaagtagaaccaggtttgtcaagaattaagacataagtcttttttttttaatttttattttttttcttacatttaagggagatctggccaatgtgtatttttattgtccattagtcacaattgtctgtgtttttatatctaactagtgttttgtattatttgctgtttgtagaaactccttggtagttaactgcagcttctttgtcctctggcagcagaaatgggtataaccatttgggaaagtgacttagtgagtgtctgaataactccaagagactcttggtccagaattctaacactgggactctatcctgagaaaataatcttaaatataaagctcatgaacaacatgtttattgtaccattaaatataaaaagttgcaagccaccccagtgtccaagtccagcttaggacaaaccccaccagaacactccagtgtaatgactcagtgagttaatgataatagctgataaaatgggtactgcgggcgggtcccgtgctgtgctctgtgcgcgtgctgtcccacttcaccttcacaacttcatggtggctgcaccaggtcacaaagctggaaagtggcaatgtgcatggctctcaatgcctgaagctgccagccaggtaattgaggaggtcagcaacagggacggtactatgtgatgttggagaaataaagaggcgaagctgtgtttacagaatgcgtttcagcagtgtgtaaaacactggaaataagatggaataggaaataacacggaggaagtttcttatgatattgtgggtcgggttaggtggtgagatttgtattatttttatgtttacatctgcttgcctgcattttctaaaatgagcatgtattattttataccaaaggaaacaaaaaggcataacatgcttcccgtcaatggaagactcctaatggtaagaggggctgtgttgtgacgtggagatgattcagattggagaagcagctgccctcagccttatctggaatgtcctaaaacagctgaaacgatactgttggatcaaaacagattgaatttcaggagtcaaatatacaaaagggcatgcttgtgaaaatacaggatttaagtttcataatatcctaataaatgggtacattatatggaacgacttaattatgttcccccttgtttgaactttcaactcctgtgttgaaattaaatctacacttacctaagaagtgagctcaaggtcttgatatgaataggatgtattttagcttgagatgtaaactgtttgatgcgtgcaatgttatcagttctttagataatgttcataatgacattagcatccctaaacatttgaataaatgaaaaagaaataacatatagaataataatacacaaagtaaaagcagatctagttgcagtatattgttgtttggaaaagcaagttattgaataatttgtacatcatgtaactcccctttatgtcttttagtttaattttttttttttacacagggttttttttgtttttgtttgtttgtttgtttttgagatgaagtctcgctctcacccaggctggagtgcagtggtgtgatctcggctcactgcaacctccacctcccgggttcaagtgattctcctgcctcagcctcctgagtagctgggattacaggtgcctgctacgatgyctggctagtttttgtattttcagcagagacagggtttcaccatgttggccaggctgattacgaactcctgacctcaagtgtgccttctgcctcagmctcccaaagtgctgggattacaggcgtgagccactgcgcctggccttgacacggggtctcgccctgtcacccaggctggagtgcagtggtgccatcatcactcactgcagccttggactcttgggctcaggtgattttcctgtcttggcctccccagaggctaggactacaggtatgggccaccatgcccagctaatttttagattttttgtagagatggcatctcaccgtgttgcccaggctggtcttgaactcctgggcacaagtgatttgcccacctctttctcccaaagtgctgagattacaggtgtgagccatagcacctgacaattttatytttacatttttctttttagaggcacggtcttgttctgtcatccaggctgcagtgcagtggttcagtcatagctcactggagcctaaattcctgggttcaagcaacttttctgccccagtttccttagtagctaggactgcaggcgtatgccaccatacccagccaattttaaaagtttttatagagatagagtctctataaaagcagagggatactttactatgctatgttgcccaggctggtcttgaattcctgggctcaagtgatctgcctgcctcgtcctcccaaagtgctgagattacaggtgtgacataccatgcccagccccacttttctgttttatttacacacttgaaaacagatggagccgggcgtggtggctcatgcctgtaatcccagcactttgggcgcccaagtccggtggatcacccgatgtcaggagttcgagaccagcctggccaacatggtaaaatcctgtctctactaaaaataacaaaaattggccaggcgtgatggcacacgcccgtagtcccagccacttgggaggctgaggcaggagaatcgtttgaacctgggaggtggaggttgcagtgagccgagatcgtgccmccgcgctccagcctgggcgacagaatgagactctgtctcaaaaaaggaaaaaaaagaaaaaaaagaaagaaaacagatgggaaggatgttatctcggcatgtgaatagtaggtgttagcgtggctgggctcttggtggtcttaagtaaataaaaagtaacctccagcaaacaagtctgccatgagttgggccatttaacacaggactttattctccaaatgtcagaaaacaggtgaggaagcagctggttgagcacatgccaggggagaggaggttgaatgctgatagtggcagcactgccgcattgttctcaggtgcttttctgtttggtgccttgccctctgaggtgggatccataggtcaggaagctggggaggctgcctctagtccaggcagcaccagcttcaggcctctggtgtgtttcactgacttccaagtttccaaagcgccctgtctgcacccctcttatgacacttgaaaacaatttatggaaatttccaarcagacacggaagtagagaccgttgaattaatcacatcagcctgtgtctttcttgtttcatctgtctccaccccctacccacacccctacttttctcctgagcattttaaagcaaatacttctggttcttcctactgtcaagtatccctctgatggagcagtttcctgaaaggtcaagggtcgagtccctttcactgtagtattgcaagccacactcagcactcaagtgttcaataaacatttattgaaacagagtgatttcattccacagctcgatagggagatggattttgttctgtaggtttcgcagaagctgaatctttcctaccttaatgaaccacagagmgcatgtgtgtattttgggatgtcgcacctgctgctgggggttaaggtttgtttcgcctttggtgtgtagtggagatgggtttgtgcataaattcactttcagaaaaagtagggtgactggttatggctataatttagtctgaacttgtacagacaaaaataatgaaaagtaaatcttccccagacataaaaaatgtttttcatttgctgtctaagcatggagagagttgaaatcagacagatctgggtctgaagtccacatctgtcacttcactgtagatgtctatgtcctctctggaccccaatttcttcattagtaaaatggggctataactattgtatggggcagattaaatacagattctacataagctcctggcacatagtaggcactccataaatactgattatttcttctccttgcccatggttctgtgaaatgggaatgtttcctgggcctcccttaggaggtcattgtatggatttttttttaatatatatgttttttattayactttaagttctagggtcctttgtagggacatggatgaagctggaaaccatcattctcagcaaactatcacaaggacagaaaaaccaaacaccgcatgttctcactcataggtgggaattgaacaatgagaacacttggacacaggaaggggaacgttgtatggattaaatgagtaatctttggaaagtgcttacacctgagcctggagcaagtcagagctcagcctcctgggtgctgctgcgggtgctgcccctgtcctgggagtccttttaaaatcatgtgtgtgccttccctgtctcatctaccctgttccctttccctagaggtaaccacttaaccatttttattattattttggttaatccttccattgtttctttttggaaaaaaaaaactaagtttatcttcttcacacacaaacaatgtcctcctttttacaaaaagatattaatagcgtagcatgttccttttttttttttttttttttggagacggagtttcactcttgtcacccaggcaggagagcaatggcacgatctcggctcacttcaacctccacctcctgggttcaaacgattctcttgcttcagcctcccgagtagctgtgattacaggtgtgtgccaccactcccagctaattttttgtatttttagtagagacggagtttcaccatgttggccaggctggtcttgaactcctaacctcaggtgatccacccgcttcggcctcccaaagtgctgggattacaggcgtgagccactgcgcctggccccttaatagcatgttctatgcatgttctgcacagttatctttttacttgctctgatttggagaggttccgtagtgtataaaaatatcttccacaatccttgtatagttatatggtactccatattttgaatgtaccgtaatttattcgaccactagcctgttggtgggtatttgggttattttcagtgttctgctataatagtttgtagcacatagccttgtacaaacttttttttctattttgccaaagtgtcttttgggatagattcctaggagtgggcttgctagatcagaagagtaaatgcatgaataactgctctggattttgccaaatgtttgtcttcagggccatcccgttttgcagtcgtgttgagtgcctgtctccccgttgccatagaagcagaatgtgttgcctctttggtttttttgtttgtttgtttgttttgagatagagtcttgctctgtcacccaagttggagtacagtggtgcgatcacagctcaccgcagcagcctcgacctcttgggctcaggtgatcctcccacctcagcctctcaagtagctggagctataggtgcactaatttttaaataattattattattttttgtagagacagggtctgtgttgctcaggctggccttgaactactggtctcaagtgatcctctcacctcagcctcccaagtagcttggaccacaggtgtgcaccaccacgcccagctattttttttttttttytaaatttgaggccgggtgtggtggctcacgcctgtaatcctagcactttgggaggccaaggcgggtggattgcctgagctcaggaggtcgagactagcctgggcaacatggtgaaacccgtctttactaaaatacaaaaattagctggatgtggtggcgggcgcctgtagtcccagctactcaggaggctgagacgggagaattgcttgaactggggaggcagaggttgcagtgagccgagattgtgccactgcactccagcctgggcgatagagtgagactccatctcaaaaaaaaaaaaaaaacttgtagagatggggcctcactgtgttgcctaggctggtctcaaactcctgggctcaagctatcctcccgcctcagcctcccgaagttctgggattacaggcgtgatccactgtgctcagccttgtttgttttttgtcagtctgatgrtgcaaatagtattttcacttagttttgtttttctcttctgagctaggttgagcatcttttcctttgtttaagcgccttttgcatttttttctgtcaaatgttttcatattttttgcccctttttctaccagatttttagtctgttctcaatttttataatttctttaaagattagggatattagccctttgtagtattttgtaaaacttcctggcgaggtgtagtggcttatgcctgcaataagggaggccaaggcctgaggattgcctgagcaacatagtgagaccccgcctctacaaagcaaagcaaaacaaaacaaaacaagcgcacctgtagtcctagctacttgggaggctgagatgggaggatctcttgagcccaagaggtcaaggctgcggtgagctgtgattgagccactgtagcccagcctggttggcagtgtgagaacctgtttcaaaacaaaaacaaaacttcctgaggcactggcgtgattaagataaataaacccactgaacctgagggactgttggtctggggagggagacagcctcataatggatgttcatgtacttgcaaagcggtgatagctagttctgcctggggggaggtgatagctagttctgccttgggggagtctgggaagacttcccgaaggtggtggtatttgacttgggtctcaaagcttagtcatttcccagccaagagaagaggagctgaggatttccaggcggaggaaagagtatattcaaaaaagtggggaaataaaaggagtyggttgtgtttgggtcaggtggttctgggaggggtgagagaggagcctctcagattgggaggagcccggtgggccacgtgaagccttcctagatgacaaggaaagcaaggagaggtttgggagtgggccctggctctgagactgtatgcttcttccagtcacctgggagtttttaacactgtggctccctgccccctcccacactgatgctcatcactggtggggtggggccagtggtcactgtttctcaaagcttgtcaggtaattgtagtggcagttgggatgaaatcctcccgttgagagaattgtggcagcaggttggaggaaggatggacagagaacaaacttggtgtgcttaggaaccacctgggctcttggcaaaaattcatatttccaaggctcaggaggttgggagtggagcagtaacttgctttttctttacttttttattttattttatttctatattattattttaataacctgtattttgtttttagagtagtccagtgaagtagtgagaatggggtagagaatagagcaaggagttcagtctgtaactgattgtgaaccatcgtttgagatagctcactgccttcaggccagcggtaacctgcatttttaacaaacgttccaggggttctgatgtggtggtctgggtcacacgttgagaggcactgaggcagagacaagaggcagaacaacttaagcctgaggtaggcggagctgaagaggaggggcagaatcttccattattttaacaaatacaatcaatgatcctaggtaggcaattagaaatggggagtgaaggaggaaaagagttgagcacctgctacttcttttagatttgatgatgctattaatattaactaaagaggaaacgtgggggtcagtgaacagtgagatgaggtacatttcagtgtggaggcctggcccctggggacgccagcctgcaagactaggttggattagcagtgatgctgacagagcgggagtgaactcagccaacccatcgttatcagacaggaatgcatttggctgtaggttgatgtcatcaggacccacactggctaccttgtggcctcagcatggctgctgcagcactaaatgttgtatgttcatttaaagcaaaggtggcactgagactacacgtgttcccatataccagccaagcacttgcctacctccccacccccaacagaactgcttaggtctccttgaccagtactggggcagtggggattagccctatgatgaaaggtcccccgcgaccaccacccccagttcagaaacaaggtcctgtgagcagtgaggatgtgtgtgtgtgtgtgtgggggggtgttaacaccacataccgcagcataccgcagtaagagaagcgtcctggctttaggaaagtgggtgtgaactccaaatgaggggcagacctggagccgctctcctgggggtttgggcatacacatcgttgccactttttggcttttttgggtttggtccttcctcacattagtgggggcaggaatgaggtgtctctcctcctgtcggtggaggctttggcataggagctttgggacatggtcgtttttaataatcctggtggcagtgcattgaaaaccagggtagtggcaatggggaaattggattctcttgatgggtaagggaaggatgactgtcctttttccatgagttggtgttttggagtcttcagaaaacctatgttgggttcctttctgtcagagttagcaccagactcagggcctggctctgcagagctgagcgggattctgcagtgcggcagttgcccggtgcgctctctcctgctggccgttggtgtcatgaagacgctgatgtggcacacactccgttgccaccttgggcgtgcacactccctcagcttctgcsaggatgcggtaagatcagcttataggtagacaggtggtgggtaagttgcaggtagttcctgaatgaggatgaatctgtgggtagtgttttgagtagatacaggaatttacctttgcttaattgatttaaatccgttatcagcagacttttatgctgaagttttattttgccaacaagtattattgtctgggctctggtgtgtcattcattagccaagtggccttgggtgaattacttaatcctctggccctcagtttcgtaatgtgtaaagtgggaatattaccaccactttcaaaattggtgtgaagattaaaagatgaaaatggctcctacttgggtagtggctgtggtatgtgtgaagaagtgttggagataacctggaggtctttgaatatgttttgcatgccttacgttttgtgaacaaattattttctgattgcttcctatatgtgaatcatggtgcttgtaaactgcaaaccacagatgaagctttagagatagaattggagaggcctgggatttcttttgtgacctgtcattagttgttcaaccgggcaagttactcagtctctctgtttaccagttttcttatttgttaactggaatactagtttctgtctcatagaccagaagtgtttgttctgttaagaagacaagtaaatataaaaatactcatgaaaatttaaagtgatatgcaaattgggccaggtgcggtggctcacgcctgtgatcccagcactttgggaggccgaggtgggtggatcacccaaagtcaggagttcgagaccagcctggccaacatagtgaaaccctgtctctactaaaaatacaaaaaattaaccaggcatgtagtgcgcgcctgtaatcccagctactcgggagggtgaggcaggagaattgcttgaacctgggaggcggaggttgcagtgagccaagattgtggcactgcactccagcctgggcgacagagcaagactctgtctcagaaaacaaacaaacaaagagatatgcaaattgatagaaataagtttaccagcttctttccactgaaacatttgtatgttaattttttattccagtatttccacttttggggggctttgtgaatttgggtgatgttgcttaattaaccatagtcaggtttctgttttacctgcttttttgttgttgttgaaggaccggggaagtctaaaggacagataggtggctgaagtggacatttggctaattttctttcctttctgctactttttttttgtttccctccccagtttcccagctgtctgcctgcagcccctctgtccaggtcaccttgggcaggctgtggcttgctgccctcagcctctggacacgactcttggtcagtcccctccattttcttcacccccacgtggcagctgtttttcatttgtttgtcttttactgcgtaaatgtggaaatcctcactccttacatgctcaagacattaacactaatagtctgagattttacttctatccttatattgattaactatatttttccctttaccattttacatgcagaataatacatggagtatacacataagttgtgaagcacagtcacggactgtgcacacgtggacccacctgcgcggctgagtgccagggtgctcttctgtggcatcctccagggttaagcatcctttggggcttagtctccatttgacttactcttctggtaaatgccrgttcacactttttacctattttctctttggtggtttttcttttttatcattccgtgggagtttctttttttctttctttctttctttttttttttttgagagggagtttcactcttgtcacccaggcgggagtgcagtggcatgatctcggcccactgcaacctccgtctgctgggttcaagcgattcttatgtcccagccaccgaagtagctgggattacaggtatccgccaccatgcccagctaatttttgtatttttagtagagacagggtttcgctgtgttgcccaggctggtctcgaactcctgacctcaggtgatccacctgcttcggccttccaaagtgctggaattacaggcatgagccaccgcgcccagcccgttccatgggagtttctgctatattctggttactggttactgactggctgtcagcagtagtgtacctttttttcccaccttggcttttcttttatctctttctgaggtgtctttgatgagcagaaattctcaattgcaatatagttgagtttagcagtcatagcttatatctaatatttttttctattacatttaagaaactcttcccaattccaaagtcattggaaattctctgtcgtctgctggacgttttgaagttcttctgccttttgctgtagcgcacccagagtctgccaggagctcacgcgtgtggtgtccttggctaacctgccatctcagcccctttgctgaagtccccctccctcccaaaccctggtttgcagtgctgcctgttacacatcaagcttccaaatctgcaagggtctgtttctgggctatctttggtccccaaattccgcttctcttaatttgctttaaggatagttgaggacataagcagatatttacttacgggaatatccactgaagttctgatgatagcattgagggaacgggaagcattctaaatgttccggcagtgggaagcaggtgaatgatggaggggagggtgtgtaggtgccgtgagatactctgtagccggtaaaaatgcatttgctgatgtggctatatggtgataatatacatgacaaaaaaatarcaaggtcacataacagtatgtacagtatggattccacgttcataaaaagaaagttgtaagttgaaaaaaacctgttatcttgctttctcctgtcctggtcacactcagggtgatttgatctggcttcgaccccatcaggccaccatgtccgctctggcaggtcctcggtgaccccctggtggctgcttcctttatcctcagctcagttctcatttatgacctcgctgctgcattggacatcactgatgcgatcttctcgacgtgctctctgctctcctccgcttctgcccactttcttcttgttctcctttctggctttccttccttggtattggtgtccctgggttcccatttccctgggcctccgtgtactccatgctttctcctttggggcccttggcaaggcatctcctgtgttaaaacttctacatcacagacctgcagagctggccgtcgccttacactgaactcccctgacgtcctcgaggcccgcagagtcagcacatccagaatgaaacccacatccccccactgagccacactctttggaggcatccaggatttctgtcctgtctcctccccttcgcctcggtcgattctcacatctttctgaacattcccatgcctgtgtccatctctcccctgccaccccagactcttgtcatcagctccccccttatgcgagtttctggagtgttctgccagcctccacatttcacccctcttctttcccacactgtggccacagtcagctttccagagtgtatttctgagccaccaccgggctctgtctgtagccccagggagcagctgccggcctctgcttscccagcccctcctccctggcctgctcaggtacctgttgtctcaggcagctcccttatggggcattgctcactgccctgtgccccacatcccagagcactctggtgtgtacacatccgccttcctctggtctgagctcctggccatgcagccctcagagcccagtgtagtgaccagcatctggtgatgcagccacgtgtcagagagggggcaacctcaccctgtgcttgggcctgctagtgcctttcagacagagtccattctggactttccctgcctcctggtttgaagcccttttcaaggacattctcagagctgtcttactgttaagcaaggaccactggagacttgygcttccccccaagcagctgcacgtggtagtcttggacctgtgggctgggcatatgtctgtcgggtcagtgggtggccgtggaccacactccagctcaggcccagtgctctcgccaacttcctctggggagcccagcactgggattggtgtcttgcctgtgtttgctggtgggcgcgtgttcactttccacctgctgctctctgactggagcttaagagttttctcggtgctgtgtgtgttgcaaatttgtctctgattggaataagggtatcttagatggcttgaacgacagttggcccttttgtttgtgcatagaacccaacaaagtgactctaagagcccggtggcccggcatggcccgagcgaactgtgcaggggcctggccctttcactcctgactctgctctagggggcaaggagaggcctcgtcagcctagcagcatttcctgtgggtgcctttcacagctgccacgtgcaaaatacagcacattattttggggtgttattttcttgaccacttttggttcattgcttttgactaaatgtttaaaaatattctgcagcatatctatagtactcacaagcagcgaatcaggagaagaaatgcagtttctgagaaggcttcaaagaaataatggtctttatcttttccccagccttttccgctgaaacccaccagtctttttctgagcactcttgttctataaataaagcagcagctctccttgggcagcccaagatcgcagactctcatccgccctcagaaagattgtgcgtgtgcgtgtgtgtgcgtgtgtgtaagtatgtggtgcagtgagttgtgttttaattttgcttttcttttatgtatgagatgtgtagcaggagatgcaagaaaaaatactccagcatctgtcctttaaagataacttataacttttctgggttttggsttgttggttttgtcttttttttttttcccatttagggaagagatggaagtgattgctttccccacaaaggtaaggaagatgaatggggggccaggagagacgtcttcacagtgaggcctttgaggtcaacagagaaagggtctcgtggtatatgtttcaggcttccatggatggcattgttctgtgcagatgtatttgaaatgagtttcatccatgtgtacttggatgtgaaaaggatgtttggaaacaaataccatttcccagtccttcacactgaagactggtttatatcctcgctaccagaatcggggtgggactttctgtctgccttggatcacccttggtctgttttggacgggacctcagatgctaactgtatgctggggatccccgctgtctctaggggagggggtgggggtggggaggtcacttctggcaaacaagcgtcatcagaatgcttgatcgttggataatgttgggctcctctctttttccttcctggcactctttaattactggggagagggtgggtgccttcttcagaagtgtgaggtgaatgtataagccaagaatgagtcagtagattcttcagcagctctgccctgcgctgatcctctagagttggaaagggctgctgttgtgccactgggtcagtgccaaaagcagagttcaccatgattggcacatgctggtgagcaagaagctcttggaagtggtcgtgagtgcagccagttccccccaacccaggaagggcacagtgaggatggctggttgcgggataaggagaagagacccctaggcagtttgcattggcctgtgctgtccgggtgtggtcctggtgtccgtccacatgttgatggcgtgtcgggctgggggctttctgcagccttccctgttccactgtctctcctgttgtgaatgccggtggatggaacaggcagcgcagtgttctgcgcttgcattctggcataggtgggggacatgagcctcctgtgtcttgcttttgctggttttatcttagggagttttaagtgtttgtggatacttaagaactttgtacatgcactgtttgaaacatttacgtaaagtgcagagctatatgagattaggtagttaagcaaaagcttctctgaaccaatgtgcttgtctttgaacagaatttttaggaagcctccctccatttccatgctgaggctccttgtggactgggcatttccgtgaggtgggatgtaacatagtgtgcgaacgccgagagccaggttcttgtcttcatgcttgtcgtttattctttttgattgtgttaatggctccgagtacgtcaaaacatctcatgaccaagtagttagttacgcatttgatgttttggtggcatgggctgcgtaaggcgggagagcagctccgggagaagtagagcccccttcattcttggctttaattgagccaagatgagtggaccgtataatccatttctggattctcgtaagagaacgtcttgtgttggggtgaactcatcagcttttcgggttgagaggagttttagtgtctgtggccgaggcactttcctctcatggtgtgtgcagatgcacacgccaggcctgtgmgtggtgggttgggctgagggcgcgggcctggagcttctgagccccagagccrctgacgtagacagctttggcagcagcatcctgagaaatggcagggggccagagaacacagagacagggccaagaatagctgaaaaataccaaatgctgaagttggagaatgcactggccccgcgtcccagtgtcctcccagctgctgtgtactgtggccctgtgagcctcagtgtcccttcttcatgtctgccagtgcgtccaggrcacaccctgggcctcttgacacccccacccacacaggcacacattgccccttagaggacaggattggtgcaaccccccatgcccccggcagcgtgctgggcctgtgcataggtcaaggtctgttgagagtgtgagaaatattttctgttagagacacgaatatgtttcagccgcaacaggctgcgtttcagccggaagagtgaaagggcaccttgaaaacgcaagtttatgaatatgtttctgtactttcagaccatcatcaaagaggggatgctgaccaaacagaacaattcattccagcgatcaaaaaggagatactttaagcttcgagggcgaacgctttactatgccaaaacggcaaaggtgaggccccatgcaggaaagcacacgcgaggacatcacaggagccgtcccaggggaggaactgggggtgctgagtccttgtgtgggaaaagcttcaattctcagatctgttattgccagtgagttttgtaacactccacgcygtcaggttttacttgtctcaaggcatgttttatttcttatcaaaattaatttctgttcattttccttttctttaatgtcatcggtaatggggaaaaggaraaaagggtcacagagacagccgcgttacagctggatatctctctctcagaaaggcggagggaatcacggggctatgaatttcatcttcttattattaaataatttttattctttaagtatattgaagttctttttttttttttttttttttttgagagggagtcttgctttgtcgtccaggctggagtgcagtggcgagatctcggctcattacaacctccgcctcctgggttcaagcaattctcctgcctcagcctcccaagtagctgggattacaggtgcctgcaaccacgcctggctaaaatttttatatttgagtagagatggggtttcactatgtaggtcaagctggtctcgaactcctgacctcaaatgatctgcctgcctctgcctcccaaagtgctgggattacaggcatgagccaccgtgcccggcctagagatggggtttcaccacattgcccaggctggtcttgaactcctgacctcaagtaatctgcccgccttggcctcccaaggtgctgggattacaggcatgagccactgtgcccagccaaagtagaaggagctgagcttcttgatgtgtgaacagaaatgggaaattctttatttttaggctttctagcaattaaccttgtttctgtgtgccctattgtaggtagatttaaagctagaagcaccaggtgggtgctgctggaggaggagcagccagtgaaagtcacagattactgccatgtttaagcggatgtggtgttagacattcagacaccagtgtgttggctgggattctgaatacctgtgttttttatcaggattggtgtcagtactaatattttggtatttaagaaatctggagtctgaataatttacattttgagacatatccctagaaagttactgcattaaaatttgaaatggaacaaagcagcttgtttagaaagggttctgaccacttccctcaattaaaaaaaaaaaaaaacacgacaaaataaccttttacagttagttctggtggtgcggggaggggaaaggttacttaaaagattgagtttcttttctgagttattagtttgattttctccagggttcctcatagagccatcgtagaatagaggggatggtataagggaaacaggaggcaggggctgtgccgggggaccctgtagggagtggagagggagacgggggaggtccccaggcctgactcccagccctgccctggagcatctttctctccaggaccaggatccttctgctctactcccttgtttcctttcacggccagaccctttccatttggacctgtctctcttctccagaagaatttgttttagccaggaccttccccctccatgtgctcgctggaggaacaagccaggaggacacggaatcctcagtccagaccccggccttccctcagctaaaacactgtgtgagaacatacttcacatgtaaaagtgaatactggtattgacagtagtaaatacagaaataccagcattgggttgtttgctttggttctctctctttcttccttcactaatgcaatgacaatgtttgtagattttttwaaaaaaatcatggcactatacctgtgagcccgagcttttggttagaagcaggtgggtgggttaatttggattggcttattgattggatgctacagtttcaaggtactggggcttctgtgggtgcttgttagggatcattggggtgtggtgggcagcgctggctagtgcttagggatgtacctgtctttatgtgccttagtccctgtgtttgtctctttctagtcaatcatatttgatgaggtggatctgacagatgccagcgtagctgaatccagtaccaaaaacgtcaacaacagttttacggtaagattcctcagtcatgcctttcttgattcttcactgaagttggctttcctttttgatctgaacatgtgtccaagcagttcaaacgttttcattcttttcttactgattggaatgattgctggtaaaatttgaatttaatgctgaaagtaatactgtggttggagaataaccaagaatttggcatgcataagcacaaaaggacaatagggaccaaatgaaaaatttttatatgtgttttggttcacgtctgttttgttttttttgagacggagtttggctcttgttgcccaggctggagtgcaatggcgtgatctccagctcacagcaacttccgcctcccgagttcaagcgattctcctgcctcagcctcccgagtagctgggattacaggcatgtgccaccacacctggctaattttgtatttttagtagagacagggtttctccgtgttggtcagggtggtctcgaactcccaacctcaggtgatccaccctccttggcctcccaaaatcctgggattacaggtgtgagccaccacgctttgctggttcacatcttactacctctgtacagagttttgttttttgtgattaatgtagaaaatttggaaaatgcagacaagtatgttaaagcaattaaaaagcagccataacagccacctcaaaaaacattgaatgttaatattttggtgtatttcttttttttttccttttttatgtttaaactttcttccttccaaatttataaaagttatgtaggactttctgcaaaagttctaaatgcacaraatcatgtgatctcaccacttggaagtggccagctgcttactctacagtgtttatctttatttctgtatatttatgtctttacctacatgtacccatgagatcatgctgaaccttttggtttacacctgtgtttttttccccccccaggacaatttatagtagagagttgctcatgtcagctgatctaaatgttcatgatattatttaatggctatagtagcattttcttgtaggattttataatttaggctttacgggctgactttagcgcctgcctgtgtaaggtttgactctaataacagcactagaacttttaaagctgtttttctttrtgttattaggccatcccatgtagacaaaaagtgtgtaccctaattaaaaaaattattcttttataattcagtcaaggtgagtaattttcctcaagtttaggatctgatattttgggttagtgctagtttcaggtgctttcaagttttgttttattttatttattgatggattcattgttgatgttgccaatacaaatgggattttcctttctctgtctaaacctctgcttattttgtgttgattaactgctcttattttacttggagtatttgtagttttctctattaatttatttttaccagctgggaagagacatttttaaccacataaatagatttttctttgattcgtggtttttagagtctttaataggagtaggtgttgaatttctttggagtgttctgagcatcagttgattaattaatgaatttttttgagatgttgtctccctttgtcacccaggctgaagtgcggtggtgtgatctcggctcactgcaacctccgtctcccaggttcaagggatcctcatgcctcagcctccctagtagctgggattatagtcgtgcaccgttatgcccagataatcttcgtaattttagtagagatggggtttcaccatattggccaggctggtctcaaactcctggcctggagtgatctacccgcctgaaccttccaaagtactgggattacaggcatgagccactgtgcctggccctgggcattaatttagatgttcattttggtttcagttatttgcatatttcctaataaaaaaattattcttggtaatgttgaattttactcctttatcttgcaatttagaattttcccactggtatgtatgcatttgttttgggtgagaatgtagccttattgcagttttaaacaattgttttttctgtttttaattttaatggatacataatagttggacatactgtgttttgatttcagagttaaaccaaccccataaaattcatttagtaactttctatgagtttatgttttctgcaacattttatgtagctttgggattggttgtttcttaagttcgagagaatttattttaaattatttgtcaagaagactttttagggagataaggctgtaatagaaataaatcctaaaatatttatttcttgcattttgatcattttttgaaccttttcactttttgagtccacatctgtaatttactttcccacaaatttcacaccttcaaagttagtagcgtgtactgttgtgtagtttaaacacctgtgtctctggttgaatctcctttgcatttctaattttattagtttagtttgcttttcttgtcagatttcgtaaactctagcatttttgttttctttgtttttaaagagaactagttcttagattattgaacaattctccttttctgtttccttttttatttttttgagacggaatcttgctctgttgcccaggctggaaggctggagtgcaatgacgtgatcttggctcactgcaacctccacctcctgtgttcaagcgattcttctgcctcagcctcctgagtagctgggattgcaggcacctgccaccacgcccagctaatgtttttatattttcagttagagacggggtttcgccatgttggccaggctgttctcaaactcctgaccttgagtgatctgcctgcctcagcttcccaaagtgctgggattacaggtgtgagccaccacgcctggcctgtttccttttttttttttttttttttgagacagggtcttgctctgttgcccaggctgcagtatagtgctgtgatctcggctcatggcaacctcttcttcctgggttaaagtgattctcctgcttcagcctcctgagtagctgggattacaggtgtgtcccaccacgcctggctgatttttgtatttttagttagagatgggttttcgccatgttgtctaggctggtcttgacctcctgacctcaagtgatcctcctgcctcagccttccaaagtgctgggattacaggtgtaaggcaccatgctgggccctactttcctgttttctaattcagtgtctgtatttatgtgtattggtttttttttttttttttttagatggagtcttgctccgttgcccaggggggagtgtagtggtgtggtctcggctctctgcagcctccgcctcctgggttccagtgattctcctgcctcagccttgggtagctgggattacagacacatgccaccatgcccagctaatttttttatttttagtggagacagggtttcaccgtgttggctaggctggtctcgaactcctgacctcagtgcccaccttggccacccaaaatgctgggattacaggtgtgagccaccttgcccggctgtgtattagtttttatctgttgtaacttacgaaatatgttgttcaagtcctcttatgatcttgttttttatcgcttgagcttccataggctgttaatgaggagttagaatctctttcaggccagttacgtttaacactttgttcatgtatttctaacagttttcaccttctccattttgaagctttgttaagcgtgtaaatatttaaaaagataataccttcaatattgagtaatcatttgttaataaagattaataaagtagtagctttttttttcttctttcctagacaaggtcttgctctatcacctgggttggagtgaagtggcacaattatgactcactgcagccttaaactcctgggctccagtgatcctcctgcctcagcctcccagttagctgggactacaggtgcttgataccatgcctggctaatttttacatttttttgtagaagcaaggtctcgctatgttgctcaggctggtctcaaactcctggcatcaagtgatcctcctgccttggcctcccaaagtgctgggattaaagaagatctttttcgcaatgagtagtttgtgtcattaactgttctctcatgtatattagtatttctaagtcttcttttctttgttcagaatttacttgatatacataccccccacscttttccatcctaacttttatctttagttttccttattattttgaatttaattccctttttttttttttttttttttttttttttttttagagataggctcttgctgtgttgctcaggctggartgcggtggtacagtgttagctcactgcagcctcaaactcctggtctcaagagatcttcctgcctcaccctccccagtagctggaaccacaggcattgtcaccacacccagctaattttttattttttgtagagatggggtctaactatgttgccttggctggtctctaacttctggccccaagtgatctgtcttggtgtcctaaagtgttggtattacaggcatgagccgatgtgccttgcctagatttaattcttgtaaacagtatgttgttagaatctgtcttattttagtcagaaaccctttgccttgtaaatattgtgcttcagccattttctgctgtcaggattcttgcatatctgatgcctgtgttttgtggctgaatgtattgtgctttcttgtttgtttgtttgtttatttatttatttttgagacaaggtcttgctctgtcacccaggctggagtacagtggtgcagtcatggctcactgcagcttcgacctcctaggctcaagtaatcttcccacttcagccttctgggtagctgggactccaggcacatgtgaccatacccagataatttttgtttttttgtagagaaggagtttcaccatgtcacctaggctattcttgaactttggggtgcaagtagtccacccaccttggccttctgaagtgctgaggttacaggcatgagccaccacacccagccatgctttcttattttaatggtctcttggtacctctcttctacttcycttctgtgttgtctcttaaacatttatagttcacagrttttctttttcctttcttttcttttcttttttctcctcccctcccctcctctcctttcccctcccctccccgcttctctctttttctatcttcctttctttcctttttccttttttttttttaatttaaatttaagagacaggtcttactctgtcgcccgggctggagtgcagtggcatgatcaccatttaccgcagccttgaaatatcaggctcaagcgatccaccggcctcagcctcccaaaatgttcagattacaggcatgagccaccatgcctggccaagttcacaaattttattatgctagacctgtttgtagccagcccatatggtgacatcctttttttggtcaagctttgtgtattactgagggtttagtcacagagaacatgctactcaatgctttgtttcactagctcttattcgattcataccaaaccatgaaaatgaaaaaggactgaagaacatggaagaaaaataatgcaaaatggtctgttttccagaaaggaatcaaatacgatattttattagtgagctccgagaacatagtatttcccaatgttggtgttgcagggggttgtcgagagcaggctcgatgctgttgctgtctttgaaggcatttctgctcggagactcagagttgccttctctcttgtgcaatgcgggtttgctaactggttggtctgggatagagcaagcctgatttcttcctcactccagtttgggctttccagctttgaaaaactgttttttccttcttttctcttacacttgaaaaaacgaattctggttcatgtgctttgtcttgttctttgggaatttggctcgtttatttagtcattgttttggcaagcattttttttggggtctaccgtgggccacacaccatgctgagtgcggtgggtagaaatggagaggagccactctgcatcaagcttatattctcgtgggagatcagataagcacatacatagaaccttagttacaggctgagacaagctccgatggaagagcagtacatggtgcctgatatgtggaagaccccacctggccttggggaggggctgggcagtcttctcagaggaagtgaggtctcatagctgagacatgaagaatgatagtggtaaatccactgagggaagcatgagcctgagagggtatgtgtgtctgtgtgttggtgtgtgtctgtgtgtttctttgtgtgtgtctgtgtgtttcttgtgcaaataggcacctcggggatggggcaggtggagggaccagcagtgcgaagaccttgggatggggacaccacgtggagtgtgcaaagtggtggaagggccagggtggctgatggaggccagagcaagaggacaccagaggggaccagcgtggctggggggggccagagcgagaggacaccagaggggaccagggtggctggggggggcagagcgagaggactccagaggggaccagggtggctggggggggcgccagagtgagaggactccagaggggaccagggtggctggyagaggccagagtgagaggacaccagaggggascagggtggctggcagaggccagagtgagaggacaccagaggggascagggtggctgcggggggggccagagtgagaggactccagaggggaccagggtggctgggggggggggggtgccagagtgagaggactccagaggggagcagggtggctggcggagggccagagcgaggcgagaggacaccagaggggaccagggtggcgggggggggggcagagtgagaggacaccagaggggaccagagtggctggcagaggccagagtgagaggactccagaggggaccagggcagagcttgggacttactcctcaggacttgggctgctgttgaatagttttatttggtgaaattctcagatttgcaggtgtcagaaagttctactctggctgtagggtggagggtgaactggaaggggagggaggtttgtaggattgttaggagagagtggagtggagagtgcggaggtgtctagggggcagtgggcaggctagtgatcaggtcagaagggggtggagtagatgaaggtgtcagggcttctgctgagtacagcagcaggctggttaagtgagctcaggagtccagaagaggggctgtggggtggtgggggaggcttctttatcttccatgtctgtcacattctttagccttattttatttaatttgttggtttttttcctagttctagttatcaaagtttttatattgtttgttactacatttacttgcaacctcccctcccagctcccaccccccacccccgattttggcatactttgtatttatcctggcttattcttgtttgaaaggtaaaatttttttttttttgagatggagtctcgctctgttgcccaggctggagtgcagtggtgcgatcttggcttactgcaagctccgcctcccgggttcacgccattctcctgcctcagcctcctgagtggctgggagtacaggtgccgccaccacgcccgactaattttttttttgtatttttagtagagackgggtttcacagcgttagccrggatggtctcgatctcctgacctcgtgatccgccggcctcagcctcccaaagtgctgggattaaaggtgtgagccaccgcgcccggccaataggtaaaatattttttaaaagttttctgtttaacaaagtcattccctccagggaaagattttcctttgatcttctccattttctcttgggttttcacatgttttcattgacttaggatttctcccctgatttattaaactttgtgttatagtaattttagttgttgtcttcaagtcctacgcttgtttgctttttttgagacagtctcactgtgtcgcccaggctggagtgcagtgatgcgatctcagctcactgcaacttccaccttctgggttcaagtgattcttgtgcctcagccttccragtagctgggattacaggctcccgccaccacacccggctaatttttgtatttttagtagagatgggtttcaccatgttggccaggctggtcttgaactcctgagctcaagtgatctgcccgcttcagcctcccaaagtgctaggattacaggygtgagccaccatgcccagttttatcatcttcccttagcagcctagagctgtggaacactacaagactgtagggtccattcgagttttatgcttttatttacttatttctccaagtcagtgtttttcatcatttttaaacccatgttctcttttgatgaaggattaatttttattgcctcatttagtttttgaaatttcaaaatgcagcaaaaaggaatgaaagcagtgggctttattctcaccctccctgaccctcctggagagtcattcctacctgtattccatttggtcttatttatttataatatatgctacatgagagcaaggatttttgtctgttttgttcatggctttacaccaagttcccagcacacagtaggtgcacataactctttgttgaagagtggcttggtcacctccagttccagaatgatttgggccctgcccctcattgttcggctctgcaggaagcttcctgggaccagatgctgggcctggctgcaagatcaggtcttccttcctgcagggcacagtccatgtgcatcccagcagccacggcagggctggggaggaactgatgtgggttgcttctctgggcagggcatgggggttccctgcctgtggtgggggaagggggtacgtggctgtggggtggaagggatgtttcttgccagagggagtgggcgtgggaggtgcgctgggtgagcagcctctgaggcaggaagtgctttccaggctggggtgggtttgggcttttttgtcagagctgtgggaagccattaagattttaaagcagggtggtaaagttgggtttttgttagaagagtctgtctgctgctggaggcgagatctgcagggaagagttggctaggtggatgagaaggggtgcagaggggcctttcccccaacatgaggatgtggacagcctggatgtgcttatggaggtgagagatggggcctgaggagagccatgcactgcaggcgggcagggtccatgcttctgctgttgttggtacttttatttgttttgggtgactctgagaattaaatattaataacagtrttgaaggaacatactgtatcattggccatgatgcatgcctcctagaaagcagcgctgtacacagtgacatgatcacagcacccctgcaggactccagatgcacagtttcttctcctcactgagagtgttttggtattgctggcctttccagttctagaaatgtccccttkgagactgacttcatggtggctggtgtcagagtctgtgtcccttgtgaaggaggcagaatcagagctaaattcaatttagcaaagattttctagactaagtaggaagagggctcatcacccgaagtgggcgtgggtgctccccatagccaggctttgtctacaggacagcgggaggcagtcaaggcctgagccctggccaggtccctcggagggcagggagcctggagctaggagagagtggtgatgcagggtggccatttccactcccacagggccctttgcccttcacacccagtgcccactgccctgtctgagacgcctcatgctgtcctggcctgggcctccctggccacctgctggcatggcctctcccatttgtgggggtgccacttcctaactgcctctcctctcacggctctccttccgtgccccctaccttgggcaggatgtgggtgggatatagtttgagtccatctcgggtgctggttttatgaagcacacatttgactccctcagtgggtggtggagtgtgcagacctgagctccctgagctctctcgggtagccctggtcacctctcatgggcagggctgcttgcacagctggagggcaaggcctgagctgctgttcccggagagctagagctcgacaggcctggactgcccaggaggcccgtggaaaggctgatccttcctcagttgttgcagctgagtgtgtgtggcctcctgatgctacatgttcagttgccttttacttcctttatgagggaagttttatgctacgcggtatttccaaagtgtgagctccccagaggaatcagggactctgtctttgaatgtccagggtctgtgtatcctctaccagatagaagacccaaggcagcaggactgggctccttctcttcttttgatctctgaaagtacgggactctgcaaggtaacttcattctttaaggcaagccagagtgtgaatcctagctcagcttcttccaagcagatgactgggggcgagtcacaggacagctcgaagcctccattttctcatctgagaaatggggctagtaacctgccttgtggggtggtttggttgtaaggactaaatgagttaatgaatgtaggcatgatatatgtgtttgtgcctattaacactgtgattataggcacttactgattattcagtgaatgaactgaaagcaataaaccaaattcatttattatatcatttggtatgtggaaaattttcttctartttggtgtacttaacgtttcatactttctctgtttactgaataataactttaattgaacaaaatcactactaattagtccagatttcactgggcttcagttagtctggctgtattattactactccctgggtcatggcaactgtagctgaggtgaaccttagagaggaaagacaagttttactggaatatgcctgaaatacagagccatttagaagggtcatattctgcccattgttaaaagcgctgtgaactaaggctgggcatggtggctaacacctgtaatcccagtgctttgggaagctgaggcggtggttcaactgaggacaggaattcaagaccagcctgaccaacatgatgaaaccccgtctctactaaaaatataaaaattagacagacatggtggcgggcgcctgtaatcccagctactcaggaggctgaggcacaagaatcacttgaacccgggaggcagaggttgcagtgagctgagatcgcatcatttcattccagcctgggcgacagagtgagactctgtctcaaaaaaaaaaaaaaaaaaaaaaaaaaagcaagcactataaaccatcgaggggcccctcgtttcttacctaatgaagttcagggtctggtcctcatgtgccctcccagcctggcctctccccagccaagcccagtgcttcttagggagctccctgtgtgtacgggtcacctgctggccctggtctctgggggtctgtttccccaaattctccccaccgaccctgtccgtttcctcctcagggaagccttcctgtttacatggtgctcaggaaactgccatatgcttctgtgggactgtggttctcaaacttggccatgcccgagcaccttttggaactttccccagaagtttgcaagtgggtgctttttcaaagctttccaaaatcttagggtacaaccactttgggacccccttcttgagggtactttgtgtcactcatgtgatgctacattagcacaagctccctagtaatgtgtacttggccacaccttgagctcaaggccatggagtgtcttggcagcttarggtccccagtgctctgccctttggggtgactatgtgtatgaatatgagctggaagaagcaggttctgttgcttctttttgttagcacaacagagagaatgttgactcaccccttccttggcaagccccgctgaagaggtgctcactattgtggacccctctgtgggccaggctcccccttttacaatttcccagctcatgtccggccggcagcttggggacaaggttagcccctgtgctctgtgtgtgcgcttttagcgagtttgccagctggaaaacttgtttatcccagagaatggaggagtcatttgacaagtaaggcattaccctggccacctaatttcaaatcagttggaaaagatgcaagttttagaacttgttattccttatttgaactatcctgtatcacggcaaactgtctactgagtgcctgagggtgtacggggtaggtaagtgtgttccctactctgggagacttctaacagtatataaagaagtagttctagtgccctgtcataagtagagtggaagaaggtacaaagtacagttagagtggtggtggttagccttgggaggggaggtaagcttctctgaggagcggcatgagagctggatgtggggacgggtcccttttgcagagaggactggggaagagtcagggagtcggggacatccaggaaataggtggtaggagtgtctgttcatgtgacacactagcagtgcctgctttccaggtacaagtcctcctgtatggattcatttgttaacttagttcttaaagtgtttgaatcttagtaatgattttaaaggaaatttaaaatagggagaaaatgggctgggtgtgatggctcacacccgtaatcccagcactttgggaggccgaggcaggcggatcacctgaggtcaggagttcaagaccagcctagccaacatggtgaaaccctgtctctactaaaaatacaaaaattagctggatgtggtggtgggcgcctgtaatcccagctactcaggaggctgaggcagggagaattgcttcaacccaggaggtggaggttgcagtgagccaagatcgcaccgttgcactccagcctgggcgacagaacaagactccatctcaaaaataaaaataaaagtaaaatagggagaaaatgttcccacagtagctctgcagttgttttcttttttcatgtttctcttcagacttttttttttttagatggagtctcgctctgttgcccaggccggagtgtagtggcgcgatttaggctcattgcaacctctgcctcccgggttcaagcaattctcctgcctcagcctcctgagtagctgggattataggcgtgtgccaccacacccagctaatttttttgtatttttagtagagacggggtttcaccatgctggccaggccggtctcgaactcctgacctcgtgatccgcccaccttggattcccaaagtgctgggattacaggcgtgagccactgcgcccttcctcccttcagactttttaataggcacacattaaattttacatgtgttatatacatgtataattttgtgttttgtgttacaaagttaaattttgtgttttgtgttacaaaattacattttacatgtgttatatacatgtataattttgtgtttacatgtgttatatacatgtataatttacatgtgttatatacatgtataattttgtattttggctttatttgctgttttatcataagattccccatatcatgagtctctgtaatgatcgttttttatggtggcagatatttcattgtgtagatgtgtcatcactgatcagttaaactttatttgctcactcttgcagcattaggaactgagaatgtttcagtttttcctgttggagataatgctagaatgtgcatttcagatcacaggagggacatttagggaggtgagtttgttctcccctgcagagcagcttccatgctgagccctgtttgcccaggagagggtgcagtttgcccttcaggagctgctttggtttggtcttgggttcctttttgttacctgccctgagagttgagaagacaaaacttcctcctgctttgggtgattctagtttggttctggtttacagctttatttttgagtatttctgtatttcagcttctatttactttacaccattttagatagatcatcatttgaactttcagatatcctaagcctccagaatctctagaggattggcatgtcacataactttaaaaaagcaatatcaagaagaagttgggtttgttgaagggaagtggacagatcaggggactctggcttatatggctaagctggtggaggaagacatgtgagcagacattgggtgaacgtctgctgttccagtggcacatcctggaatgaggttgggtggagggtaggtagagagctgccccaggtatggaaggtggtagaagaagagttgagtacacacttgcatgagggatggggctggtttacaggaatggaaccagcttggaaagaagacagaaggtgagaagtgaatacttgttggtatcatgtaagaacagagtgaagaaaaaggacaggccggcccttggtttatttttaaatttcaggaaaatggattggccaaataatggggatcaaaaataaagggtgtttttattatgagccaagtgaaaattaaatttaagatatgtatgttgttatggtttgattgtgtcctccaaagttcatgtgttggaaactgaagcgccagtgcaacagtattgagaggtagaaactttaagaggtgatcagtgctgggtgcagtggctcacgcctgtaatcccagcactttgrgaggccraggcgggcagatcacctgaggtcgggagtttgagatcagcctgatcaacatggwgaaaccctgtctctactaaaaatacaaaattagctgggtgtgttggcacatgyctgtaatcccagctactcaggaggctgaggcaggagaatcacttgaacccaggaggcggaggttgcagtgagccgagattgtgccattgcactccagcctgggcaacaagagtgaaactctgtctaaaaaaaaaaaaaagaaagaaaaaaaaagaggtgatcaggccaggagggctctgctctggggatggattaatgctgttattgtaggggtcagttcctaataaagggatgagttcatctcctcccccttgttctcactgtcacctttgacgcagcatgaagcccctcaccagatgccgcaccatgctcttagactttcgaactatgaggcaaataaacttctgttcatttaaaattatctagtctgtggtattctgttacagcagcgcaaaacagactaagacacatgtctagagggctgcttatgtgtaatagctwtataatactgcatatataaagggcagtttatatttaatgctggtagaatatcatgaaggtagtgtatgttagagttaggtttagctactgtattagtttctcatggcttccatagcaaattatcagataacatgaaacagaagaaatgtaattctatcacattcctggaggccagacatctgaaatcatggtgttggcagggctggggtcctaggagagactctgtgacttgcttttcccagctcctggtaattccaggcattccctggcttgtggctgcatcgcttcaagatctgcctctgtctccacatggccttttcttccttcttctgtgtcttctcctctgttttcttaaacagacacctgtccttggatttagggcccactcagataatccaggatgatctcatctcaagatccttaacttgattacatctgcaaagactgtttttctaaataaggtcacattcacaggttccagagattagaacatggacataccttttggaggccatcattcgatgccctatagctacaaataagaatggtgtgaacaggcaaggttttattctttcacaccaaagaaagtagtccttggtgagtatggtcattctgcaaggtcgaccgagcccttccagaatgtgagtcttctagtctaagaggctatgaggtgctagtcaccactgtgtctcctgttgttggacggggagacgaggagaggagaaagtgtgttgcctggtaggagttcataaccaggattcatggccccctcaaagcggtctgtggatatgactatattgtattaaaattggtttccactgtaatcataagtattttatttttggcacttagagaaattctgagaaggagttcataggcctcaycagactgccagaaggggtccatggcacagaacagacgaggagctcttgtatgacttctccaaagtgtgacatggcacttctgcggacatcctcccggttgatctttagttatgtgctcataccgtatagctctcaggatgcttgccctgaaataatcatatcagaataaccatgttatgcagagagaagggtgatttttcatgtctgtatttatgacttccttttccccaagtaatatttttgaatagtttatggtatcaagaagtttgatgaagtatatcataaagaaggtcttccttgttagctgtgtgacctagggcagatacttcatctttctgagactcaattttctcatctgtgaaatgggataatactggactgtatctcaaaggtcattggattggcacagaagtgcgttctgaatgtttyctagtttctaatctccaccaccagtcatctctactagtaggaaagtaatagggtttaacttgctaacatgtaacagttattctgatttataggagtttcaaaggatttcaaacgaggccaactttacagatatattaaaaatagcttttgtagcagaagagtagatatccggaaaaagttatccttaaaagttttcaaggtataatcaatacaaacaggaaaaataaaagttaagggaaraccaagtataatttaacatataagatgcctttaattggtagctaaataaaaaggaagctatgtaatggatcagagtattgcgtttaaatcttgtcatggcagagcacggtggctcatgcctgtaatcccagcattttgggagaccaaggcaggagaatcacttgaggctaggagtttaagaccagcctgggcagcataacaagatcctgtctctacaaaaaataaaaaaaattatccaggtacggaggcatgcacctgtagtcccagctacttgggaggctgaggcgggaggatcacttgagcccaggagttctaggttgcagtgagctgtgattgcaccactgcactccagcctgggcaacagagagagatcgtgtctcaaaacataaaataaatcttgtccatgtggcattcatatttgttgggtgaatgaaagttccctagtaggcctacctagcgtgaaactgtggctgagtttctcagctgtttctaacagacatcagcccagaggatggttaggactgcttcttgggtgaggaaccgtgatctttatccagatttcatcatcagttttcctttttagcatgtttggatttcagatattttctgggcaaaattcctaagccagttaactttggctcggagagaggaaaaactgtttttttttttttttttcagatgagtctcactctgttgcccaggctggagtgccgtgctgcgctctcagctcactgcaacctccgcctcccgggttcacgcagttctcctgcctcagcctcccaagtagctgggactacaggcatgtaccactacacctggcaaactttgtatttttagtagagacagggtttcaccatgttggccaggctggtctcgaactcctgacctcaggtgatccacccatctcggcctcatgggattacaggcgtgagccactgcgcccatccagagaaactgtatataattggcaaatgtctctgcataaaagactcttcctaattgctgcaactgctggcccaggtctgggacagggagaattgtatttgtgggtcccaaaagtcctcttgagtgtgaagtgtctttgctcttcctgttgggaagccccacgttcgttagcagctcctgccccctgggctcacttctgcaaagcaagcctgcctctatttctgctcaagtgcagtgttccaggagaacctgactgcatgtcccagctctgccagctctcagtggtgggttcttggccacctgtagcttcattctcccatctgccaatgagggtggtcctacctagcacagcaatggtggggcagtcgagcaccgggcagagtaggtgctcagtgaatgaaatactgtaattattaacacatgccatggacagcagtgcaggcctgcgggatcaggtgcagaaggaagttaacccagtgaattccacacctggtaatccacactgtgttctcaggttaaagaagcaggaggaagcaggcattgagtcaaattggtggctgtttgctaagtgtggggttttactgaaggcagcacctgcttctgcagcacagctggtctgaaaagccaggttgctccttgtgagggcttaggggtcggttttaacagtcactccaagcaggcacagggagaagatgctgtcctcttctggcagcctggctggtgagcagtggaaccaattgtggtgtctcttctttagagtttggggtgggagaagacgcagttactcgtctgggctgtttgtttagattatcagtggggtttgcatttgtgaaatctaagccattttcaccttatgattgtatgtgtttgaaaaagtatttgtgttgttaacacttgttatacttgttaatttttatgaacaagtgtagcgtacttgttaattgtctttatttacaaatggcagagaaaacaaagtggatagttgagagactgtcattggattatagtaatttagtaagggaaagagttctttgagaaaagacctggggggaagatacatggatttgattgaattttttcctagggtgcctaggcagtgaatactttttagccatctttactcagtatgcttttaaatgtgtcacggtgtgattgagccaagttccgtctgtctggtttttttttttccttgaaagttacaaaaatggtatcattctctaggaaatcatgttaaaaaaaaatcccacgttcccgtcccagaataacctggtgtttcacagtacatagtggtaggatctttttatttccttgaaacaacttgttatcaaattaagataatttcctgctctgtggtagggagactgctgtttattgacccagtccttcctcctcaccacacaattgaagaacctggtttgaagtgtaaacctaaaaaacatgtgatccccccataccgttttttttttttttttttttttttttaagacaggaggaggactgtgggagtggttatcagtagatctgtgcagaagggttggccctgcagactgggtctggtgtagaatgtgccctgtgggagctgcctccaggcctgtggctgggtgtgttaatcagtgctggacttcatacagaaaagtcgatgctgttttcttttctttttcttttttttaaatttggtagagatatgatctcaccatgttgtccaggctggtcaacatgatccaatcctcctgccttggcctcccaaagtgctgggattacaggtgtgagccactgtgcctggccaatgctgttttctttgtagctgaattgttcattggctgcaaagctatagagggtgggtcaagataattagatgtttggaaaatagttaagagggggattggcttccaccccattctttgattttttttctctttgaagaaagagggggggctcaagggacactgaccttggaggcaggagccttggggtttgtcctgtgcccgtcattgaccgggatcgcttccttttctgtaaatcaaggtcatgggcgcagctgacttgccaaggctgttgccagctctgcgctgccttctgaggaacttgatggtttgcttcctgtgaaaacttgatggtttgctttaaggtatcactagataccttggggtgatatctaatcacaccaatgaagagattgggtatttgtttttcccaaatccctaagtgctgatttctccagggcagtacacaacctcttatctttagcactcactttgacttgcataagtttcctggcttggatgataagctatatggtcaccctgcttattcagagaaaggttcatagtgttctttaatgactattctaatacatgaaaaccattttttgtgacttgagacataattgatgtacaataaactgcagtatttaaggtgtacagtttgatagtttttatacacacacactttctctctctctctctcataattacactgaagctgtcaccatagtcaggataacatttccatcaccctgagaatttccttgtaatccttccttctctgcctcttcacaggcaaacatggatggatttgttttctgtcattgtagattactctgcattttaaaaagaatgctatataaattgagtaatgcagcatgtactacttttttttttaatgtctggcttctttcactcagcataatggttttgagatttttcatgttacgaatatcagtagtccattgtatgcatattccagcatttgtctattctattggtgggcatttaggtagtttctagttttgggttattactaataaaactatgaacatttgtatacaagtcttttgtgtggacatattttcatttctcttgggtaaacaccttgaagtggaatcgctggatcatatagtaggtatatgtttaacttcttaagaggctgctaaactgttttctgaagtggtgatccaattttatattcccaccagcagtgtatagagagttccagttgctccacatcctcaccaacacttggtgtgatcagtctttttaattttatgtgtcctaatagttatgtagtgttaccccattgtggctttaatttccatttccctgatgactaatgatgtcaacatcttttcatgtgtttgttggtcatttgtatgtcttttgtgaaatgtgtgctaggacatttatccatttttttaattgggttcttattgagttgtaagacttctttatgtattttggatgtaagtcctttgtctgatacatgtgttgtgaatgtttttctcagtctgtggcttgtgttttctttaatgacacttttagaacagaagtctttctttttggtgaaattcaacttatcagttttttaaatggctcattcttctagtattctatccagaaaacccttgtctacctcggcttgcaaagattttcttctataagttttgtagttttaggttttacagttgggattattattgatgttcttcccccgacccccatatggatattcagtttttgaggcagcgtttattgaagatacattccattcctcatttaattacctttgctgccttttttcaaaagtcaattaaccttttatttttgagtctctttccagattttctattttgttttattgaactatattatgtctgcctttactgaaataattctacactttgttgattactgtagttttataggaagtgttgaaattagagtcatctttgttcttttctaacatagctttattctaagtacttagcattttcatataaattttaatattagtttgtcaatttctataagtgaggcctgctagaattttgtttgagattgtgttaaatctgtagatcaatttggggagaattgctatcttaataacattgaatctttaatgatgttgagttttccagtacattaacacgatctctctctctttatttaggtgctttaaatttatctcagcagtgctttgtagttttcagtgtagatgtctttaacgtcttttgttagattcatttcaatgtaatttatgtttttatttttattaactaaatggaatttataaacattttatatctgtttgctgctaatatataagaatacagtggattttgtgaccttgcaaaatactgcttgtttaattctagtagtcattgtgtagattccctagaaagttctatataaagttgtatcatttgcaaatagggacagctttacttcttcctttctgactcacatgccttttatttatttttcttgcttcattgcaaaggctaagattccagtacagtgttgaataggagtagcgaaggcaggaatccttccaccttttccagtcttaacatgaaacagttcggttttcatcattaaatgtgatgttagctgtaggctttttgtaggtatcctttatcagtttgaggatgttctttacttgatcgctgacagttttaattattaatgggtgttgaattttgtcaaatgcttttctgcatttattgaagtgaacacatggtttttttctcctttatattattaaaagggcaaattaaattggttgattttcaaatttaagacaacttttcattcttgggttaaaccctatttgctcataatatgttttttatttattgttggattcaatttgccattattttgttaaggattgttgcaccaatattcatgaaggtattgatctgtaatttatttctctccctttcttccctcatttcttcctttctgcctttgtcaggttttggtactttaaaaaayagagagtcaggccagatgtggtggctcacgtccgtaatccctgcattttgggaggccgaagcaggtggatcacttgaggctaggagttcaagactggcctggccaacatggtgaaacctcatccctactaaaaatacatatatatgtagtgagtcagtgttaccccgcctctgttttctgataaagtttgtgtaagcttggtgttctttctgaaatatttgctagagtttaccagtgaaatgatgtaggtatgcagtttttttggggtaaagtttttgataataccctgtgattttttttttttaatgttcagattttttgtttcttgtgtctgcagtgacattttctgcattctcttccttttccctctgatttatgtctgttggatggagaagtagaaactttatgagagaagggatatcatggggcttgttgatctgttttcatcccagcgcccccgaaccatgcctggcaccaaatagccacactgtaaatgcctgtggggttaattgatttgttgttgctgtatctctattccttggcacctctgggaagcatttttgtctccccccgtccacatgggaccgtgtcgtcactgtgctgtgacgggagctggctgagtcaggctggcaggctgtggctgccctgcatgccgtgccctcccacggtggctcttcaaattcttggctatgtgcccagcactggtacacagaccctctgagtcagggcttgccaatggaaaaaatattttcaaccttttttggtcttttaaaatattaaaacctatagttggaattacttcttttcatttttacaatgtacttgaagtatcagaggaataaggaaagccattgtaagcttggttagtggaaagggataaaccacctctgagcatccaaataaaattaggaagcgggggttctagatgagggaggacaattccaggaggctcttgaccttgtatatgattccctgactgggaatgtggtctgagatgccctttcctggacagattacaaatgacagcccctggagcaaacacatgaatcagccagggagttaaaaaagaacagggtagtttggactgggcctctctctttcaggacatgactgctgtggctacagactgcattcaggtccccagcatctggaaggagtctgtgcccacttatcctttgcatcctaaggggactgggtctttgtgcaccagcagcagccgtagaggttgggcttgggaatcaggggctcccttatcaaagctgggaaacttagaacaacagctgtgccgctcatggacctgtagtctctcctgttaagcagagtgctgagttcatgtgatagcaaacacagctctgccagaccacagggtcaccaggcaggcactccatccctccctccagggggagaccacggcatgccttggatgaggtgacttggccaactgtcttgtggccccagctcctgacattacaatgtgatgactgtgacacttggaagagaaatgtctcrggtatcgtggtcctgggtcctgtggtacaggaccttgtctctgcggtcctgtacttttgcttcacaattagaagaattgaaagcttcaggttgtttcaggtatgttttttcaagaagtgcaatagtagtgtgtttatagatgttttccttagagttagttttgggggagagaagatgactgcccttccatcctgcaggtggattggctggggaatgaggccatctcttttcagagtgagcagtgaaccatttttgtctgtacactgacctggggctgatttggcatcctgaccttccagtctragggagttggtaaggggctggaagggcccattctttgtgtgtgtgggtattttttagagacggggtcttgctgtgttgcctgggccggtctggagatcctgagttcaagcaatcctcttgccttggccttccgagtagctgagactacaggtacatgctggacccacactttggactctgtccctgctggcctagttctttgccaagagcaaaacttgagagcaccctcacacaggtaacagttagaccttgtcaggagacatggctgttttcccagacagctgagctttcagactaaagcacagaaaagttggaggacatgggactccttagcccacaaaagaaactctattttaattttccatgtgaaataggagtagggtacgttagggtagggcatcttggttatgagatgcctgcagcaagtgccatcagggtggctgccagctgagtcatctccctcaaagagctttcctggaaccactctccccggtgatgtcagctccttcacctccattgctgtctctagctgcaggggtggttggagacccagtattttagctaggccctgccagaggccattgggatagcaggtcaatggatgaaggaggttgtataggcaaatggsagtaattatctctgatcttgatttttgtaggaaataggcrtagattaaggcatagataaatttgaaaaggcatagatacattaattaattaattagagatgaggtttcactctgtcgccctgtctgaagtgcaatggcgtgatcaaggttcattgcagctttgacctcctgggctcaagtgattcccgcaccttagcctactgagtagctgggaccacaggcaggcaccaccattcccagctaatttataaattttttttgtagaaacagggtctcactgtgttgcccaggctggtcttgaacacctgggctcaagggatcctcctgctttggcctcccaaagcactgattggcaggcatgagctgctgcgcccaaccaggcatagataaatttaaagacaccttttactgtagacaatttggaaaatagagaaaaccagagggaaaagaaaaaaaagaatctctcagtcctaccacttgatgtgtgaacctccagttttcccggctgcttgtgtcctgccttttttaaacacaatacgatgacatcagtatgtccccctttccctcatttatgttttattgtggtagaatactgttttattgtggtagaatacacataacataaaatttagcatcttaaccatttttaagagtacagtataaatatgcccttttataaattacttgtttttccctcctcgtgtggctttgttttctgtgtggtagccattctgtggtttacttaaccactctaagtattgaacacacaaacaggcttgaatcaattcatttgaaaaggtgtggacaagactttgtcctaagggtgacacctggcccagccagcagatgtgattgttctrccttggccaccttgctctgggaaattgtattgcttagtcaggttgaccttcagtgaccaaaaaagtggatggtagtgtcaagggcttcgggtagcttatgaaactctttttccttctcatcttgttactttcctcttgatacttacttgttaactacagtgttactatagacgcctttgggtatatgcagatttaccattagttaatcccagagaaaaatggataaattatgacagcgtggtggctgtcagacttaagaatgccaaagcattcccgtttctctccctccaccccatcccttccagacttactaccagggacctttggtttgcctttccttgtcaccaggactccgaggtctttcagctccttgtttcttctgttcagtagctgaaggatgcaggtactctgccctcctgctgtggtttgtttctctagcgagaagtccagcagcccagctactgaaagccaaggtcactaacgcaggatgcagtcagcccaggaggagcacagccctggacatgaagcttctggtcttacttctcccaccttcctgctacggtgtgcattgcagccgcaagctctgccttggaattgcttactgtgtcttagttcctgtgtgcatttttttattttttatttttttgagacagtcttgctctgtcatccaggctggagtgcagttgtgcgatcacagctcattgcaacctctgcctcctgggttcaactgattctccctcctcagcctcctgagtagctgggactagaggcacccgccaccacgcctggctaatttttgtatttttagtagagatgggatttcaccatgttggccagactggtcttgaactcctgatctcaggtgatttgcccacctcagcctcccagagggctgggattacagtcatgagcccctgcgcctagccccccttgtgcattttttaaaaggtgcagttctgtatttactgtagtgtttatgtggtaaaatttgttcatttaaaaacatttaatattgctgttgttcccttgatgcttggttacaaatttgcataagttctcagtggcctgccccagcttacctattcccatgggacttctttttacttttattgtgcccttttgtagagtatgagggtttttaggaactcaaaaattgcattatggcaaaaatacctggaaggttttcctgatgctaagattctttttaattccccttttaatacaaataacatgtatcattatagataattaagtgcagataacccaaacaaacaaaaaccactcaaaagtcttatcactgagattctagattaaacactattatatagacctgcgattctcaaacatgggtagggataaggcagtgggggaggtgagattggcctgaagaggacatttggggactccacactggtttgtcacagttgtgggtatggagagcaggggtacgtgctgctgacacctagttggtaaagtccagggaagctgctcagtgtccccagaggcacaacagtgttgtgcgacagcctcacaacaaagaattatttggctcaaaatgtcaatagtgctgaggttgagaaaccctgatatggacagatagttatggggcctttttctgtgaatattattaaatacactttagttttacaaaaatttggattatttatacagactagtttatgacctgcttttaaaacttattacttcatgaacatctttctgtgtccatgactatgggcctgtgacataccattgtgtgagcatgttggagcttacttcaccagccccctgtctggagactgaggtgctgccagcgttttgctattgaaaccacatttgtttgtattttgccttctgcatgctggttgactatggccagcccatgttggggcaccagctctacatctggggtgcctttcatgggtaataatattcccttcctgccagaggcccccccgccaaccatggcagtccccaatctctagttttctcacagttgaacataactcaagcttaatgaagtactgttgaaatagtgaataggtaagtaacacaatatttctgtcacgtttcatttttaagtagaactttcactttttgcttcattttactttatgggtttctaaaaaaataaataaattaaaacaacctatcttctggtaggttacatgtgactttaacttcttgccaagttggctttgctccatacctgggcttcctgagttcctggggaggcaggagtgggtcagatggaggatgccttgctctgactgtgctgtgggtggcacctgtcagttgtcatgctggggaccccctccttccccccaaagctgctctgaggctgcaggtgagatgcagcccaggagaggaagtgcatgacagctgtttgggcccacgttcccttttaggttgcagacagggcagcgtgcagagctggtgggctgggcggggtctgacacagtgctgtgcggagctcacccggacctgggcactcaggctctttctatatggggaactccaagagcttgtttgtgtggtggtgtctatttttgtgttttgtgtggtgctctgtgaggaagtctgttgtctacgcacatcccagctgctttgaatggtctgtctctgggggcttccaggtagggaattgtgtacggggaatccaggattcgggcagcatcggaacagcaggatgtgagtaacaggaagtgacagaaatgacccagggcgccagatgcttattctcggccacctttccaagcgctgcagcccaggagctatatttagcagagtgtttccgagtgcctcatcctgcccccagcaccgtccctttgcccctcttttggttggtggctgattgcacggtactgatttgctgctccagcgttcctgctctacttcgtaatctgtaggctcttgcccattgactttaacacccagtttttgtttgtgctgggtcacttcaattttgatacacgtggagcagctggaaactgttctgagcaggaagggcagcaggtaagagccccaggggacagtgtgccatcatactgggaggctgttgggtggtgagttcaaggtcagggtttggaattaagcggaaggaattgagcttccttgtaagatgctccagagggttgcttcttggcttgtatgtcttagaaatggaaggctggaatttttaaggtataggctttgtggtgtgactttactcatgtgctagaaacattctgtggttctcacctggccagayagaaagctgcaggtggaagaggcttgtgtgtggtgaattcctacagtctgagctttgtcacgggaaaatttccctccagtcccccaaagcaagcactacagagcccagatttgttctgctttgggtgtgggtggattttcaccttgtctgtcgacggtgcaggacctgtccctgtgtgctttgaggtttctagggtgtgatgttggtttgtggtttgtggaggggtgtgtgttgggagggaaggtgtttttgctgttctcctctaaaagctcccttctgagtggtcccgccaggacctccctttcctcccttcatgaagcatccaccttgttttcagacactcgagctatttgggattcaggaattgactctgggatgagaaatttgagagacaaattaggaacagttgtgtctgccatgagacgcgtggcagtcggcaggggcctggtggggtgtataaaagccctgggaaccctgcataaaggggttgggatggtaaaggagtgaattccaggctcaggcgctcaggagattcccctcccccagttccctcagcagagtctggctactggcatggtttcaggctgacctgttaaccttccgtatggctaaactacaaatatagggcatggctatattgtgtgtgtctctagttctggcttgggcatgttagcatatttttgtgccaaaacatttaaaacattcaaaaagtaacacatgaacccagctatgactgcttccagcctgagaaataaacataatagatataacagaggcacttggaattctctttcctatcctcgtttcttcctgctcccccttccctgggggcatcctaactttggtgtttgtcatttgttttcatgtttatatacttttttgataagtgtgtgtaggcataaacagtatatagcattgttgaactggttctgaaatgtcgaataaatgttatcagactggacagccacagcattacgcttcctggatttatccctgtggctacatctagctttagttaaatggttcaaggtttaatacaactgattcctgattcctggagttaaatcagaatttctggggaacgaggcatgaaccgcagagctcctgacaggcgcgkcctgagttgaggcccacgatgctggttttcgtggcctctgtagtgttccagtacctaagacgtcctgttgtggacgtacactttcccagattccctgtgatcagtagtgctgctgtgaatatgcttatcytcgtcttcttggcacatgggcaagagtttctctagaatgtgtttctaaggatagaattgccaggtgtgtgcatcttcagcttgactggtgatcgtcaaattacctccagaactatcagcagcagtggtcacgtatgagtgatctcatttctatagtgtctttaagtttttcttttttaacataccaaactgagggcaagatgaagacctcatgagtgagataagacattggacattgctgagactttaatcgacaccgtgccctcascatgtccacacggacctgctggccctgccgccaccccagctgtaaagcttgcttccacccacagtgtccccttcctgggatgggagcagcacccagccagctgctcggaggtcactgtggactcctctctgtctcaccctgtcccgtctgctgtcctcagagcacatccagagcctgcccactctcctcaccatcatctcgtgatggggttactgaggagcctcccaaaaggtttcctgccttctttcctgcatcttactgtcagctttcaataaagcaaccagaatgatgctttcaaaacttgagcttkcatggcttcttattttacgtggagtaaaagccaaagttcttacacctgcatggccctctgtggtcctgatgcttgcaggttggcccctggcccccttcctgatgccagccccagccacgcaccacgcgcctgcttctgctcagcccttcccacctccttccttgcttccttccagtctctggctccttcctcgcctcctccccgtttttgctgtggagtcccctggcccccagacctctcttttctggtctcccgtttttccatagggcttgtcaccagctactactctccatgctgtgtaattcacttctttaataagtctttaatttactgcctgcattcaaatgtaacttccgcaggagcaggaatcttttctgtttgctcaagtgaaagactgcctgaatttatttctgaggaagaaagaaagaatttggagcccaatgatgaagatagcacaggagagaggaggtgaagttgagggagcagtttctgacttgggaggttggggggatgggacaattactggtctctgggaggcagtggcagaaggaccttgaggccccctaagtgtgtagtaggacccccgaggggcatggccagtgggctgtggggctgcagaggcagcttcttttggggccttgtcttggcaccatctcggccactcccagagcatacattggtattgccgtagtgggtgctgggctggcccgccccacccaggaagtgcactactgtttgagggcaggagcctgcgattctgacatcctctcttcatggctgagctcctcaggttacatagctccactgattcctcaagcactgttgtgtttagaaatgaaaccttccatttccagggccctgccttgtgcaggctcaagtacccaggccacgtgtcagagcccatagcaaaatgagcagctcaaccggagggcgtggtccatgacactcctgcgtgtgcttggactcaggcgcagggacaggcggggcagctggcatttctacccacccctcctgacatagaggacctggtccttttctttgagaatgtgtaccaaaggtgtgtcggctgtgtccacataatattttcttggcgtcagatgtttcatgggttgcactaactacaaatacaggactttagataagattacacttttaacttgcgctgcccacatacgcccttgtccttaagaaacacagcattgttctggagttactccttggttttcccagtttaaacttaaatattgttgatggtggttacttatttttaattaaagcttttattttgagattctttgtaccctttacccagttgcatgcagtggtaacctcttgcacaactccagtacaatgtcacacccaggatactaacctcgttacagtggagatgggtagcctccaagccgcagagattttccttgtgcccttttacagcytcacacatgtccctctgtaacccctggcaaacactcatctggtctccatttctataatttggtcttttcaagatgtgatataaatggaatcttatagtatgtaacctttggggttggatttttcactcagcgtaattccctggagcctcattgaggttgatgagtcttatcagtggttgttcctttttattactgagtagtattccacgggtgtaccacagtttgttaatcatttaccccctgaaggrcatccgaatagtttccagcttttggtgatcatgaataaagctgctgtaaacattcctgggtaggtttcggtgcaaacatgaatctccatttctctgggataaatgctgaagagtgtaattgctgggtcatatgctagtcacatgcttggttttttaagaaactgccaaaccgttttgcagagtggccgtaatgttttacatcccacccaacagtaagatccactttctccatattctctccagcaggtggtgttggcactagtttctgttgtagccatcgtgataggtgcgtagggctctctggttgtggtttcagtgtgtttctctgatggctaaggatgttgagtatcttctgtgtgcttatttgccgcttgcatatcctcttgtgctgtcgggggtgaggactcatttccaggtggtataggagacatcccggctctcagcttggcctcctctggatactctgttaggtgagtgctggagtgcctagctgcggcctgggagtggggtgggcatggttttttcttgtggcrctggctggagtaaggtgggtgttactgccgttgtcagtttctgtcttgtctgactgcccccttcctggatccttggcctggaagagcaggcttttgttggggctttccacccacccccccagtatccatcactgttttcggctgctgcttctttagctccaagtctagggtataccaggtaaaaagaaaacccagagggccaccacagtgtcatccctttggacaagacccttgtcaggctgccatcttctctctacctttcagggtctttttgtgttgattttctgatgcccatggttttcagttctcagtgagaggagtggggaaaagtacctccctgtcatctgaatttggacccgtgaaaagtgaagagggggtccattcagaatgttgtgcctctacccatccctgctcgctcgtcatgaccgttggaccrttgtggtccccgggcctcacattaattactcttaggcccttttggtttggcctgtggtttcagcgtgacacagtttgctggactttgatcttttttgtcatttaaagtgtcatttatgaatgagatccacgtccagatccctgcatgtccaaattcatggttagaaatggttggacaggacatagccatttgggtgctgtgattcagcctgatgtcaatcagtgaactgcctttgtcattatcctccagatcttatttctccaccttctattttgaactcttgggaaacctggtcagagtgggagggacaactagtcagatgacttaatgagatgttggtatcgtccttgtgctgatcctccaagccagtcaccctgccaaaacggaaatgaaatgtgccagacaccgcttgtactgagtgagcttgggagagctcgtggtgagtgccagttgcttccctgcctccggcccactggccctggtgtgaggcaccacccagatgaggagaggctgcgggatggaggtccagggctccgcctggagcccccctgcctggtgtcctggccacatcagctcatttgctgtgggactgtgagcaggcccctcagccgggttcgtcaggttgtggagaagctgaatggagcagataacctggaaaacacgcggtggattgccgagaccttctttgtgcctcgcccatattagccaaactgtcccttgttctatcagctgccatgtgtgtgtaagccagagtccaccctcttttccatttgagaaatcacgtctgcatgtctccagtatgtctcctttttcaccatgatttctcagagatcactccctgcggtttaataaccccctgggctaattcttcccaggacatgggaggacattttgtctggcttggcaactcatttagagtagcaaggtattttctcatttctcttggaaaatcatgtacttgaatcaagaatagaagccaaaattgttctttcaaatagaattttaaagcttttttttttaatccttaacatataaacgtaagactttatttttatttatttatttatttttaagatggagtcacaccctgtcgcccaggctggagtgcagtggcgtaatcttggctcactgcaaattccacctgccgggttcacgccattctcctgcctcagcctcctgagtagctgggaccacaggcgcccgccaccacgcctggctaatttttttgtatttttaatagagacagggtttcactgtgttagccaggatggtctcgatctcctgacctcgtgatttgcccgcctcagcctcccaaagtgctgggattacaggtgtgagccactgtgcccggccgactttattcttttttaatagctcatttttggattggcaacacatgcaagtggtacagaaatcttaaggctaaaaagatataaagtgtttcccagccactcagaggtcctctcagttagaggtgactaatattagtgttttctctgtacccatactcttcctgcaattggcttttatctattaacagtgtgtcttagaggttgttccatataagaacatgtagagtagcttcaggggttttagtggctgcatagttttctgttatatgaatgtactgtcattactgtagccagtctctaccagccttatattgatcactatttgtttggtttcaaatattttgtctttatagtgaatgccgccacaaataaccttgtatatacagtatgtgatttctcatgaagatacaggagaggataaatttatagaagcatggttgttgagacacaggtgtatattttcaagtctgacagattttaccaaatggtttccatagaggttgtattaatttttgccccagtgtatgagaatcagtagaccatattataaaacatttgatctctgtgaatctggtaggttaaaaaatgggatctcctaattttaacttgcatttgccttataagacagcgttttttcataaacgttgaaaatccatttctaacactgttttaacatagtgctgccagactctcatattcatgcttcatatttcatattcatattcatgtttccacctttctctccctgtctcttgtacagttattttctaaccagattttatgcaggagtctgggcagctctgcacacttttcttttgagttatgtggttatgtgtttttgagaaatcccaagttctgtatcctttttgactgaggtgcagcattcacatggaggagtgtactcattacagacgcacagcttgatgcatgttcccgaccacggagaacactgcagcccccggaatccctcctgtgtgcccctcctgtcaaagcagctgctaggagaagctagcatctaataccatagattagttatgtctgtttttttaactttatgtaatgcataaggaaattacacagagtatatgtcgtcttgtgtcaggcttatttctttcgctgttgtaagattcattacattattgcttgtctcccaatgtatgagtatactacagtgtattcactgtaggcctgtttagagtagtgatgctatgaacattctcgtatgctttgatgaggaaggtatgcgtttgcatttctgtgggatgcgtgggtggaattgctgagtcacagggtatatacaagttcagctgttttctgaagtagttgcaccaaattgcactgtcaccagcacttgatactgtctgttacagctcagccattgtgagagatgcatcaccctgtagctttaatttgtacttccctgatgactaatcaaattgagcaccgggtcatgtgctttattggccatttgtgaaatagctattcaagtctttcgtccattttactattagtttgtctgctcttactgatttttaagttctgttaccctcaagagaattccagcaggtgtgtaaaaattcacatctgtctatggctgttctagcctgcctcaggattctgtgagaaatgcatccaccattttatccactcctcctctgtgacatcacgtttctttctccagtcatcaagcatcaagatctgaggatattttctctctccagtgtgtaggtttccatgcagtcacctctgatgcagttctgctccttctcttggtgggacgtcctgcagcctggccttttgaatccctgggatgtcattcatttgtcctgttgagttcagtttattgccctgctttttttttttttttttttttgagacagggtctcactctgtcacccaggctggagtgcagtggtgcaatcttggctcactgcaacctccgcctcccaggttcaagtgatcctcccaactcagcctcccaagtagctgggattacaggtacatgccaccacgtccagctattttttgtatttttagttagagatggagttttaccatgttggccaggctggtctcgaactcctaacctcaagtgatctacctgcctcggcctcccaaagtgctgagattataggcgtaagccactgcgcccagccttattgccctgcttctgatttgcaattatcttttaagttgattcaggggtgtgaactgtttcttatttaatacatttgcttgaaaaatatgagccatcttttagtctccaaagacttttctttgtgaaggctggattttggagatagtttcagcttttttacaccattccttggttgccagtagttatgatactggctgcagtccagacatagggatgctcttagtattccttagagcatctccctgcaccctgccacctgccctggtgggcagggtgagcagccaggaaggcatagcctgagggcctgtatctagcccctgctttctcgcctgggtccttcctacccatgctgtctcccaaatcaagggattgaataggaagtgctgctcagaacatcccccagaatcagcctcccgaagagactcaccctcccctaccagaggttgggctgtggctggtgttaggggaacaggagtaggaggggagccagaggaggaggaggtgggcccttgcctaaggggtgcctgctggttggtgtgggggctggagctcgccaggaggggtgtgctgagaagatggaggcatggcatggaagtgtgagtcatggcaaatctcctgtgtgcagctggggaccgacatagagaaggcaggcccagttgtgtcccctctgtgggcagctaagaaggatggattctgacttatttggtgggactctcctgtgacatttcttgtggtttgggagagtggaccactgataccagagcagtcttaagaaagatgctcacatgggaaaggggtctcagcagtgtcaaatgatgacatcaaagctgagggcttcgaccccaaggtagcaccgatagtgacagtgcccagaacattatcaggttgcaccaactggcacctcacaacaacaaggctaggatgcgacactgctcttaatagctccggttttcagatggggcagtggaggcacagggcggagaagcacctgctctaagttacacagctagcaagggcttcagactcagggaatgtgccaggccctgtgcacatttggtcctgttcagtcccaccacagccctgcaggttgcttctagcatcacttttcttgacgagaagcaaagagggtctgcccccatttcgcaaatttatcagtggccaggtaggattcagatctgggtctctctcaggcttcttcacaacagaacaggcacaaataagaggtttttttttgttgttgttgttgttgttctgttttttccttagaagccaaaacccaggttctctgacatttatctgttgctcagtgtttattgtctgcaaacaacagcacaggtgaaggcaatgatgccattggtcacttgtatcttaactcactgtctttaaacctaatgcttttgtctataatttgctgtctagtagtgcccaatacccacaaagcaattctagtacaccctctccttcagtgtgtgggtcaggtgggcccaaagatccatcttctcaaacgctgaggctgagttctggagcaaagttggcacttcagctcgtaaaggctgccgtgggagtagtagactcaggacctaaaacatctccttgttgtcttctataaatatcctgttgcatgactcctaatataatccccgagttatgcacagtaaggtatattatctttctcttactatatttactatgctgacaaaagtgttcaaatattaaaactcacccagggtgaacagttcgggacgtgtgctcagacttgataggtagacagggacggtgccgatgacatgcacccactcggccttggcagctcccagtctcccatgaccgtccctcagtggctgtccagagactccctgagtcccactctcagggcccactttgtcgtcytcatggctgagtcagtgtgggaaatagttatctgcctgcctctccacrctgtgagttctgtgaggggaggaactttgctcaccatgttgttagaatccccagtctagaggagacacctagccagcatctgctgagccggggggtgtcctctggagggagaggggctgtttgtggtgctctcaagcttgaacagcagcagggcagaaggcagacggcccctccrggcctgcctttgccgtctctccttcgccctcactctctcccagctctgctgcttcccacgcccagcccggccccaggtgttcttctcccaccaacccaggatatgtggaagaagaagcgaaccatgcagtggcgacccagttccatttatcccctctgcggtgaaacttagtcactggagaatctccctgtaaagcactttctatggtttctgagccagaaacatggtcatttaataatttaaattgggtattcctaaattgggtcttcttaatgtaaattaaagctatgagatgtgccgaaatctaaaagttaaataacatattttgtttttgaatccatggggaagcaagcattttcctaacactgttggtgagaatgcaaaatggtacaacccctgtgggaataatttggcaatagctagcaaaattacatgtgcatttactctttgtcagggcaattctacttctaggaatttaccccagagatacactggtaaaaacaggaaaagatgcttgtaaagataattcacgrcaacactatgagaaatcgcagaagaattttaaacagcacaaaattcccatccatagggcgctggctgagtcctatacagtggagtactgtgccactgttgaaagaatgaggaagccctggatattgctaaggagtgatggccgggatatgtaattaaatggaaaggcaaaggtggagaaaagtgtccatgctactgttgacaaaagggacaatgtgatatacatgtttgcatgtatcttaaaaatggaaggagaaaccttactttctctctctcttttttggtaaagcagcctatgggaaccaagataggggagagatataaaagctagatttctaaatctaccttgtttgtagatttgactttggaactccatcgctatattataatcattataaaacaaaattaagtaaaaggttatgacccttgaaaattttgatatacactatcaattttttctctaaaaagtttataccctgtttacctcctgtcagtacttgaggagaactctttttcccccacatgtttgtcagtactggatagtcatcttttaaaactttgccaatcccatgggcaaaaaatagattgctattttcatttgcattctctgatgactagagtgattaagcagctttttacttgcttattatccattttgtatttcttctgtgaggaagtccaagctagagcaatcaaacaacaacaaaaaaagaaataaagggtatccaaattggaaaggaagaagtcagattatccttgtttgcagatgatgtgatcttatatttggaaaagcctaaagaccccaccaaaaaaactattaaaactgataaattcagtagagttgcaggatccaaaatcaacatgcaaaactcagtagcatttctgtatgtaccaacagtgcacaatctgcaaaagaaatcaagaaagtaatcccatttacagtagttgcaaataaaataaaatacctaagaattaactgaagaagtgagagatttctacaatgaatactacaaaacattgatgcaagaaatggaagagaacacacaaaaaatggaaagatactccacgttcatggactggaagaatcaacattgtgaaaatgttcgtattacccaaagcagtctacagattcaatgcaattcctattaaaataccaatgacattcttcacagaaatggaaaaaataattctaaaatttatatggatccagaatagccaaaagacccagaatagccaaaattctcctgatgaaaaattggaggaatcacattttctgacttcacattatactacagagctatactaacccaaacggcgtggtactggcataaaaacagacacagaacaatggaacagaatagagagcccagaaataaattcatacatccacagtgaacacatttttgacaaacgtaccaagaacatatactgaggaaaggacagtctcttcaataaatggtgctgggaaaactggttatccatatgcagaagaatgaaactagactcccatttmttgccatatgcaaatatcaaatcaaaatggattaaagactttaagacctcaaactatgaaactgtgaaaacactggggaaactttctaggacgttggactgggcaaaggtttcttgagtaattcccacaagcacaggcaaccaaagcaaaaagtggacaaatggttaaagctcctgcattagcaatgcaggaaaaaagcagtgaaaaaaagctcctgtttttaacaagttaaaaagttcctgcacagcaaaggaaacagtcaacaaagtgaggagacagcctacagaatgggagaaaatatttgcaaactgccaggcgtggtggctcatgcctgtaatcccagcactttgggaggccaaggtgggcggatcacgaggtcaggagatcgtgaccatcctggctaacacggtgaaacctcgtctctattaaaaatacaaaaaattagccaggcgtggttgctcacgcctgtaatcccagcactttgggaggccaaggtgggcggatcatgaggtcaggagattgtgaccctcctggctaacatggtgaaacctcgtctctactaaaaatacaaaaaattagccgggcgtggttgctcacgcctgtaatcccagcactttggaaggccaaggtgggcagatcatgaggtcaggagatcgtgaccatcctggctaacacagtgaaacctcgtctctactaaaaatacaaaaaattagctgggtgtggtggcgggcgcctgtagtcccagctactcgggaggctgaggcaggagaatggcatgaacccaagaggcggagtttgcagtgagcggagattgcgccactgcacaccagcctgggggacagagtgaggctccgtctcaaaaaaacaaaacaaaacaaaacaaaaattgaaaactattcctctgacaagggattataaccagaataaatcgagagctcaaataattcaaaaggggaaaaatctaatcatccagttaaaaaataggaaaagtagacatttctcaaaagaagacatacatatggcaagtaggtatatgaaaaagtgctcaatatcattgatcatcagagaaatgcaaataaaaattacaatgagataatgtcttaccccagttacaatgacttttatccaaaagacaggcaataacaaatgctggcgaggatgtggagaaaagggaaccgtacactgctggtaggattgtaaattagcacagccaccatggagaacagtttggaggttcctcaaaaaagtcaaaatacaattaccgtgtgatccagcaatcccactgctaggtatataccaaagagaaaggaaatcagtgtatcgaagagatgtctgcactcatgtgattatagcagcactattcacaatagccaagatttggaagcaacctaagtgttcatcaacagacacatggataaagaaaatgtacatatacacatggagtactatttagccatgaaaaagaatgagatcctgtcatttgccacaacatggatggaacaggaggacccttaatgttaagtgaagtaagccaagcacagaaagacaaacttcacatgttcttatttgtgggagctaataaaaaaaaaaagaaaacagttgaactaatggagataggcagtagattgatggttaccagaggctgggaagggtagtggggctggggggatggttaataggtacaaaaatgtagttagaataaacgagatctagtatttgatagcacaacggggtgacaacagttaataatttgctgtacatttaaaaataactcagagtatacttggattgtttataacacagagaaaggataaatccttgaggcaatggataccccatttactctgtgattattctgtgcctgtattagagtgtctcatatgccccataaatacatatacctaccatgtacccacaaaaaaaattaaaaagaacgttgatgtatttcttttgtgaaatgcaagttcatagccttttttatatcaggaagattttttttctactgattgataagaaccctttatatattatggatatcattttcatttgttgattattaccaggtcacagctttatttccagtcaagttgttcaggtcctgcatagtctgatattgaggttttctacaagaacatttatatgtgatacatgctcatggtattccagacttacagctgagcagacttccctcaactgttcaaatgctggccatcactgtgggctccctgaagcagtagcaactgtgtcttccactgttcggaaaacaacagttgttacttctttttttatttccttagggtttactactgtgtctaagtagcaagcaattataaatgtccacttaaattgattgctgatgaatatataaaaactaaatttcactgtctttttggtttgagatcattcttatttttaatttttagtgatccttgataaccatttttgttttcggttcagtgtgaatacctgaatgaaatagtaatttttatgtctgtgtgaggtcggttttaagaaagcgttcatagctatcagcacttgccttttgttcatggatctgttgaacctgtttctttctctaggtcataactccatgcaggaagctcatcttgtgtgctgataacagaaaagaaatggaagattggattgcagcattaaagactgtgcagaacagggagcactttgaggttaaaaaagaaaatacccttctccaaatgcctcctgttgcctccctcaccccagtgtctgctgtctgagtgtctcccacgtgcggacccacagtctggagctcacgttcttagcatgttctttatacaattaaagcttattgcttgtcctctcagcagacytgtcctttataaaccttcctcctctcctctcttggatactttgtttaatcttgtccaagttactgcatttaacaatttaaaagagaagtcttatcttygccctcttggtttcgttcttccagcccacccagtacagcatggaccacttctcagggatgcacaattggtacgcctgttcccacgcgaggccgacctactgcaatgtgtgccgtgaggctctgtctggggtcacgtcgcacgggctgtcctgcgagggtacggatgtscgtttgttattctgtcaggaaaggtggcctggcattttacttgataaagccttggaaatccaaacccagtcaccataaataagccrttgtcacccatgtggtcagtcaagggcacagcgatttctgtgatgccattcttgtttattttacctgccgaagagtccttgataaatcattttttatagtgctcagagtgaaaagggaagtggtgggtggcaaaaggagaaatgggaaatctagagcacacagagggaaaggcactgaaggaacagtggtcggcccctgtgtctcacactctgcagccggggaaacggggctgtgcatatatggactgaaagtgtgttacagacttagaggtcagggctgcagggtttgggcaagggcattcagtctggtggcaaagcagtgggctagagcagggcttgttagctatagcctggaccacaccctgcctctgcctgtttttgtacagctcccacgcttcagactggcttttaaatttttaaatgattggaaaaaatcaaaagaagaatcatattttgtgacacatgaaaattacatgaaattcaaatttgtgcccgtaaaaaaacattgtctctggctgcttttgtgctacatgacagagttgattagtggtgacggaagctggttgcgacctgcagagtctccactgctcactctctggcctgttacagaaagcttactgatccccagctttccctgccgctgccggtcccaccgccatcagcctctaagcgtatcacagtagttcacttataaaatgggagtgccattggttccttccttgacttttctggagctggacggttctcacaacactgctcagcatgggaagctcttggcacagacacagcttgtaggctcatgtgccccttctctcacagtgtgcaaatttaaggcccacaagcgctgtgctgtgcgtgcaaccaataactgcaagtggaccacactggcctcgatcgggaaggacatcattgaagatgcagatggggtatgttaagaaataccacctgtggggccctgagccagggtcccccacctgcacggccccatgcaagcctcctccctgccctccctgccactgtttcatttgagatggtcacactggcattgggtggcacagtggaaattatatgcggtctccgtgtggttgtcgcacccccgagctccatcctgtccctgtgagtcttgtttgcacctccgacaggtgctatgggtagatggtacttcacaggccctgccatcccttccctcactggccatcagggaaggagcttgttctgggaagaatgccttggctgagttcacaacgagcatttcctggctgccctggacgtggaaccttgggagcgtccctagtgcgtgcctctgtttggttgcagattgcaatgccccaccagtggttggaaggaaacctacctgtgagcgccaagtgcactgtgtgcgacaagacctgtggcagtgtgctgcgcctgcaggactggcgctgcctctggtgcaaggccatggtgagtgtgggccctgcgcccgggctggaggggagggcttgctccctaccgtgcccatgcgggccttgcggctccgcatgatctgctggatcctggtaaattaatcccagagrcccctccggctgagagtgggtttttgaactgttgggtcattctccttcttagctatgttttggggtatttcttccttttgcatttattcctgtctttagacatatgcagatgtgtattgttatgacrgatgtcaccctgcatcatgcggcactgtagccgggttgtgaggggtcacctgggacaattgagctggccgcctctgtggtgtggaagcaggaaagctgtagaggccatttggagcggcgttggctctgggcagtgttgacagtgagcacagccatgtggaaggggtgcagcccagtggcctcctgccaggtcctgggtctcatcgttgctctgggtggtgagatgtgcttccagggagagactcagggagcctccatgtacttgcttctgggttggtcattgtgaagtggctgctgcagtcacttgcctagcacatctggctgccaggaggaagccaagacacaggggacacatagaggcacatggccccaggagccctcaccctcgtcctgaaagtttgaggtagctgtggtcgaagggccagaaggttgggtacaggactgtagctcacacggtgtgaagcatgactggctcctgccgggtatttccgtgttatgccttctcaagtgcaaagccagggcccagggcccccgatgatagcaggccggcccagggcccctgatggtagcaggccagcccagctctgaaatcacctgcctcccccgaggccagctcatcagctacagggcaggaggatttctggtgtgtgtgaaggatgccagtgacccttggtgacgcggggactcttgtttcaggttcacacatcgtgtaaagaatccttgctgaccaagtgcccacttggcctgtgcaaagtgtcagtcatcccacccacggctctcaacagcatcgactccgatggtgggtaccacacatgcttatccttctcatgcacgcccacacgcttccttctccacgcactttctcttctccagctctggagttggttatcttggtgagatgtcagcaagaggtcaggcacagctgttgggggtgctggaggagttgcacagagcggcacacggcgccctgatgctgcggcattgcccttagatgggccagagacccaagcctggcacttgacgtggaggtgatgctgttgagtggcacccaggcttagacaggcctgagacccgagcctggcacttgacgtggaggtgatgctgttgagtgcaacccaggtctggggccttctccgtcatgagccattgaagctgtgccccatctctgcctagcacatgctggcacactggcttgcagctgctctcatgtctggctgggacatggtggcacctgttgacaagtactggtggaaagggggatgtggggtacatggctcagaggagatcaagaagagaagacagcagaaaggtggcatttggacagcttgtgaatrtggaggtcagatggatggggctcccggcctcacacatggagaccggctgtggggaactgttcactgacctcctcctgacttacaggtgtgcatgtgtcaggtgtgtgtcctttgggggggtctgctgctgctgattccatcagtggtgccctcagcgtcttccgtggcctatatattttcttctgttcgttcttgcgtccagggttctggaaggccagctgtcctccttcttgcacaagcccactgttggtcttcgtcaattcaaaaagtggggacaaccagggtgtgaagttcctcagaagattcaaacagctactaaaccccgcccaggtcttcgacctcatgaacggaggcccacacctcgggtaggaagcttgtaaaatrtatctttcttggagttttaaaaattgtgtagatagtgtgtgcttgttaaaaaaaaaaagttcaaagacacaaagctttaaataggaaagaaaagttgaactgcttccttcccaaattgcacttgcagaggtgcccactcttaatagaggtgcatggccttccaactttgaacacagtgcgcgtgtgcacacacgtacatacatccatgtacacacacccatgcacgtgcatcttttgagccaatcaggattcttctttacctgccgttgcacaaatgccttctgtatgtgtctgcatacaacgttgtgggtgtattttctttcattttataattttttatttatctgtctatctatcatctatctatctatctatctatctatctatctatctatctatctatctatctatctatctgtgggtgtattttcctggcgtgcctcgttctttgtaacagctgcctaacattgaggaagaagctgtcctgcagcgaggccaggaggagtgtttgctgagaggcacaggaggccgctcggtgtgcaggtgctgcaaggcaggaacacgtaagggcggcgttgggccagagcgatttccactgtgcatcagcagcacagagattagactgttcctctgcttgctggagagccatgtgtgttctttgtagttttttacttttcataagtttgtagaaaacatttgcctttgtgaattttgccatttgaatgaatttcttcctctggaagcatcagttccaggtcggagctctaagaggacttgctggcactgccggagatgtccaggatacccgtagtgggaagtgmctgcagagcctgtggtctggcctgtatttctctgggaggagtcagtggggtctgtgtattaggagccaggggctactctgatgtgaacctcggccagctccctgcgtgtccttggcgtacatgccagggtaagaggaacatgctgctcgtcgttggtcctgtgggtgtcttctgtgttgctcatccccactcacagccaggcgcagtcggagagcagtcacagatggcagcattccagcctgcttccgcaaaggcagtactcccacattttctgtagaaagacttcttatctgaatggtggaggattgcattcactagtaggctgatcaagatattttaattttaattttactgttttttgagacaagagtcttgctaggttacccaggctgagtacactggtgcaatcctggctcacagcagcctcaacctcctgggctcaaaccaccctcctgccttagcctcctgagtagctgggactacaggtgtgtaccactatgcccagctaattttttttttttatgttttgttgagcctcacaaaacttttaaaatgttttgtagagtggtctcactgtgttgtccaggttggtttcaaactcctggagccaaatgatcctcttgcctcagcctctcaagagtgttggattacactgcctggcaaagaaataattttagttaaaaagtggggaaagtggagatataatacgtctgttatcacaatgcaccaagcaggctgaggttgttattaaacatggtaccaggggtgttggaggaatgctgtgaaatggctgtgggcagggcaggttacacagctgaactcgagaataacgaaatattcattttggtgtgcaagcaaaaccccatgtttcgtagtgggagttaagtatgagatgggatgatttaggaagcccccacagcggcgtaaggggagttgagtcgtcatttaccatttctggaagcagctcatctcacacagctcacagcagaatctggagctactgcttcatgttccagttcctggccttgacctgtcacctcttctcccgagagcagggggccttacaggtgtcagtgttctgtgtggagcctgggcttggtgccgcatcacctatgcctgtctgtcttctgagcactcattctgggtcagacactgagctcgaggcagggtgcgcaggtgagccaggcggggagtgcagatgcagggaatgggtaggagcacacgcagggtcccccggcacttcagtgggggtgacacagcttctctgggaacccggtgggggcagggtcgcaagtcaaactgggcgtccttccacgtctccccgagctggcatccgaggagctctagtgttctgaaggctgcagggaggcgggaggcttctgggctgagggcaccgcttgtgcagaggcgaggcaagagggaatgcagtggggccaggccaggcagcagcagaaaggtggcacctgccgtcagggagggctgcgggtgctggccaagaggttcgactccttcctgcaaatgaggggcagcctcataaagcaaggcccgtggccaggctcgtgttttagaaaggtcttcctggaactcatggggagctttcaggaagggtgtcaaggtgactgaggctcctgtgggactctgcgagagcacggtggtgacctgagcgggtggctgggttgggtgtggaggagaggctgccaggaggggctgggtcggctgcaggctgagaggaggtgggtctggcctctggactgggttggtggtcgagctaccattctccgagtagggatgtgtcctgttggatgtgccctgggataccagagtggtgtgttctggaggacaggtgcaagtgttggctttcaggagtggcctgggggctgttgatccagagtcacctgtgtggtccttgaaactggatgtggtcacacaggaagaggatgaggagtgagcagaagcggcactggtctcctgagtggggacgctgctgggcaggggcagggggagcccaggaaggaaggaaaccgaggagttaggagggtaggaggcgtgggtcacatcaccggaggactgagtgggcccaggcatatgtgctgcagtggggacacgcagcccgcagcaggtcaggcagcctggggctccagggtgaccagaacaagggccagggcggaagccagactgtggcccagggccggggagtgccaagactgagggtgcagggtgatgcaggcagcccagagggcatgctgggaaggctggcaggggccacatgtggatggggcagggacagtgacgcagggtgggctcacatggttaggggccacggcaggctgtgcccgtgagcctggcaggggatgcagttttggcccaccactttgcctgtgatgtctgcagagsgtgcagtggctcaccaagctgagtggtcttgtcgctgggtggggcgtggctggtgggagcagttggctggaccccagtgctgctgtcgtccctttgacaaagtggaccctgagtggaggcggctggtgtcacgtggcagggcctgtgcgtgctctgcctctggtgcaggtcagccatgaggagcacaggtggcccctcagccccgtactgacaagcctgtcatttgtcctgtggaatggatgtcatttcacggcctttctcttttctctgcagcttacggttattccagaagtttgacacattccggattctggtttgtggcggggatggaagtgttggctgggtcctctccgaaatcgacagcctcaaccttcataaacaggtaccaggacaggagggagcccagccaggagcagagagggtgcggaggttagagggaaatcatgcagtctcagctcctgttcatctcggagcacctgttctcaggccagaaaccattggtggttttggggagtgtgcagtttggtggccagggcagagaggggagagcctgggccaccccctggcattgtggaggcccgggggctctggccatgatgtatgagggggacctgaagggagctacgaaaagaattgcccacaaaggacccacatggggagcagggctgggtggggctgttgctttactgggtaatttttgtcttgaggcctcttgcttgtgagaaggggacggcagtatacttgagtttctcaagtcagagtcatggttcattggacttagttttttgtattaaaataaaaatagattttcctgattgtgtataaaaatgttcatatagtcatttaatttccacaccaagccacggcctccccaggtgatcagccagtgccaacattttgctgtctctgacctctcttgatcacagtacatacaatgcacagtgcacttgtaatttaaacgggctattctgttactgcttttgttgttgttgtttttgtttttgtttttttgaggtggagtcttgctctgttgctgggctggagtgcagtggtgcgatctcggctcactacaacctctgcctccccggttcaagtgattctcctgcctcagcctcctaaatagctgggattacaggcgcacgctaccacgcccagctaatttttgtatttttagtagagacagggtttctccatgttggccaggatggtctcgatctcttgacctcatgatccgcccaccttggcctcccaaagtgctgggattacaggcatgagccaccgcgcccggcctgttactgcttttaaaaaaccactaattaagatgttgcagacaccttgtgcctgtgtctgtaagtaggcatctgtgtgtcgttttccactggacacacccgggagcccagggccagctcacctccatgtgtgagcacggagatcacttcccagtggtctcctctctgagcgcacccaagcttaagtattgaaatgtgctgacaaactgcctttcctcagggctgtgccagcttccatgcctgatgcctttaaagctgtctttccccgtgcaccatccaagctgttcatctctttagtttttgtccagctaagtagaccaaaaaatgtctgacctttacttctttaattcctggtgaagttgaacgcctcctcagttggttatgaagttttaaataaatcacctgttcatatttttttttgcctcattttctctttgagtattcacctttttttcctttaaaaatgggtgtgtgaggattattgttacattaacttcttatctgtcactgcagatatttttttcccggtttgtcgtttgtcagttcaacatcctttttggggggtggtcttttctttcatgatttttgtcaacgtctgtcatatttgcagctgcctacaccccaagattaagatttgcatctgtattttcttatgtttattatggccccatttttaaaaaattcagtcttctgtgtgacgtggatgtatttttcagtgattctgtggtgcctacccagctctgctcacttggtagtatttccaggtgggtggatttgacagctcgggccgtgaggccagtggctcaggaggagaagtggtgccgcctgctggtggattagcatagactactctaatttttgattttgtgtattacttgcaagttcactgtcactagttaggaagacagtggaaccttgtggctgattttcatacgttcagccaaggtcagcacacatttctctcccctgcgtctctttgacacctgatgtggtggccatgccttcgctgggcccctgccgcctcggggtttcttgtcttcctggctgctactgctccatggtggcctctccctccttacccttcccttaacgctgtgtcctcagagccttgctggggcctctcctccttcgcttttgaacgctcagcgacttgcagggcttctgctgtcgtctctctcctgggggcgcctcaattgatagctgagccttgggcctctctggatgtctcctagtgcctcgagtttccaacactacaccacgttcagcccccaccctgcgttcctttccttcgagtctgaaaacatcatccatctagatgtctgagccaggaaatcggacagttgttcttggttcgtccgtctcttcctcctgcctgtttctcactaattgtgtcctcagtcctgccacccacagtaccctggcctctgtccatctgcagctcacccaggcgacctttcccggggcatttctgcctgtgcaccccccaagcacgatgcttctgggaaaagtccagacctttaagagtcccagctttgcctcctgcttgcttctctgcctgtctgcctcctgtttcctcgctgtcctcctcttcactgagctctgccttgccccctcccagtggtgtctccctgcctggagcaccatccatgcctgctgtgcgctgctctccttttcctttaaggctccaggaagccctcgcggagtcctcagaccctctgggcacccttcagcactgggttctctccatctagtgtgtcggctccggtgtcctggcctgctcgctcctgcctcccctactgccaaatgtccccttggtgaggcaggaccttccctggtgtttgctgtccccacaggcggcagggcctcaagcatggtcacctccacctggtgggcagagggctgtacggtgctgtaggctggaccacggcaggtttcctgcctcaaggacagtaacgcctccccacacactccaccgcaggccttcatggccctggtcactctgttgtcagagtcaaaggctggtgagctctgggcagtgggcattttaagaggcctcctaagcaatggaatggtgtagtgggatctcattggagctctgaaatgggaatccaggtggagggtgaggcctgagtaatgcatgaggtctcttcctggaacagcaggcaggcgggcagaggctgagctctggcaaggctccagggtagcctccagactgaggatggtcctggcaccttttttggataggatttagaggagagaagtgatactagtgatgtttttggaagaagaatttggcattagtgagtgagatgctgtagtggatggagggacgggtggcgaggcatcagagtgattccttggggctgtggtcacggtggtgaaaatgggaagcagagggatttgggagacagatcagagagggtgtgaggggctgaccatcaagatgtgatgacagctgagagatggacctgtggctcatccatttctcccagaagcagcatcttatctcaagggcagtcatgtttctgtctcattgccaaggaaaatgccatctgtcccctccagtgggctctgcctgtaatgtgtaagctgcgtggttttaggtcacgtccccacattgctaacgtaaccctcacggtgggggacaaggagggctgcgggctgggaagtggcccctgcccccaggtgtttgcctgcncatcgtcccccatgtttccttagtgtcagctgggagtgctgccgctcggcacagggaacgacttggcccgagtaytgggctggggctcagcctgcgatgacgacacccagctcccccagatcttggagaagttggagagagccagcaccaagatgctggacaggtgagtggggatgtgctccggtgccgtatgaggagactttgagagacaggtccctttgaccaggtgttcttaacctggggtctgtggaaaacatgggccctctgaaattatttgtaaagatttgacctgagtatatattcggatagtctttgatatttggtcagattatgacaaggataaaaacaaaacaggttaagaaccagccatgccctaggatgatccagtcttcccagaaggccaagcctgagtgtgtcagggccgtggagaaggcagctgtgccatctttggctgcttcagcccgagatctaatacccatcggaagaatgctccttgtcgtttacttgaacagtttcattttctcatattctgttcccagaagaagttttgggaaattatcctctagtgcctaaagccactgtgacaccttccctgagtaaggtactgttgtcccgagtgacacacttggcactcactgaccacatgcctgtggcacatggggtgctgatgagatgcctcctagccttcctagttgctcccagaagcctggagttctgagcacagttgtggttttgcaatgcccccaccatttcaggcctcctctgtgtgccttggggcctgtgaaatgctcatctcactgggccagctggctgagccatttgcagctctcttgaggagggtaaatccatttctcccagaagcagcatcttatctcaaggtagccatttatgggagaccttcctctctttatggagctgtactgccgttagttgtggagtgcagacatttgttctcagccaagttatgggacagagtcaagaccaagggcctaaaaatgaagtcagaaacggtgtaaagatcaaggctgccagccgtgaaagcggacggcgcagggttcacccttgtgggcctgcacgtcttgccgcctgtgcagctgaccttgtgtgtgcaggtggagcgtcatggcatacgaggccaagctcccccggcaggcctcctcctctaccgtcaccgaagacttcagcgaggattccgaggtattgctggcctgttcttcacaccctgctcgcatgctgatgtgatcagaactgtcctgtcagcggtttgcatcacctcccttgcagagacgcctcccctttggtgttggggtgtcacagtcaggcctgcggaggcgcagggtgaacccatggctgagaggattctcactccccttggcaggggccttttgggctttgtgaccctctaggggcttcctggggttgtcataggccctgccgggtggtggggtggtcctcctaatggcctttccaccctgtccgtgcatctcctcagctgcgcagtgagccccaaacggtgcgcgcccgttccctcccccgccgcggtgcccacgtgcctggaatgctctagccggctctgccgcggctctcccctagcccccggctcctgccccgtcccacctctctgtggcgtctgcagctgcccttcgctcagsctcctctagtccagctggtggttcttttcatttggtgattgttactgttgtgtttaacgctcctacagtttccctcagagaacagactttgtctttagtttctattttgtgctggtgcagtgctgggtggggtagtacaaagaggtgagcttttgtcaggggctagggcaacggtcagcaaacaaggcctgcaggccagatgtgcctgggcccacggccttgcaagcgaagactggtttgtacattttttatttttcctttttttaaaaaaaaattttttttttgagaggaagagtgtgtgggggaagcccagaatattcgctgtctggccagtagtgaagtttgcgaccctggggctgggtcctaaggacagcagggatcccacagggatagggctgcccttctgacagccagaacagatggtgggggcaggagtgtgtgtccagatggggctcacagccaggtggaaacagcctctgctgcaaacggacccaaacctggagccgacccgccagcatgccgctgtcaggatgagtaggggtcaggacggaagctcctagcacaggccgtgctgggatcgcagactgaaggagattcatttgcagtttgcctgcagcttgacgaagcttttaaaatctctcacctagcactaggtgagtcccagattagcgttagaagtgagttgaggcttggctgggtcagacagtgtctgttaggagagactyatctttcccagcttgtgctggcaaggaagtggctgacagagtcactgggactgtcatggagcttgctgtcacagagaccaacagtcctggccatttggggtgattgcaggtacagcagattctcttctatgaagactcggttgcagcccacctttctaaaatcctcacctcggaccagcactcrgtggtcatctcctcggccaagtgagtgcctggtggccctggggagggcatggtgccctggcccccagcctggagctgcctctctagaagggtctttctgtttttctccccacagagtgctctgtgagacggtgaaggacttcgtggcacgggtggggaaggcctatgagaagacgaccgagagctcggaggagtcagaggtcatggccaagaaggtctgttcccgtgccctgggtgggaggggcattgaggcagcgagaagcttgctctgtcaccagcagagggccgtgactgcaggttgtccaggttcttggtgatttgaacaaagaattagacaaaacgcacagtaaaggaagacaagaatgaagcaacaaagaacgaaggcagggatttattgaaaatgaaagtacactccacactgtgggagctgcccgagcagcggctcaagggtccagacacagaatcttcttgggtccaaataccccctagaagtatcccattggccacttcatgctcacctcatgtaaatgaagtggtagcttgcattcagtctgattggtggcagaaagcagccaaccagaggctgaagtggttacaaaggtcacactcctgtgcaaacatctgattggttgcaaaaagcaaccaatcagaggctaaggtgaagttacaaagttgcatttctatgcagactaagactcagctcgcaatcagtatggttggttgtggacagccaatttccccaatttcccacctgccagggcgggaaaggtggggatttgcaaagggagtagcctctggtctttttgttacttaggcgtggagagttaggattttccttttgatcgagttctaggaagtctgggtgaaatggcctgaggttccctgcctgcagaccctgttctmctgcctcagctctgcatgccatttcctttccttgttcagtgctctgtcctgaaagagaagctggattcccttctcaagaccttggacgatgagtcccaggcctcgtcctctctgcccaacccgcccccsaccattgccgaggaggctgaagatggagatgggtcgggcagcatctgcggttccaccggagaccgcttggtggcatcagcttgcccggcccggccgcagatattccggcctcgagaacagctcatgctgagagccaacagcctgaagaaagcaattcgtcagatcatagaacacacagaaaaaggtaactggccttgtgatgaggaggggctttcctcaggccagcactgggcatgcccakcgtcccctgaacayggagatgacagaagggtgcatgttgagaaaacctccactgcggccctctccacccatgtccaggcaccagacccccaacgagttcgcttgccctccttccacccctcctctcacaccctcagaccccttcatgctgcctcccctcgacctctttcctggccctcattgacttcactataagcgtctcactccygtgagagccttgaggtcacggcctcacacccgcacacctgcgtgtccatgcagccgctcctcccgcttgcagccctccagcctgcgccaggctcctctgcatcccttgccttcccctgcaagggttccagacctcccagcctgttagcagggacgccctgccccagtgccaggaccagggggaagatgggtgggggtggggtttcggagtccaagcctttagccagaggttgtttgaggaagatcaggccgtggggtgaggatgaggggccctccacccagcctgacagcgcccttggctttgcacccgcgtgctcagccgcacacackctccttgcacagctgtcgatgagcagaatgcccagacccaggagcaggagggcttcgtcctgggcctctctgagtcagaggagaagatggaccacagagtgtgcccaccactgtcccacagcgagagcttcggggtccccaaggggaggagccagcgcaaaggtacttgtgcctccacctccctctgcrcaccgtcgtgtgcttggttttggtgagacgtagcgggcttgccaggggaggttttagggcactttctcatagttgctttggccacttggttacataaaaattgagcgcccaaggcctgtttctgtgcatctcctgtgcgcgcccttgaggtgggtgtgtgcggtctgtcttggtggacagcagtagaacccgcgagaccccctccatcagggcgaggactgcctccctgaggagcacttgcgtcctgccctcactgcttccttggaaccacactgggccccagaactgctcagaaggggctgtgtctggcagagggaaggcgggtgggtgagsgtgggccttctttgtccttgcccctcctggaacagcccacagcgcaggccctggtggagggcacccccagcctgtgcaggctgctgggaggcccatgctcagaactgacccatggccactgcatggccaccactgagagctctgctgtgtgtgtgctccgcctcccacagcccggactgactgggctcacccctccctccagcgctgccacctgtggcctgtgttaacctctccatgrgcccagccccccaaacatgtgcayccactcggtcctccgcccccttctttgtcccacacacttcacgcaactgcctgtggtttgcagccctccctcctcagccctcccacctgctcgtgtcgctaaggaccccccaggatttcacagtctctattccacacagctgtaaggttttctgctgtgttgttacagtgtcgaaatctccgtgtgaaaagctgatcagcaaagggagtctgtccctaggcagttctgcttcccttccgccccagccgggaagccgggacggcctgcctgcgctcaacaccaagatcctgtacccaagtgagtggcggccagcaggagggactggtgggggccctagcacaacactggtcccgtcaaactgaaagagatgggctcgctgccctcggagagtttacaggcccctgagaaagataggtggaattgaaaaatttacacgactgtatgaaaagtgctttttttttttttttaaaaacaaaaaacaaaaaacaaaagccagatagtacccaaataaccacccaaggagcccaggaggcgccattgaggaggtgatgctcgagtcggggttggaagaattaaggaattatctgagtggaaaagggaggtggccggcctgatgagggaacccgagggaccatcccgtgcttctagcgtggtcgcaggaggcgcagggagggtgaggtcctggccgcctggagcattccttgatattcattccttaggaaggcagccttataaagccttaagcctcaactctcagagatcattttggtggagtggcttacatttaatgagaacatgaaaactgactctataagcctttttttttttttttaaaagagggtctctctctattgcccaggctggagtgcagtgatgtggtcatggcacactgcagcttgacctcctggactcaagtgatcctccccactcagcctcccaaatatctgggaccacaggcacacaccttagaagccatttttttgtgtgttttgtaggtgttggtttctgccacccagtatggtttctttgttccagtgatttttgacctaagactattggcaaaatttggacatggttatacataattttagaaacatttaattataataacgttctgcagaataccggtccaccagcttcagagacacgagcttctcctaaggctgtagctcctgaccagcaccacctctttcttgtatctcctttacagatgtccgggctggaatgtctggttccttacccggtggctcagtcatcagtcgcctgttaattaatgctgatcccttcaactctgaaccagaaaccctgtgagtatgagggataaaccgagtgggcatattgttacatggctgctagtgcatagaaaacagatctcaggattaactagagaaattagtgagcagttgcccagctggtggtagctgataaggaaggctgagaagtcgtggagattccacttaaggagtggagctggaaaccactactgcacatctgctgcagaggcaaagcgcacgcctcccatctccttcccaaggtcccacggtgcttgcttgacgtcccctgagcctgcatgcccttctgaggcttttcacaggctcagctactcctgccaggagctgcccttgtgctgctcttcgtggtcactctcccatgatcttggctggacctcactgacttctgcttacagcctgccatcttcctcttgccatcccttccctctgctttcctctaacacctgctctccttgttggtgatgcagaaccacagactctgagctggagggtcctctgtgtgtctcccttgtgtctccgagcaccttagggagacactagcctgtgctgaggcttataagggctgctgcgtgcctgcgtgctgatactgctactccttgggggacaaggccttcttcctctgctggcctgtaaggcagtgaggacatgtatatagcagtttaatgcagtcttcctaggtattggagtccattttggagacaagtggtgttttgaaaacctgtttttctgcactcatctttatgctggctgattgcaggttctgggcagctggtggcagttggttaaatgtggccagccatttttctggagtggtgacggacagtgacaggaagaaatgtgcggttcacagaggctcygggtttgggaaagtggacccctagattccaggtgctggcctggtacagcacttcagtgtccctgttcctggcctggtctactcctcccctggggctgcgtggggctccagttctcagccctcctgaggcttttttccttggggaggccagagctgtagtcctatagtgagcactgtccctagaggcccctgaactggatatctcctttgtctccttcatctgagactggaacttccacttctgttgctcagctgggtggtctcatctcttcttttcacctggggagacaaagctgtgctttgctgccttcctgctgtggtgtgtgcctgggccgtattgtgtgggccccattgtagctgggcctgagcagcccctggtaccctgtcctctcccactgccccagccactgccgcccctcctgctccaggcccctgagcccagtctctgctgccttccctcatctctttgtcctgtttctctccgttggatctctctcttttcccaggacctatacatgctggccaggcacttggtcttccccctggtaaacagttttgtcccagagctttgctctggctcagctgtcgggcacttgaattagatggatcataaatacactgacacatgctggttgttctcagatctggcggcactggctcagtaagctaaagtgtgtcagaattctggcccgagcaatgttcccaagcccatccacccattgagtttctttgggaacttccagaacatcctcttctcctggctgcagcctctgggtggaggaacaggggttcctcccttcatccacttgccctcggggggaaaccccagtgtgaccctggggttggggagggtgaaggccaggctgggctttcccagcagctgggggagctgcaggagcaggacttccagctgggtggggagaagaaacttgaatgagtctcttctcgtctgtcgcacacggggaaaaggaagccttgtgctgtggggctgggatggatgttttcaagtcattttcctttttaatttggcaacagctttgcttgtaactagggatgtttgagaaatgttttgagatccagagttgaaatgtgtgagtttctgtgccataaacatatcttcaggtttggtgctgctggtggagtgtaagatgggcagctgctgtggggaatagtccagcagctctgccggaggttcagcccagagctgctgtgtgaccagcaggcgcagaactgccgggccatgtgggattgaactgaaaacatgtccacgctagaagctgtatgcaaatgttcctaaatgataaccaaaacgtggaacatcccagtgtccgtctgctgatgagcaggtcaatagatgcaggttagccacgcagtggagtattatttggtaataaaaatgaagcgctaacacatgttataacatggatgaactttgaaaacatcgtcctgaggaagagaaaggagccagacacagagcccacgaccgcatgatcccattcctgtgaactgcctagaagaggcgcctccgtggaggtggaaagtagacgagaggcgccagggatggtgaggatggagagttagttgctgatggcaggagtacaggctttctctttagggggatgaaatgctctaaaatcgattatctagtgatggttaaatgactctgaatatactaaaaataattgaattgtacattttaaattggtaaattatctagtgtatatcttaataaatctcttagcagacaaaaaagaaaaagttaccagttttccccaaggaagagaaatgctgagaggttgggagtctgaaataagactgctcagcagggctgttgtaattgatttaaaactcacctttgcagagagtattacacggagaaatgtgtcatgaacaactattttggcattggcctggatgcgaagatatccctggactttaacaacaagcgcgatgagcacccagagaagtgcaggtaggtaacrggctcaggagcacgtctgtcttttgcgtctttgtggcttctccttccagacagtagcagatttctggagtcagcaggttaaagaacgtgcagaatgctaaggcggggggcagaaatggagcccagatcgccttgtcagaagcacgggtgctttcagagatggaagggaagcacctctcgggctggccaggtcaagggaaattcaacatcggaaaaccagtgatggtggtcattggaatggcggcatctcttaatgagagccccaagtccgtgatactacagaaaagcggcaggtgtgccaagaagctattgcacctattgcgtaagtgcccagcattgtttgtgggagggtctgtgtgttcatcaccaccctagctggccctcccccatcacacccgagcctgcccacaaggcccttgagtccaacctctgcaggaagacgggagcgtgggagccccaaggggcatcactgggggtttcagtttttttcctctaaaattactggatactcagtcctgrcctgaagagaggatggagaaaaatgagaagggtccctcttctcaagcttttcttcctgggctgatgtagaattctctcttgtctgtgaaacacaagaagtgagggagaaatgtctccctccccaccccacagtaataatcagagaggccattcagctttgacatgattagaactacagagagggagaaawgagtgtgggggttgacggtgtttgtgcagagaacagcccttgacccagaagctgggagacccttgctggagtcttcgtccgctgagtcaggatgggcttgaatgaaccaarccacgtggccccctgtggcctcgccctcctcatggcgtcactgccaccttgcggggagccatgctgacacctgagggkccagctttagtcattgctcaggttacatgtagttgaaaatttctaggaaaacaaaagcatcagaactgaaagaacttttgactctgaggctcttccatgcaggagaaaatggctcaggggccccagggacatatccctgtacagcacaggatggtaacgtcagatcatttaaaaatccctgttagtccaaaaatcactgggaaaagtattaaaatacacatactttagcagggtaaaataagtagttgaggaacaggggcatgcataatacatttctagagctttggaaccctggtcaaacctctcttgagtttgtattgagagctttgaaaagttctcctgagaaaaattccacttgtacaaatgtcattggaaatttctgcagaagtcattggaaatgttggttgacgtaggtacgaagggactcctagcgtgtcatttccagagctcaggcatggggcggaggagtgtaatcaaggggattggttcgataagctgtggtagagcagtgcccggctgaggatggccacatctgcagagagcgtgtggccacagaaggaagcattgccggcgcagggtaaagtggaccaagtaggtcgtgaaactgtaaacaagttactgcaactggaaattaatatgcaaagaagactgaggaaatacatagcagcacttggcatttgtcattagcacgtgtggagggtgcctacaggtgctggattatgcatggaggattatgaggagtgtcttctccttggtgcttttctatattttccagtttttctatggtaagcataattttttagccagaaaaaatcaggatgtgtagaagtttttttatagggttctataatgttttaactttatgtatttacctttcagggtatgattactttcttggcaaaatgttactattgagcaaaatttcctattggtaaacgtatctttttatgcatatctgcaaaaacaaaaatgtgtccttcagatgttactgctgtaaataattgctaaatgtagctgatttgtgggtcagatgctgttcccagctttcacagaaatgactctggttaactrtacgaagaaagcccagacctatggcaagtctttgcttctgtttctaggagccgaaccaagaacatgatgtggtatggagttcttggaaccaaagagttgctgcacagaacctacaagaacctggagcaaaaggtcttgctggaggtgagtgggagggtccttgtcacctgcaggctggcctccatccatcagcagactgccaggcctattgcttctcctgttgaccatttcctccatgcacagggacttgcctggggatgcccyggccacggctgtgctcctgagcccctggyggtgggaagctggtagagaaggaggggctgactcatacctttctcttttcttttgttctgtgtctctgctgctcagtgtgacgggcgacccatcccactccccagtcttcagggaattgctgtccttaacattcccagctatgccggaggaaccaacttctgggggggtaccaaggaagatgatgtatgtatggggtgtgagcgggtgggcctgagctcagtggggaagagctgtctgagagcaggggggtgttctgctgtggctggggtggatccagctcttctgttgtgccagcagtggggttgccgtggagaacaagatagacagggtcccccacccagctcatcgtctagagggctgagcagagcagttgtgtcagtgaaggtggtcagtgagggtctgtggtcagcagatgtggtcagcgggtgtgacgtggaaggagggtcagggaaggtgtctgggaggccaagacctgaaggatgagttggagttggctaagttaggtgggcagaggagagggggaggctgttccaggcagagagaattgcacagatgaaggctcagagtcaagacagggcaggcacatggaggatgggagagaggtgccccgactgcagtgggcagcaggggcgtggagagacaggagagggctgcagggcctgggtcacactgggctgtgtgagctggggaagaagtttggaatttgtgttaagaactgtgggaaggtgttgataggtttaaacctggtttaaaccttcctttgtacgtaatagcgaatagaagtattcagcgcttcctgcacacgtggtgtgtgctggccccagtcctggcactctgcagcgttaactcacttggccctactgatggccctggaggagcgtgccgttagtttccccattttacgcatgaggaaatgggggagagagagattcagtaactttgccgagatgagagctgggatttggtcccaggcagctggtttcagggcctgcaacatgaagcccgtcaggagtgcagttacctggtaacttctcgccagctaggaggggctgacccccagagggagggagtgagggtaggggcggcctgtgctcggggatgtgtggagtggtggtcagctctaacgtgtcccttgcagactttcgcagctccatcattcgatgacaagattctggaggtggtcgccgtgttcggcagcatgcagatggccgtctctcgagtcatcaggctrcagcatcatcggatcgcccaggtagtggccatggtcctggggtgtctggccgagtccccagcccggagtgtgctaaattctggggcagtrcatggagcctgggagggtgggcgctttccagggccatgtggctgcctcatgtcctgtcctggacagctcgtggccccacttcctgggccagagccctttccttgtgctatgcttgacagttaaattctcaagataactctttttaatttttttttttttttttgagacagagtcttgctctgttgcccaggctggagtgcagtggtgcaatctcggcttgctgcaacctccacctccctggttcaagtgattctcccgcctcagccttccgagtagctgggactacaagtgcccaccaccattcccagctaatttttgtacttcaccatgttggccaggctggtctcgaactcctgacctcaaatgatccacccaccttggcctcccaaagtgttgggattacaggtgtgagccactgcacccggccaagataactctttcaaaatgtgtatcctgcttgaaccacagccttgcctgtcccctctgaggtgggatgagatagagcagacccaggctggactctgcccgtgtctgcagctgtcaaagccgcagtggggacggagcccatggctctgatgtggggtgtgggaggatttccagctggggccctcgatcatggttctgaggccgagtggtgaagggctgggggtgcccccatggcttatttctgayagcagcgatgggctgagggcagtctttctgtgaggatggggcaggactctgtacccaggcacaggcactggggcgggggagggtgctgatgacacccactggctgaaccccaccctgcgactgtctggtgtcttccagcactctgtctacccttagctgtaggctgcttgaagttcacaattttcactctttggcaatgtttgttgttgaaaaggaggaacgggatgatgatggatggctcatcgtcatccactgtgccatctgctcttttctaggggtgttttcacgtggcaggggcccagtggcttctgggagctacaacacccctgcccctgggttctgacacctgttgtctcagcaccaaggtctcctgcactgactgctcagtgaggggatggggcgggatggggcgggacagtgggagaacagaccctcggttgagtgacacaacagcagaaggctagctgcaggcggagcgccatcccagaggcagaggtggggtgtcctgcaaggcagggacgggtgtgtggagcaggaaggtcatggtggtgctgatagcacttttaaacccctgggggttttggctcagcatgagtaatggctatgatgtctgctcagtgtcgcacggtgaagatctccatccttggggatgagggcgtgcctgtgcaggtggacggagaggcctgggtccagccgccagggtacattcggattgtccacaagaaccgggcacagacactgaccagagacagggtaagagcggctgcccgcggtacctgggtggggtacagggctcacctgtgggctcttgtgtgcactgttaagagctggagctttttgtgttttgttctaggattttttttttttttaagacacaatgattaagctaatagggcagtaatttctaggaccatctccttcccctaatgttaaaaaaaaaaaaaagtcctatttgtctctttctagttgtgatctcgttggcatccccatagtgtctgtcgcagtcagatgcatgcttcagagcagcaggtgtaatygggctttcgggtccataggcatttgagagcaccctgaagtcctgggaagacaagcagaagtgcgagstgccccgccctccatcctgttccctgcacccggagatgctgtccgaggaggaggccacccagatggaccagtttgggcaggcagcaggggtcctcattcacaggtgggctcctacccctctgcgttgcscatgagcctcccccagggtccctgggactgcactcttccaaggcccctggggcgtggagctgctgctcctgacttttgtggggtctgcattacccatgagggccgagcctgtttatgtgccctcagctctggctcatttccccagtggtctttcagaactcgcctggagtttacatggctggaacctaaagcccactgtgattttcaggaccactcgtttaaaacctgcccgggctcagccgggcgcggtggctcacgcctgtaatcccagcactttgggaggccaaggtgggcagatcacaaggtcaagagattgagaccattctggctaacatggtgaaaccccgtctctactaaaaatacaaaaaaatttagctgggtgtggtggcgggcgcctgtagtcccagctactctggaggctgaagcagcagaatcagtcgaaccccagaggcggaggttgcagtgagccaagatagcgccactgcactccaacctgggcgacagagcaagactctgcctcaaaaacaaacaaaacaaaacaaaaaaaccctgccctggctcccgagggcagcccgctgacagccgccttcactttgccctcgttttaccctgagaacaggcttgctctttgttctcaagtttactttaaaaaaaaaaaaaaaaaagacaactgctggggcatttcctctcacctgccttctagaaacacccctggagccactgtgtccctcgtggctggtggtcagcattgtctgccattcctgctcctcgcccgccasgtgcgggttccgcctgtgagtccctcccagccggcagctgtgctgctccgccggtgcggggcctgcctgcattctccccccgtggccgcacgctggctggtgccctggtgyccctttcttgtttcccctgggctccttcttctcctggctgtggacaggtgcacccgtcggttttgtgcccggcatgccgtgtgcccttccaggcagcctgcccagccctggcgtgcagatggatcgtctgtgccagccttcggctcttgtcgagcaggtggtcgctgtcccagtcatcaccggcgttcctcgctctgcacttccataccggctgcagtccttcctggcgctgcattctctgccccaggagttggtgccactgcggcccctgtcctcgtctctcccccaccccacccagatcagtgatggggctggaggacttcagttcagctaattccttgccgtgcagtgggcttctggtggcctcccctggaaagccattaccctgtcccctcaaagcccatggtggcccctctggcctgcctggaaggtgcacttgcacagcactgcaggaagctgctggcagyggcctgtttccacagggtcaggacaggctggccccgctgcctttgcttgcrctgctcctatagtctctgtcccccgatctcacctgcctgagccacatctcagcctccctgggacctggtgtgacttgtgctctcaccgtcttccctatgagggctgctatctggggtctggctcagagcccatcactgcaccaggattgtcctgttcagatgagggtccttttgtccccagggacagaccggccagttacaggttccagcaaggctgtggggattgtgccttactgcagcagtctctgcagtgggcctgtgcacactgtcacttgcccactggccgttttacaggttgtaagcctcattttgtacatttctctccctggaaaatcttggattttgacgtcagatttctcgtggaagccctcccatttgctgtgggtcatcctgtgcccaagcttgtgactgaacggtcgctgggctgagccacgatccctgtcgtcctgctgggcctgccctccacatcagccctccaggtggtacctgggccgtgttcagatgcgtattgtgaaaggctgcccttccatttggcctgacatctgcccgtgcttctcttcctctctagtatccgagaaatagctcagtctcaccgggacatggagcaggaactggcccacgccgtcaatgccagctccaagtccatggaccgtgtgtatggcaagcccagaaccacagaggtagctattctggccttttcagtcctggcttcttctcagtgtctgccgccctcggccctccccgtgcgtgttcattcccccgcctccccggtgcatgttcggccctcccagtgcttgttccctgcccctaaccgtgcatgttcggccccccgcccccatgcatatttgcctggtttcttctaggggctcaactgcagcttcgtcctggaaatggtgaataacttcagagctctgcgcagtgagacrgagctgctgctgtctgggaagatggccctggtaagctggtgccccagggacagcagggctcgggctgtgtgtgaaacgactgctgtcgccaggttgctgggcacacagggcagcacactttagtccagagttcccggtcttaaggaatgggccgcagaggtcatttggtttgttgtgcggctggtgcccacccctgctggcaacccctcagtcaggttgtctcaagcatgcgagaagcgcttgcagcggaaacacccttgtcgtcgtggacagaagatgcttttctgccttagaagcctgtagtgcagagtcctkctcctgccgagagctggccacactctcaggcaccttccatgctcagccctgcaaaaccggctgatatggcagctgtggggctgttactgaatcacaggggctagaacagggagaggcctgagagactgactggccagccttctggttttaaagatgaggaggaaggggcttgataaagattgggcaactggagaaccgccccaggtgtggtttcccagccctccactccgcacgccactcacctcctcactgcacgcgtctcctcactgcacgcatcacctcactccacacatcacctcactccacacatctcctcactgcacgcatctcactccacacatcacctcactccacacatctcctcactccacrcatctcctcactccacgcatctcctcactccacgcatctcctcactccacgcatctcctcactccacgcatgtcctcactgcacgcatgtcctcactgcacgcatgtcctcactgcacgcatgtcctcactccacgcatctcctcactccacgcatctcctcactccacgcatctcctcactccacgcatctcctcactccacgcatctcctcactccacgcatctcctcactccacgcatctcctcactccacgcatgtcctcactgcacgcatctcctcactccacgcatcacctcactccacgcatcacctcactccacagaaatcctcactctacgcatctccttatcccatgcctcccctcgtcccacgtcccgtggtcacacgcrtgtcctcactgcacacctcctgctgcctcctgcaaggttcgactgctgactttgcttcccacagcatttccactgcttgacacaggtgaatggctccgaccccatttctgacagagggacacaagcaggtcagttgtcagccttgctctatgtgaattcatcgttgactgatggacagttttattctctcaccagcactacttagaaagtgaggttctgggtttggttccttttctggtgctctgggacttcgtttctggaaagtgagctccctgaycagagcagagcagagccctggagcggacctcacccccctgggcctcgcgctgatyagcagngcacactctccatttctctctccctccctccgcctggagcagcagctggatccgcctcagaaggagcagctggggagtgctcttgccgagatggaccgacagctcaggaggctggcagacaccccgtggctctgccagtccgcagagcccggcgacgaagaggtatgtggctcatagggctgtgcctgggtctcccggacatggtggctctcgcctgnagtgcctgtgttccttgtgacccgtgtggctctgggatcaagatcgtgtcgctccggcagcccctgaggggccttctccagacttcgctattaaaatgctctttaaggcagggagggacagcaggtaggaaggagttctgggctgggattaagagtgccccttgaggaccagggacctgttgtcctctgaaacagaactgcagggcttcctggacagtgggtagaaggaaggctgagcccagccccacagcctcccccgagggtggagatgtatcatgggataaatggcagccttttgggatcccgctgtggacagggcgcagttggtgtgcgccactccccactcacactctcttcctgtgtgaacagaaagactccagctcgtcgcaggtctgggagggacccgaggacgcagggcatagcggaccctggggtggagtcacattcttctgcagggagtgctggctgaaggagccctggagagggccgtgtctggacaaggacaaaccccagcctgtctcttggcttccctgcttcagagatagaacacaraggggccctgaggaaagctcatcttgggcagtacagttgcagaaggcaaataactgcaagacgccaaacctgggcacccctgcccagtggggtttgtgagacctgtgggcagcagtaaggygaggggacagaggtgggcagctgcacaacagcaccctctttccrgggccctggggcgttttttgacrcatgcartcctttcatgggaaactgactcaggcactccagccgatggatgaaactcagcagcttctcagtgagggcacttgggtataaaaggacagggcaagctcctcaaaatccattaaataattcattgtaaaggtgattaavaaattttacccaaaattacaaaaataataatatacaatgattcaacagatgtcacagtgacatagccctataataccagattaaattaaggccagtaaagtgggcagtgaggtgagaggctgggaagaggacatggacggggggaggaaagcatgttaaattcctcctcttacagtggaagaacgttacaaacaacattcttgactttcatacttggagaaatacagagtcaataatgtttttagggtcaagagtggtggctcgcacctgtaatcccagcactttggaaggccaaggtgggaggatcacgttagccgaggagttcaagaccaggctcggcaacatagtgagaccctgtctctattaaaaaaaaatttttttttaaacttaaaggtaatttctaatagagctgaaaagatttatatcttccaaattgccaccaaggacaaaaataaaatacaatttatattgtaaaagaaagtaaaggaccagcaagggtatcgctaacagcatgaaaataagataacagaaaaatgacatggctttctcttaaaagtaaattcttaggttgtgttttaaaagaaacctaaccatatattgctcacaagagccctgtttttttttctcatactcctaataaaaatttatgatacagaaagattaataataattaaaacaccataaaaaatccaaagtaacaatataaaaataaaattgcatatgtaagacaataaatgataaaaagaggatcactttacattggtaaaatacaataattgttatgtatagtcatcaacttatgacagttataatagtcacgaaactgtgccaaataataagcatctaaattagctgttcaagactatgttttttattccctaacttcattttactgtgctccaagcaatggtctgtatgttactagtcctttgaaatgtactgaggtgagacttgcccaataggtggtttttgtaaatgtatcttgtatgcagttgtgtttacatcattaagttcctactgaaattttttttgtcttcttgatagatcagttaactctaataccataattgtagatgtctcagtttatctttgtggttatgtgtatttttgcttcatgtattttgaggctatgttattgggtacccataggttttatcattatataatgatccttttatctttagtaattctttttatcttcaagtctacttgcttgctatattttttcatagttttactttcaagctttatttggagtgtctcttataaagagtgcatcacagagtgaggcagtgttacctccgtgcatctcagggagtgctgtgtggagaggctgccgccgccgatggctgtcaagagcagaggccgagcctctgtgtggctccgctcttcacccttcctctgctcttctgcctcagggagtggatcgcaaggaaagaatgcaaagtgcaggagagttttcattagacagatactcgtaatactaagaatcaaagcccagcaatccaacactagaagattggctaaagaggttattttaataatttttgtttagatactgatatttatgatattttcaaaaagtttttaaatctcatgagaaacgcacatgtaaagtgaaggaagtagaatatgataaaaatagacactatgatcactttgaaaccactttaacactcactaaaatcaacactaaatacaagaatcaataagggagagaagccctttcaggcacaagaggtctttcccagctcccgctcatctcagccctgcctgccctcccagcctctctggtggagatgggcatgaggccgtgatcagttgcagcctgattctcagtattcctcattctccccaacagagtgtgatgctggatcttgccaagcgcagtcgcagtggtaaattccgcctcgtgaccaagtttaaaaaggagaaaaacaacaagaacaaagaagctcacagtagcctgggagccccgggtacctgcctctctcccgcgtgtgtttctggccgtccacgcctgctggatcggccccgttcccctggtctctgytttctcccttggccttgcagytcctccctcttggtccctgtgctgtaaccccyggtcctgcgaccacacttgtctgttggtagctgcagccctccaccctgcctgcttcccctctgaccgttgtcacacccggccctgacgtgctctctggctttctgcctgccctgagttgggggattcgaggtggggaggaagacagcagtagagtggtgacaagacaaacttggagacacaaagctctggactcaggccgygctggggcatgccctgcctgctccctcctgggctgctggttcctgataaattgatgcattggtcgaggttcctgtgctgggaagcccaggccaccagagattgtgggtgatgaaatcaatcgaatatggtcctgaaggacattgttcctttgggtcagtaaattggagctaaactctctgtctgaaggatcagccctgaatacccaggccatatccagtgctgtcaggggctggagaggcctccaagcctggatattgggactggtgtttgccgccagtcagggcagctcctgtgggtttttcttctttgcatgtttgtccagaaatggggtttctgttaataatggtggctctgactatgtgaattgaaatctctgctcgtttcctttcctgctatggtccagaagtgaaatttaacccttctagaagctggaggaaaagctggctttggccacaatcatgaggacatttccctcatatttggtggtggtaaatccctcctgggacacggggaaatgaccagaggctggcggcccacctggcaggaacagatgccagctctgctgcagccatcgccccttgagcgggtggctctgtgcctctttctgcactgctggtgggtggtgctgttggctgggtgatggataccggctgccagagatggctcaggtgccagctgctgggctatctcaggcactggctgctgggctatctcgggtgccggctgctgggctatctcaggcgctggctgctgctgggctgtctcgggtgctggctgttgggacgtctcctgtcctggcactgggctctcgggtgctgggtgccagctgctgcctaccttgcactgggctctgggcactcactgcactcgtgcttttccatctccgacagttcacctctgggggacagaggaggttgctgcctggctggagcacctcagtctctgtgagtataaggacatcttcacacggcacgacatccggggctctgagctcctgcacctggagcggagggacctcaaggtacttccataggcrtctccctggaacctgcacttgggcttgcacgcagctcccttctcttccatcctctcccccgacctggccatgtcycagcatcacgattcttctcaggctttcgtgtatacctcaggtgggggcggctgtggccctcatctaggcagtgatggctccacccaccacaaccagaggaagccaggagcagacataatggggggcagagccttggttatcttaggctactcagacaaggactgtcttcgtgttaaaaacactatgaggggacacagaccctgaagcacagtcacacacgactgtccccatgctgctcctgggcgggtgctgccactcgtctgcagggagcattgggaggggtggttgggtgccaggcctcggtctatgccaggcctcacgccacatcttgcaggcccatgcccctgcccaggttggcctcaacgggccaacccctgggtgttgaatcactggctgagtcccgagagggcaaaaggccactgtgggtgtcctggacagtggctctcatgaggtcacttgtcatccacttgcttttaggcctgtgttttgtctttgtcttggatttgtccttgctgatggtagtgactagaatgcaggaacaatgggccaggcatctgtatggttgttacttttaagctgtttccatcttgttttaccgtttttgtcattttggctctcatttgtgttcacaagccgaatgggaagggccgttgtggcaggcctgctgtggagccctctggccctggctgtcttctcggcatccatggcggtgtcttctctgttgcaggacctgggcgtgaccaaggtgggccacatgaagaggatcctgtgtggcatcaaggagctgagccgcagcgcccccgccgtcgaggcctagcctctgtcctctcagcctgtggcctccacatccccgccgccgaggcctagcctccgccctctcagcctgtggcctctgcgcctcctgccactgaggccctgggcagatgctgcagcccgcccccttctcatggtgctacttcctctgtcagctacagaaagcctccgtgacaccgtccaccagagctctggggtctcgaacataacaacacagctacctttgaaacaacactttctccagctcagagtcacctggggcacatgtgtcacggccactcagctctcgcccgcctgtgctgtgggccagggaatccagcggcgtctggcctcctgggcactgcttgcctggcctcgtgcttggattgtcccgggggctcctctccgtgtgtccttctgtggccgcaccgtgtggctccgcctcctggcccccagccagttctcagaaacgtggctggggcccagcacagcagcctgcaagggcccctgtttgttgatgcagcttttgttgaacaaaaatcgtgctctttcctggtttgaaagtagcatggatgtttccagtcttgttgattgtaatttgacgtgaagagaaaaaaamattcctcctgcgtgagccaaggcagcgggtgctgtttcccaggcrgggagcccctccctgggtgtcacaggkcctgtgctcctccctcctccatcctctctcctcccgctcctccctccccccactgtgggctggggacgcctgcccttctgtctccggacgctctaggcgagttcagcttggggtgtgagtgagacagctygccagctgcatccctgcagacagaggatgtgtgtccacatgagtgtttctgtgtgggaaatgcttcctggctctgggaaactttttctgcccattctgtggttcccagggagcgtggccctggtgggccaggggtggtttgacctcttcagcccgtccggtggcctggaggccggaggctstcytgagtgtctgcccctgcagtggcttcttgtcgcctgctgctgggcgtgatgtcgctggaggtgctggcagggactctgatttggtggtccgcgctgcccctgccctgcctctgtcctggctctgaactagtagatgatggtgccagagggcagggagctcgcctggggagagggctgtgccccgtagggacagtgcccaggtgaaggatgcccctggtcctccagggcactgactttgcccttttttcccgttgatagtcatggctcagaggtgcttgtaaatgtcttgggaagaggtttctgtaacccctgccctggtgtgaggaggaaatggctctggcctggctgcctggccgtggcttctctttggctcccaaagagaaggacagtgttgggagtatctgccgtggcttctctttggctcccaaagagaagsacagtgttgggagtatctgccggcgctgtccaggtcctttagtcagcgtcactccatctgatgtgcagaagctgggctgcacctgcgggggtgggcatagaccgggctgggtctgcagcagcccctggtcctgagcaggcggcagtgaacagcactggcccacctcccactcacagcccctctgtcccctctgcagtgcacccaggtgggcccctctgcgtgcctttgggtgctcccctctcgtggtcgttctggcccgaggcccttagagtatggaggctgagccaggccttgggtttccccagcacagcctcctgtcgctgcatgcgacgtgttgggatttttggatgaaagactctcccacgctctgttggtggacttagctgcctcactggaagtgatgtgggtggaaggtggttgtatgttacctttwccacctctcattgttttccccagaacattgtagatgggggttggcagagggaraaatawgccagccacggcagtcgcttggtttcccaggtggaatgggctaacacaggagatgatgggaacctgtcccgcagtccctgcatgaccattggccctgctggcctggcgrtgtgggcatcctggggttcttagggtcccagaacaagccccaggcaagctggaacttgggtggggaggggacatgaggaggataaacagctgactgtggcttcaaggacatcagggccaccccaagtcctcagtgtcctactcctggcaaggagttgggtttggatcaaaagtgtttaaaattaatatgttgtcagtgattagaacaacactgtttacataaaaaccatttttctaattctaacaagttagaatgtgaggaaggaatgaacatgagtgtttaggaacctgccctttggtgctgggctggcgtcccgcactggggtgtcctcgctgtctgggggctgctctgctgccccggcccaggtccccttgtggtgttgccagacgggcctcatggtctgctgtgcagagagaggcaggaaggatccctgaagagtcttggagaaaaggttctgtgccctcaggtggggcttaccccctcgtatttataatcttaatttatatagtgaccmccgtggaaacaaacgcctcttgtattgtyatgtacatagtccatacctgagtgctgtacataagttgttctgtgtataaataaaacaagcctgtttttgatcttccatcgccagagtctttgtcatcattccttgtgctttgacataaagtgttggttgccggaatctttccaaactggattcagaattgtttttcacctgctctgaaaataggttgagttgttggtggctaaaaagcaaaacagaatgccattagcatgccatcagaatgccgttagaatgccattagaatgctgttgtattttttagggtgtgggttctgtgatcagttggactaaaaattccgcaaggagagagagggtactgggcagtgctgaggctctcaggtgtgaccacacagccttggcccgggagaatgagggccattttaacgaatattttaaccctcttaaatcttttctataaaactgcaaacctgaagctctccgacttctctgctttgtcttggtacttttatttccaagggaactgtctacgatcaaggccacttgaattgtcttccccagtttcctggagtgagggatggggactgcattcatggaagacaccatcaggctggtcgggtacagaagggctgcatgtgctccgggagtgttggctgcctccctagcagctcttcctcactccttccatggtaacaaacccccccgtttttttttttctggtgtatattctcctctctggccattcaggacttcaggcctcatggttgcaagatggccaccacagctccaggcatcacaccagtgtaaggtgtttggggacaaatggctgcctcttttatgtgtcacctgctctttttgttgttgttgttgaagatgaggtcttgctctgtcttctggtctggagtactgtggcataatcgtagatcactgcagcctccaaatcctggactcaagtgatcctcccacctcagcctcccttgtagcggagagtacaggtgcatgacaacatacccagctagtttgtaaaattttttgtagagactgggtctcgcttgcttcctaggctggttttgaactcctggcgttaagcgatcctatgtgtgtctctttttaagataaagggagccctttccgaagctctggcttcagccgacctcctctaatgtcttggctagaactgcctcacgcactcatgactaaaccaatcagtgcgaagggtacgagctattacggtgatcgggatgctgacggctgacactttataatttgtgccaggtgttggtctaagtaccttgaatgtacgaactcctctaattcccctcacagccttacatggtgggttatctgcattttacaggcgagggacaggctcagagaggcgacacaacttgccccatgaggcacagccagcgcgtggctgacatgggaggcagagggcatatcttttcgacagccgtgctctcccgtgtcccaagcctcatagcaagcccagcccacaagacaggtgaggaaattgggcccaagtgacaggcatgctttccagcacagcagccggggcgcctcacgtgctgggggcaccagatgcccgggcaggggcagacctggggggaggctggtgtgcgctttgccagcctcactcctgtgcccgcgtggctcatctcacacggggcatggctccattgtgtgggaaagcagtgaggagggggcttctcacagagacagcatctgacagcgtggggaggccgggcagcgatctagagtggacggggctgcaagtgtagcatgatcgcgagacgggacagtagagttgagtggagaaaatgcagcagggtctatactgtttttaaactgatcctcttcagaattccccaaccacttagaaaaacaaactgggtgcttggtccagtaatgttaactgaaccctggatttgtggcctctgttgtttgccagaagagttttgctgtggtccccccacccctttgtgccctggctccaggtgggctcacgcgcgttccttggctgtaggttactggaccccacccagagctcttagacctgggctaggagtgggtgcaactcggagtcgcccctctggggtgggggcggtgtggctgggagggaggtgcaacagccacaccaacacgagggtgctgccatctttgaagcacatgcgtgtgaaggacatgggcacctggaagctctgggcaatgcaccttcccctctcccccgactgtcattccatggagcccacggacatcacccacttagggcccagggctttcactggtttgtagaaagaggcacttggtggctgcctcgtgtgatggagctgctggtggcgtctcggcacctggggaggtgcctgcggagacagaaccacctcagagcagcacactggggcgtggcagaggcaccactgtcccctgagcactcgtctggccccgccccagcctggtgtgagctcattggtggtctcttgtttcctgagccgggagattgccgtgtctgctcctgccaccccaagtcggggcaaggacctgcagatgaagggccctgtctgccacactctgcagccattgccacagggacctggacgcatggcagcacgtgggcgtgtgtggtgggagtgggggagggcagcggccagagggagctggaagcagtctctctttacttggatactgaggtcaccgcttcacccagaatgcgtttgttatggattttattgaaccctggtatggccatgctttgggtgggtgcgttatccagaacagaacagaatgatggacctgtagggtgaaggggctgttgtaagttggtccctcactgttaagtctgttctgcaggttaaactcacatcgatggcgccaaaatgatttgcaagggaattcttgcccctcccttttttggctagaaaaagtcactgttgaataagtatgttttctgtgacgacaccaccattacgtatttccatagaaggaaaataaaaccagattgattacatccagtttcttccagtgcatttttcccatgagtctgaactttttaaaaccaaagcaaacttgttatttctaaagcagcactgctgcagtatttctaaatataaactgtttatttagcatctgaagcaggcttgggaaaaagggccacaaacgttccttattttatttatgtattttttttgagacggagtctcgctctgtcacccaggctggagtgcagtggcacgatcttggcgcactgcaacctctgcttcctgggttcagacgattctcctgcctcagcctcccgagtggctgggactacaggcgcccgccaccatgcccagataattttttgtacttttaggagagacagggtttcaccatgtcagccaggctggttttacactcctgacctcaaatgatccacccgccttggcctcccaaagtgctgggattacaggcgtgagccaccgcgcccggccaaaagttcctctcttaagcaagctgggcacgaagtagccggcaaccaaaagcagctaagggctacaactttaaaaaatggtttatttttttctttaacaaaatcgtacagctttctcaatccccaaattaaaaaaacagaaaacaggaagaaagggaagaaggcaaaggccacacgcacaggccggcccggccgcacgcgcctgctggacggcacttcagggcacaacccacacgcgtctttggacttgcagacattccgcgaggcttctggcctctcgaaggcaaagcttttcagcgatttcattaatatttcattacgctgagatgagatgaaggcagatgctacagaaatatgtcagttaaagccacagaaacagaacagcttaagaagggctgggcgcccagctcgtcacgacacttacagctctggcgtcatcagaagcctctatcatctccctctgcaaagacgcagtctacacccagtgcgagtctcctgagcggggttagtgtttgggagtgggaggcagctgctagtcagagttgggtccttagggcgcagtgcttcacggaaacgcacagacgtctatggcagacgctctcagacacgtgtgcagaagcgacgtggcttctgtctggtaggggtttggactgttgggaggagtatgagggacaaagcaggccgctggctcagcatcagcttgttggaaaagggtcacaggcaggggagcgcctgactccagcggtgtcctttctgccctcacacttcagtgctgcttcccatcagtgacggggctgacgagaaaccgtgaggcccaggtgacaagcaggctcaggacatgcgacaccgtcttcgggatgctgctttccgctaagctgctgtctgggaaagtcaaccgtctatgtcccaaatcaatcaactcagtgacacaggtactattatttctcacaaatgccaattaaatcctttaagttgaatagaaatctgggttggattaagtgggaaaacccttccttagtttacattttctttttctcaggtgttttcattgaggctactcaggaaaccggtcaggctgcccaggacacctggaacctgggctatgccaggcctgtctgccacagccctgcctgccccgcttccacacaggaagagaggctgaggcgctgtggacggcagcagctgcagtcctcgggatccaaggaccttctgatcacagagcacccaggataagctggacccttggcctgcgggctgacgtgcagcggctgcccttgcttagcagagcgactcaccctcggaggccaccctgtgtggctcctcctcgtggaaagagctcgcacttttcagcatcgcagttttaactcagaccaaagggcagacgtggagcatgcggggccggaacgagtgggggaaatgaagtcctgaaagcagaccccacttctgcccgcttctgctcagcaccagcgcggtggcgcagtggcctgagacactgtgagaagccggtcagggcgaacgagagtcatctgaacacggaggaaagtggctggcctgaccccacacacctcccacagcggagcaacggcatgccgctgcctccatacctgcggttcacgcacacgttgtgcattttctggttaaaagaaaaaaaaaggcagctggggccgggtgctgtgtgagagagcccagcacctactggcagctgggtgggcgacatccagagctgcaccagcccccgtggctgccacgtgttgcagagctaagtgactacatgcactggccaggcctcagaggagccgtccctgtgctcaaaggaagcagaggatttgggattggaggcgccaggcagccagtccccatgcccaggaaacccacgtttgtggcatcagccggagagttcatcgggagtagagccgtgcagcggcgcggttatctgaagctccccacgtggatggagagagaagtttccggggctcggggccgggcaggcgtctctgcactggagaggatgtagctgctctgctcrtggagggcttcttggctgcagagacacagacactgtcattgactcatggatgcagtgggtgtcagggtgaggggttcacgaagaccccaaaatacactccaattttataggccacaaggacgtgcatttgcaattgcacagacagatctcagccacctgccagagggccccattttgccctgccaccagccctgtgccaggccagctgccttcccctgctttgcactggcagcacggcatggttcaggctctggggctttctcaatctgctcagtgaaaatgcctcacagctgagaaaccttcctttccgtactttttaaacggaagaataacatccggagtgcacacacaccgctgcacgactcgtcacaatcacgcacacctgtgtgacatgatgcagaggctgcctctgccccttcagtcttgcccggagagacaggccacttggcatcccactcaagagactggctttcgctgtgacccccccggcccatggcaccgtgcggcaggtgctctgcggccgggtgctttggcccagcctgatgtgtgtggcccacccacgctgcacagtccccgacagaaagcctccgcggcccacccgccatcccac

SEQ ID NO: 94809 - DNA, 33823 bp, Homo sapiens
tttgccacctcccataacattggcttctgaacctctgagactgaacccatatatgttttaggagggaaagggttgaaaagcattattactctgtgccctgggacaccctgatgtccaagcacattgagggtgctgagtaggtggtggtggttgatgtggtggtaggtgactaagattttgcagaatatgggaagaaacagatgttaggagggagagcccttaataaggtgcttacaattttttttttttcccattaagagatttcaaggtgcttgtgttgtgggatggggcggggcgggggtggtggtagaaggtgataaagtggaaaggtgtgtttttttttgtttttgttttttgagatggtcgccctgactcccaggctggagtgcagtggcgtgatctcggcttactgcaacctccgcctcctgggttcaagcgattctcatgcctcagcctcctgagtagctgggattacaccatgcctggctatttttttttttttttttgtatttttaatagagatgaggtttcaccctgttggccaggctggtttcgatcttctgacctcaagtgatccaccctccttggcctcccagagtgctaggattacagacgtgaggcacctcagccagcctggaaatgtttttaaagcagatattatagaaacacaaatatagtcaactcaacagatatttattgactaccttccatatactgtgtacttcaatagaagtggatacagtgttgaagagcacagaaatggttcctacactcatggcgcatatagtctgattgcttaaccttgatttcgttcttttttttgacggcgcacacagtctggggtgcagtggtgtgattttggctcactgcagccctgcttccagggctcaagtgatccttctgcctcaacctccccagtaggtgggaccgcaggcacatgcgaccatgcctggctaattattattattattatttttgtagagatggggtttcactatgttcctcagactggtcttgaactcttgcgctcaagcgatccaccagccttggcctcccaaagtgctgggattataggcgtgagccactgaagccagccttgatttgtctgtaaaatgggatcataatagtacctaacttattgaactgttgtcaggattgaaataatacacgcaaagtacttaaaagagtacctgatatattctaagagttatctgttgctgatattattactgttgtcattgaaagaaacatagcttttggccgggcacgtggctcacgcctgtaatcccagcactttgggaggacgaggcgggaggatcacaaggtcaggagatcgagaccatcctggctaacacggtgaaaccccgtctctactaaaaataaaaaaaaaaatattagccgggcgtggtggcgggcgcctgtagtcccagctactcaggaggctgaggcaggagaatggcgtgaacctgggaggtggagcttgcagtgagtggagatggcaccactgcactccagcctgggcggcagagcgagactccctctcggggcggggggagaaagaaacatagcttttattgagtgattagtgtgaatctggtatggaacctaagtgcttttttttccctcaggccatccttctgcagaacttaagtgctttataaacattctcaaccaggcatggtgcctcacacctgtaatgccagcactttgggaggctaaggtgggcaaactgcttgaggccatgaaaccagcctgtggaacatagccagacctcatttctataaaaaggttaaaaagttagctgggtgtcgtggcatgtgcttgaagttgcagctactcaggaggctgagatgggaggatgctttgagtctgggagttcgagactgcagtgagctgtgatcttggcactgcactccagcctgggtgacagagagagaccctgtcttgaaaaacaaaaacagggcgggagcagtggctcatgcctgtactcctagcactttgggaggctgaagtgggcggattacttgaggtcaggagtttgagaccagcctgggcaacatggtaaaatctgtctctactaaaaatacaaaaattagccgggtatggtggcacacacctgtagtcccagctactctggaggctgaggcaggagaattgcttgaactcagtaggcggaggttgcagtgagccaaggtggcgccactgcactccagcctgggcgacaaagcaagactctatctcaaaaaacaaaacaaaggccgggcgcggtggctcacgcctgtaatcccaacacttttggaggccgaggaggacggatcatgaggtcaggagatcaagaccatcctggctaacacggtgaaaccccatctgtactaaaaatacaaaaaattagctaggcatggtggcgggtgcctgtagtcccagctactagggaggctgaggcaggagaatggcgtgaacccaggaggcggagcttgcagtgagctgagatcatgccactgcactccagcctggacaacagagcgagactccatctcaaaaaaaaaaattctcttatgagggaagtatttttattatccctatttaacataaaaggcaaagctcatacaggaaaggtaagttgcctaacatctcacaacactcttaagtctgtttcttttgcttccttgtagtgctcaggagctgtcccaggaaatcaaggcttttctgactggcgtagaccccattctgggccaccaactctcagcccgggaacatgctcgctgtggtcttctcctgctccgttctttgccacctgctcgggctgctgtgcttgaccacttgagaggtgtctttgatgagagtgtccgggcccacctggctgccctggatgaaacccctgtggctggtccacctcacctccgtccacctccaccctctcatgtccctgctggtggacctggtctagaggatgtggttcaggaagtgcagcaggtgctgtctgagtttatccgggccaacccaaaggcctgggcacctgtgattagtgcatggtccattgacctcatggggcaactgagcagcacgtactcaggccagcaccagcgtgttccccacgctactggcgctcttaatgaactgctacagctgtggatgggttgtagggccacgcgtacattaatggacatctatgtgcagtgcctctcggctctcattggtagctgcccagatgcgtgtgtggatgccttgctggatacctctgttcagcattctccacactttgactgggttgtggcacatattggctcctcttttcctggcaccatcatttcccgggttctctcctgtggccttaaggacttttgtgtccatggtggggctggaggtggagctggcagtagtggtggaagctcttctcagaccccctctacagaccccttccctggatctcctgccattcctgcggagaaacgggtgcccaagattgcctcagttgtaggcatcctaggtcacctggcctcccgccacggagatagcatccgacgggagctcctgcgaatgttccatgatagcctggcagggggatctggaggccgcagtggggacccctcccttcaggccacggttccgttcctactgcagctggcagtcatgtcaccagctttgctgggcactgtctctggagagcttgtggattgcctcaagcccccagctgtgctgagccagctgcagcaacaccttcaaggattcccccgagaggagctggacaacatgttgaacctggctgtgcacctggtgagccaggcctctggggcaggtgcctaccgcttgctgcagttcctggtggacacagctatgcctgcttcggtcattaccacccagggcctggctgtgccagacaccgtgcgtgaggcttgtgaccggctaatccagctgctgctgctgcacctgcaaaaactggttcatcaccggggagggtctcctggggaaggggtgctaggcccgcccccacctccccgcttggtgccctttttagatgcgctcaaaaaccatgttggagagctgtgtggagagacgttacgattggaacggaagcgcttcctctggcagcaccagctcttgggcctgctgtctgtctatacccggcctagctgtggacctgaggccttgggccatctgctgagccgagcccgaagccctgaagagttgagtttggccacccagttatatgcagggctagtggtcagcctctctggcctcctgcccctggctttccgaagctgtctggctcgggtgcatgcagggacattacagcctcccttcacggcccggttcctgcgcaacttggcactgctagtagggtgggaacagcagggtggcgagggccctgcagccctaggggcgcactttggggaatctgcctcagcccatctgtctgacctggctcctctcctgctacatcctgaggaggaagtagctgaagctgctgcctctctcctggccatttgtccctttccttctgaagccttatccccctcccagctcctgggactggtaagggctggggtgcaccgcttctttgcctctctgaggctgcatggacccccaggtgtggcctcagcctgtcagcttctcacccgcctgtctcagacatccccagctgggctcaaggctgtcctgcagctgctggttgaaggagccttacatcgaggcaacacagaactgtttggtgggcaagtagatggggacaatgagactctctcagttgtttcagcttctttggcttctgcctccctgttggacactaaccggaggcacactgcagctgtgccaggtcctggagggatttggtcagttttccatgctggagtcatcggccgtggcttaaagccacccaagtttgtccagtcacgaaatcagcaggaagtgatctataacacccagagcctcctcagcctcctggttcactgctgcagtgccccagggggcactgaatgtggggaatgctggggggcacccatcttgagtccagaggcagccaaagcagtggcagtgaccttggtggagagtgtgtgtcccgatgcagctggtgcagagctggcctggccccccgaggaacacgcccgggccaccgtggagcgggatctccgcattggccggcgcttccgcgaacagcccctgctctttgagctgttaaagctggtagcagctgcacccccagccctgtgctactgttccgtgctgcttcgggggctgctggccgccctcttgggccattgggaagcctctcgccaccctgacacgacccactccccctggcacctggaggcatcctgcaccttagtggctgtcatggctgagggaagcctcctgcctccggccctgggtaatatgcatgaagtatttagccaactggcacctttcgaggtgcgtctgctgctgctcagtgtctggggttttctccgggagcatgggcccttgcctcagaagttcatcttccaatcagagcggggtcgcttcattcgggacttctccagggagggtggaggtgagggtggaccccatctggctgtgctgcacagtgtcctccaccgcaacatcgaccgcctaggtcttttctctggccgtttccaggcaccttcaccgtccactctccttcgacaggggacgtagccttttcttgctctggaagcccagggaggttgagcagtgagagagggaagggactaacgtgctccggaagggtggaggtttctcttctaagtccttggtctaaagagcgctgtcacttttttctctcccacttttttttttctaaataaaatttgccaacttgagaaaaccagtccagtgcttctgtcatgctgagagcgtgcaaagtctgacagcgcctggctctggacgttcccgcccctggcctgaagccccgccccctgcgataatttggagtgcgcactctaccaatgagacagctgcccggcggcgctcaggtcgaaccaatcataaggccggaaggggcgggaactaggatacgtggctgagcgcgcgcgatggggcgggaggtttggggtcaaggagcaaactctgcacaagatggcggcggtagcggcagtggcggcgcgtaggaggcggtgaggagcccggaatctgggggcgcgcccgggacgcccccagatcccccaagtcccattccactccttcctgtgtgtctcttgacactctgccacccccggcctcgtgaggaacctttgttcctctggaggcggcctcagacgcctccggtctccccgtggtagatccgagcgacgctgggggccttgcctgtggggctccgggctcccgcccggcggtttagtaaagccacagctgtgcgtctttcttggtcttggccgctctcagccgccgccctcctttggctgcttgcggcggtcaacgtcgccgcccccttcctgcagtgcgcggggtcgtcggggcgggggaaaagatgcggcctggcctcggggaatgcagcctgcggccccgcggcccctcggctgagctggaagcaccgggccagcagttaagcctgtactacccttctggctctaccctgtagagctccgaatcctcctctgcccttgtcttcacgtgagcaccagctctggcttagttcagtgtccacggtcgctgggcacggcccagggtccagtaagctcacggcgtggatggtgttgctcaaacacaacatgtaatcgaatggcttggtccacgctctcgggtttatattactggggaaaaaaaaagattcgaaacatatcaccagtgccacaaatgtttactaggacctaacggatatactggggtggggtaggcgtgtactctccaaagcgatgaagaaagcgtggatcataaactcagttccctcggagcctgtgatctgaaacaataaatgcgtgcaacttgccctgcagcttattcctgactttggcctatgaacacctctcttggggtggtcaaggccgccgtgaattccttagggccctccaacaggtcatatctgaaagatgctttaggaatcctatctccattggcatctttccgaaccaattttacagactgtgcaaatagggccccagagggtatttaactcactgtacgtcttttttttttttttttgagagacagagtctcgctctgttgcccaggctggagtgcagtggygagatctcggctcactgcaarctccgcctcctgggttcacgccattctcctgcctcagcctcccgagtagctgggactacaggcacccgccaccacgccyggctawttttttgtatttttagtagagacggggtttcactatgttggtgaggatgatctcgatctcttgacctcgtgatccacccgcctcggcctcccaaagtgctgggattacaggcgtgagccaccgcgcccggcctcaactcactgtacttctatttactgctgcttttggcaggtggacgtgggtcagtggccaagagtgcctgttgcagtcactcaggtcactcactgcaggacctgtgccgcatgccttgctatggagttttgtggtagcatttattctgcttggcctattaaaccacagtgcctagtgttttcttcatttttctgtctggcctgctgtggaacagttgtttcgtacattcctctggagctggaggagagtcctgtgatgagatcatagtacactctgtgatctcatttctggtaattttcttttagctttcaagcagatgctgaagctaatgctagataactagatacaatgtgtataatagaccctgtctttagttaccttattataggttgtcaaattttatttatttatttatttgtttgtttacttattgaaacagggtctcgctctgttgcctaggatggagtgcaggggtgcaatctcggcttactccagcttccacctcccgagttcaagcgattctcctgcctcatcctcccgagtcctgggattacagacgtgtgccaccgtgcccagctaatttttgtatttttagtagacaccccattgaccagtcttaattaatttacttttttgagacagagtcttgtgctgtggcccaggctggagagcagtggtgcaatcgtagctcatgcagcctcaaactcttgcgttcaggcagtcctccggcttcagcctcctgattagctgggactacaggcacctgccaccatgccttgctactcttttttttttttaagtagagacgaggtcttgctgtgttgcccaatcttccctttttgacctcccaaagtgctaggattatagacgtgagccactgtgcctggctggttgtaaaactttattgcttagaagaaccctcccacccccagtttgaaacactttctcagagtatgctcgtattctgcccatatcagtgtcactgggagagcatgtttaaaatgtggtgtcagccgggcacgatggctcacacctgtaatcccagcactttgggaggccgaggctggcgaatcacctgaggttgggagttcgagaccagcctgaccaacacagagaaaccccgtctctactaaaaatacaaaattagccgagtgtggtggcacgcgcctgtaatcccagctacttgggaggcagaggcaggagaattgcttgaacccgcgaggcagaggttgcggtgagccaagatcgtgccattgcactccagcatgggcaacaagagtgaaactcagtttcaaaaaaaattaaaaataaaatgcggtatccagggtgggtgcagtggctcacgcctgtaattccagcattttggaaggccaaggtggaaagatggctttagcctagaagttcaagacaagcctgggcaacttttttttcttgtttttgagacagagtcacactttgtcacccaggctagagtgcagtggtgcgatctcagctcactgcaacctctgactcccaggctcaaaccattctcgttcctcagcctccccagtagctgggattataggcatgtgccactacgcctggctaatttttgtatatatctatttttttctaggtggtgtttcgctgtgtcgcccaggctggaatgcagtggcacaaccttggctcactgcaacctctgcctcccgggttcaagcaattttcctgcctcagcctcctgagtagctgggactgcaggcgtgtgccaccatgccctgttaattttttttttgtatttttagtagagacggggtttcatcatgttggccaggctggcctcaaactcctgacctcaggtgatccacccgcctcagcttcacaaagagctgggattacaggtgtgagccaccacgcccggcctaatttttgtatttttagtagagatggagtttcgccatgttggccaggctggtctaactcctgatctcgtgatctgcccacctgggcctcccaaagtgccaagattataggtgtgagctaccatgcctggctgattcttaacagacattaaaatttgagaatctctgtttaggatttattcagaatcctaaggatgaatcctggatgaatatattcttcaaactaacttatttaaataagcctattagtctcttatctgtcatttcatagcacattgggaaattgacaattcgtgataaccttgggatgatggtcctcaatgagacaggcccatttcatcctgctagtgattagtgtgctgtattgtgcatcatggtaaagcacatgggccccagagtcaagcacaactgggttcagttcgtttcatcccttaccagctatttaatcttgggtgaactattcaaccttttatgctttaattttcccatctggaaataaaccccaaccctatattcaccaagaaaacaatggaagaaagggaaaagaagatgcatgtaaagaagtggttgtgaacccaggttgctcattagagttgtttagggaactttaaaaaaactttagccagtggggcgcgatgacacaacgcctgtaatcccagcactgtgggagactgagacgggcggatctaggtcaggagttcgatacgagcctggccaacatgatgaaaccccgtctctactaaaaatacaaaaaattagctgggcatggtggtgggcacctgtaatcccagctgctcgggaggctgaggcgggagaatcgcttgaacccaggaggcagaggttgcagtgagctgagatcatgtcactgcactccaacctgggtgacagagcaaggctccatctcaaaaaaaaaaaaaaagtctgatgcccaggcttctctctgattaagttaaaatttttagaagtgagaccaggtcactgatattgttaaaaactgcaggcaggctgggcacagtggctgacactataatcccaacactttgggaggccaagatgggaggactgcttgagcccaggagtttaagaccagcctgggcaacaaagtgaggccctgttgctaccaaaaaaaatttttatttattttttttgagtcagagtcacgctctgttgcccaggctggagtgcaatggcatgatctgctcagtgtaacctccacctcctggttcaagcagttctcctgcctcagcctcctgaatagctgggattacaggcccctgctcccatgcctggctaatttttgtatttttagtagagatggggtttcaccatattggccaggctggtctctttgccagcctggtctcgaactcctgaccttgtgatccgcccaccccggcctcccaaagtgctgggtttacaggtgtgagccactgcgcctggccagaaaaaaaamaaaaaccacaactttttaaaaattagctgggtgctgtggcgagcaactgtagtcccagctacttgggagggtgaggcaggtggatcacctgaggtcaggaattcaagatcagcctggccaacatggtgaaactccgtctctaccaaaaatacaaaaattagctgggcatggtggcgtgctcctgtaattcagttacttaggaggttgaggcatgggaattgcttgaacctgggaggcggaggttacagtgagctgagatcatgccatggcactctagccagggtgatggagtgagactgtctcaaagcaaaaaacaaaaactgcaggcagtattaaaaactagtaatataaagtgattacccaggcccctaggggtgcattagggctcagaacattttagctattgttattttttttcagctttgggtagtgatggtggtgttttgaagatacaggagtagaaatcagagaaacaggctgcctagggtgctagggatgttaggaccctaggaactgtaaccagcaggctagctgagggtacatcttttttttttttttttttctgagagttttgctccatcacctaggctggagtgcagtagcacaatcttggctcactgcaacctctgcctcccgggttcaagcgattctcatgcctcagcctcccgagtagctgtcactacagatgctcaacgccatgcccagctaatttttgtattttaagtagagatggggtttcatcatgttggccaggctggtcttgaactcctgacctcaagtgatccacccgcctcagcctcccaaagtggtgggattacagacgtgacatgagccactgcgcccggccttcatgtttagctctttaactttgcatccacccaatgccttgccgatagaaagatgtggcttgctttgtttctctgttccacgcatatggtactaccatttcctctgagactggctgttactgctcctttcctctgagaggctgatgtcaccagagtcaacaccagggcctctgaaggtgaaagatcctctgtgtactctgccttttttttttttttttttttttgagagggagttttactttgtcgcccaggctggagtgcagtggagtgatctcagctcactgcaagctccacctcccaggttcacaccattctcctgcctcagcctccygagtagctgggactacagctgcccaccaccacgcctggataattttgtgtatttttaatagagacagagtttcaccgtgttagccaggatggtctcaaactcctgacctcgtgatctgtcagccttggcctccctaagtgctgggattacaggcatgagccaccgcacccggccctttttttttttttttttggagatggagtctcactctgtcacccaggctggagtgcagtggtgcgatcttgactcactgcaagttctgcctcccggattcatgccattctccagctccagcctcccaagtagctgggactacagacacctgccaccacgcccggctaattttttgtatttttagtagagacggggtttcactgtgttagccaggatggtctcgatctcctgacctcgtgatccgcccacttcagcctcccagagtgctgggattacaggcgtgagccaccgcgcctggcttttttttttttttttttttttttgtctagctctgtcgcccaggctggagtgcagtggcacgatcttggctcactgtaagctccgcctcctgggttcacgccattctcctgcctcagcctcccgagtagctgggacttcaggtggccgccaccacgcccagctaattttttttgtatttttagtagagacagggtttcaccgtgttagccaggatggtcttgatctcctgacctcgtgatccgcccgccgcagcctcccaaagtgctgggattacaggagtgagccaccacgcccagcctactctgcctttcaaagggaaggtgtgagtgagccaacttctcaggcctgatccttaaccctgtgtccactctgccttgttttgtatttgatgtgactacatctttctcccctctttcctcaactatcttctagtgctatgacaggaagaagcttttccttttgaagggggccccttctgacctccatgctgattgctctgtctttgtccttttctccttaggtcttgggcgtctttggtactggcttttttaggggtctgcctggggattacccttgctgtggatagaagcaactttaagacctgtgaagagagttctttctgcaagtatgatatttctgggggagagggatggaatgtagggttgtagggtaatgtgggagatatctgtggcagatggagtgcctaaggacactgcaggtgatagactgacttagggacattgcaggtggcctttaccttacttcccaacccttcacttggcaggcgacagagaagcatacggccaggcctctctccataccgagccttgctggactctctacagcttggtcctgattccctcacggtccatctgatccatgaggtcaccaaggtcaggagagacaaggaagagtctggtgggggtggggcaatggctgtggggtaatttggaaagggggaaattgtggccaacatcttgtcccagcctaatctttggacttttactttatgaagaaatgtgatcttggcctttaggcaaagggctcaaaggaagaaaccccttaggagagaatgggttcaaagagcattccatggtgtatcccatttcctttctccagatccaaacctctgtccccgcaggtgttgctggtgctagagcttcaggggcttcaaaagaacatgactcggttcaggattgatgagctggagcctcggcgaccccgataccgtgtaccagatgttttggtggctgatccaccaatagcccggtaaatttttcctgagaaacatccatttctgtggcccctttctccttcctgatgaacctttttttggttgctgatattctttcccaaaataaggtagtagttaactagcatagcaccttgccatactcctcaacctttccccacctcttcttctgtttcacttttctctttatccctttatcctcattcattcattcagcaaacaattatkgctttttcctccctgacaggcctgggctggatgctggttatataagcagaaataaacaaggccctgtttatttacagatctagttctccaggaatacaatgtctacctgcttgcttgtttgcttscttccttccttccttccttccttccttccttccttccttcctcctttccttttccttagatattcagaataggattactcagattcttgtgtcatgatactctgtcaccagtgttccatgcatccatccatgactttctcttaaatacataattcagaaaataacatagtggccgggcatggtggctcaacgcctgtaatcccagcactttgggaggtcgaggtgggcagatcacgaggtcaggagttggagaccagcttggccaacatggtgaaaccccatctctactaaaaatacaaaaatcagccaggtgtggtggtgcggacctgtaatcccagctactcaggaggccgaggcaggacggttacttgaacccaggaggcagaggttgcagtgagccgagattgtgtcactgcactacagcctgggcgacagagtgagactccgtctcaaatactccaccctataaactcttcactcagcccaacccgcactgtcctgtacccttgacggctccagacgtaggtagtcgttattctgaagcttatccttcctttgccttttttttgttcttacagttgtattatgtgtgtatacatatgcacacatatgtctgtgtgcctaagcaataaattatatatattttttgtttttgagctttacagaggaagtgtcttagtgcatgtggtcttctggggtttccgttttttctttttttttttttgagatggagtctcgctgtctcccaggctggagtacagtggcgtgatctgcgttagccaggatggtctcaatctcctgacctcgtgatccgcccgcctcagcctcccaaagtgctggaattacaggtgtgagccaccgcgcccggctgggtttccgtttttcacataactttatttaattccatttcatatagctctagttcattcatttttactgctgcatattattatgttgtatgaatataccccaactgattaatccatttttaggttgataagccttggggttgtttccagtgttttgctagccaaagtgttgctacgaaccttcttgtacatgtctcctgttatccttgcttgggagtttctctttggtgtataactaggagaggaattgcaggattgtagaatatggagatgatcagcttcgcaagataaagccaaagtggtttaccaatttacacttccaccagtgatttataagaagccctcattgaagctgggcaagccaggatggtctcgatctcctgacatcgtgatctgcccatctcagcctcccaaagtgctaggattacaggcttgagccaccacacccggccagccttccctattattaatatgactatggttcatttgtgatacctagtgaattgatagtgatacattagttactaaagttcatacttgaggtttctttagtttttgtgtatgttctttttctgttccaggatttcatccaggatatgttattacatttagttgtcatgtttccttagggccctctagactgataaaatttcttagacttttcctttttcttaatgatcctaaaggtacttttgataaacagaaattcctaattttaatgtatttagatgtatcagtcttttaccttctgttgttagccttttgtttgttgtatttagtctttatctaccccaaggtcagaaaaaaawatatatatatatattttttgagacagagtcttgctctgttgcttaggctgagtgcagtagtgcgatcttggctcaccacaacctccgcctcctgtgttgaagcgattctttcttcagcatcagcctcccgagtagctgggactacaggcgtgcaccactatgcctgagtagctgggactacaggcgtgcaccactatgcccgagtagctgggactgcaggctcatgccactatgcccaagtagctgggactacaggcgtgcgtcactatacccggctactttttgtatttttagtagagacagggtttcactatgttgaccaggctggtctcaaactcctgacctcatgatccacctgcctcggcctccgaaagtgctgagattacaggaatgagccaccatgcctggccaaaaatatattttttaattttcttctaacacttttgctttcatttatttacttattttgagatcgggttatgagactggctaatttttgtatttttggtagagatgggtttttgccatgttgcccagtctggtcttgaacaccagggctcaagcgatccacctgcctcggcctcccaaagtgctgggattacaatagtgggccaccgagcccatcctaaagcttttacttttaaattttaagcaggctgggtgtgatggctcatacctgtaatcccagcacttcgagaggccaaggcggacagatcacttgaggtcaggagtacaagaccagcctggtcaacatggtgaaaccccgtctctactgaaaatacaaaacttagccgggcgtggtggtgggcgcctgtaattccagctactcgggtgcctgatgcacaagaatcacttgaaactgggaggcagaggttgcaatgagccgagattgtgccactgcactccagtctgggtgatagagtgagactatcttaagaaaaaaaaattttttaagtcataatctttctgcagttgatacttgtatctggtattagatagaaatatgatatcaaggggttgggcgtggtagctcatgcctgtaatcccagcactttgggaggccgaggcaagtggatcacttgaggtcaggagtttgagattagcctggccaacatggcgaaaaatcatatctcctaaaaatacaaaaaaaaattagccgggtgtggtggcacctgcctgtaatatcagttactagggaggctgagtcaggagaatcacttgaacctggaaggtggaggttgcagtgagccaaggttgtgccactgtgctccagcctgggcaacagagcgagactccatctcaaaaaaaaaaaaaagaagtacatcatttttcttcatatttggaaaatcatttttttycctatatggaaaatgttttttcagttccatttttgaatagttctcctttcctctctcatctgctatgccacctcttagtatttagtacatttaaaaaagtaataagtggccaggcacagtggctcacgcctgtaatcccagcactttgcgaggccgaggtgggtggatcacctgaggtcaggagtttgagaccagcctcaacatgaagaaaccccatctctactaaaaatacaaaattagccaggtgtggtggtgcatgcctgtaatcccagctatttggaggctgaggcaggagaattgcttgaacctgggagacggaggttgcggtgagccgagattgcgccattgcactccagcctgggcaacaagagtgaaactccgtctcaaaaaaaaaaaagaaaaaagtaataaatatgcttgggtctgtttctgggccctttggttctgtttattaacttgtctatccctgctctgttaccacactgcctatttctcttaacaggtagatttcccccggtcttctaaagtgtcattactcctcttggccctttgtacttccttatatttcttttgatatgtttcccaggctttctgtctctggtcgtgatgagaacagtgtggagttaaccatggctgagggaccctacaagatcatcttgacagcayggccattccgccttgacctactagaggaccgaagtcttttgcttagtgtcaatgcccraggactcttggagtttgagcatcagagggcccctagggtctcgtgagtacaggggttgggactgcagggaacctagtgtgaaagagcataggggtgttgtgaggtctggcacggggaggagacggtggtgggacagccaggtagggcctgggggctgggagaagctctctgtcagggagggtaggaaccagacccgggtgcggttttttccatttcctgtacagaccaggaggcagtcacttttgtccctgagctgtaccctgggcatctctgggaggcctgcctgggtctgtgtctccttcttccccttctcacatcatcacatttcccagatttattttcttcgtttttatttatttattttttttggtttctttttccccccatctctggaagtttgtcgactgaaactcacttttatgtttctgtttttgtgttggttttgtgcctctttttccccttccctacccatctcctcctgccccagtttctcggataaggttaatctcacgcttggtagcatatgggataagatcaagaaccttttctctaggtaaatccatggccaccggtactgtatctgttcctctgcccttacccattcctcactctagccttyggggggaggtgccccagacccttccagcctttcactcaccccactttcccctgctgtgtgatgtctggtcctgttacctgttaccctggctgggarcccccagaagaaggaaggtgagatactgaaagtcaggtccttcgggaatgtagggagcttattgctttgccaggggatggagagatgctgcctattgctggggttcctgactctcagctgaggggcacctgaggttctgggcagagctacttgcccttgaaagcattttttggcagaatctcttgaagtccctatgtatgtctgtagaggcttggtatagtatgacccacatgcctttgcaaagccattgtgtcaggccaggaggctgaggcccagggagagcacttggggccagaatctctcagtagaggcaacagagccaggattggcattcataacccaggcccctgaatcattctgcctttctcttctgggatgttgacagaggctggtgttcaggcctgtgcctcctggtggcacttattcctcattttcctttctcatttctctccccatcctttgcaaacttatctgctcattgtgggttccctctccaagctttaacatttagtcccttcctccaatgccttcgttcctttggacccttggctctctattccccaacccctccttccactagcccctcgtccctgccccctctggattggagcagacagctctcctaccttccaggcaaggatcaaaagacccagctgagggcgatggggcccagcctgaggaaacacccagggatggcgacaaggcaagttggagcgggtgggtggttggaggatagggctggctgggagggtggaggggagaggcccatgagaaacttgaacttagtctccccatcagggatgggatttagttgatgggagcggggaaagagagaactggtatgattggagagtggtcctcttttcttcttaacagccagaggagactcaggggaaggcagagaaagatgagccaggagcctgggaggagacattcaaaactcactctgacagcaagccgtatggtgaggggctcgggttccttgggctggggtgcagggctcctttccaagcagaagctctgaagcttgtttgtttttcttccaggccccatgtctgtgggtttggacttctctctgccaggcatggagcatgtctatgggatccctgagcatgcagacaacctgaggctgaaggtcactgagtgagtcctatggtgacatcaggaagatggaggtgggcaggaaggagtcaggcctttagggagatgggtgtgcatattggatactctaggcaagcatgggtcatttcttgtgtccagaatcacctttggtgatagaaaattttttgagaaaggacaagaggagcctttgcttatctctcacctgtgtctgtggagtggtgttagcatataacgcagcctggggccagttagcagcccaagtctgtctgtttgcctgcaggggtggggagccatatcgcctctacaatttggatgtgttccagtatgagctgtacaacccaatggccttgtatgggtctgtgcctgtgctcctggcacacaaccctcatygcgacttgggcatcttctggctcaatgctgcagagacctgggttgatatatcttccaacactgccgggaaggtgagagcacaggcacggggraaaaggagggagtgaagcttccaggccttgaggcaaataggtatactaggggcattagctatttggggactgggtttaagaaggggctgtgggcctggtgggcagcatttgagttccctaatcactcccaggtgacacgctcactcacattcttagggaaggcattgcctattctgggctgacggaatgcacttattatcagtgtgttacgtgctaggtactcttctgggtgctggggatatagtgttaactgaggttgaaaaggttctgggctgggtgtggtggctcatgcctgtaatcccagcactttgggaggctgaggtgggcggatcacctgaggtcagaagttggagaccagcctggccaacatggcgaaacctcatctctactagaaaaacaaaaattagcagggtgtggcggcggactcctgtaatcccagctattcgggaggctaaggcaggttaattgcatgaatctggttggtggaggttgcagtgagcggagatttcaccactgcactccagcctgggtgacagagtgagactctgtttcagaaaaaaaaaaaagaaaggttctgactcacagggaggaagacacgttaaacacataacaaaggaggcaagatggggccgggcatgatrgctcatgtctgtaatcccagcacttggggaggctgaggcaagaggatcgcttgaggccaggagttcgagaccagcctgggcaacatggcgagaccccatctctataaaaacgtttgaaaaataaaaataataagcaagatgatgccgggtgcagtggctcccacctctaatcccagcactttgggagggcgaggtggacagatcacaaggtcaagagatcgagaccatcctggccaacattgtgaaaccctgtttctactgaaaatacaaaagttagctgggtgtggtggtgtgcgcctgtagtcttagctactcgggaggctgaggcaggagaactggttgaactggggaggtggagattgcagtgagctaagatcacaccattgcactccagcctggcaaaagagtgagactctgtctaaaaaaaaaaaaaagaatgcaagatgagtttggggtgattaagtgctaacaaagacatgaaagagagtctttgttagcacttaaccaccccaaactggtggggtaggggtgggggctgtactgctttagatagtgtggtctaggaaagcctcactgaagaggccccgtttagtcttaccgaaagcagcttacatgagccagctctgtgtggactctgggagaaaattgctactttttgtcttggggttggaaaatgggagggcaggaggtgtctgacccctttgtggtcacctatacagaccctgtttgggaagatgatggactacctgcagggctctggggagaccccacagacagatgttcgctggatgtcagagactggcatcattgacgtcttcctgctgctggggccctccatctctgatgttttccggcaatatgctagtctcacaggtacatggttttccctgcctcattcttctgctcttttcttgtcgggtgattctatgtgttttcagagatcctgtgccccagcttgttttctaggtttatacccctcagcctgcctctagttcacaagcctccctcagtttctgggtgttgggcctgatcctcgttgtgacccccatccctcatgaacctgcaggaacccaggcgttgcccccactcttctccctcggctaccaccagagccgttggaactaccgggacgaggctgatgtgctggaagtggatcagggctttgatgatcacaacctgccctgtgatgtcatctggctagacattgaacatgctgatggcaagcggtatttcacctgggaccccagtcgcttccctcagccccgcaccatgcttgagcgcttggcttctaagaggcggaaggtaaggggttgcagtcacgcttggtcttctcagggtagggctgaagcatagtttagccttaaagagacctgaacacccctgttccttgcccccagctggtggccatcgtagacccccacatcaaggtggactccggctaccgagttcacgaggagctgcggaacctggggctgtatgttaaaacccgggatggctctgactatgagggctggtgctggccaggtaagcagacccagaattgagggagagttgattggccagcggggtagaatggtggctcttttgccccttaggggattgagagccacccttaacttctcccaggctcagctggttaccctgacttcactaatcccacgatgagggcctggtgggctaacatgttcagctatgacaattatgaggtagggaaggcctctccccatgacctgcgtctgtctgttccacctgcctccctgaatctctctcggcttgccaacccttctatggttgattgcctgcaacatatcagggggccttgatgatccggggagggccctgaaaaatgcatctttttagattcctaggagctctcttctctgacactgtttgtcttcttcctcccctctgtccttctgtccccattttctgcccacgttcccagggctcagctcccaacctctttgtctggaatgacatgaacgaaccatctgtgttcaatggtcctgaggtcaccatgctcaaggatgcccagcattatgggggctgggagcaccgggatgtgcataacatctatggcctttatgtggtaagggcctgagagaggagagttggtggaaagagggaaaacagcccagagactgagggcctagggaacttgcaccagatgacagctggcttttgctcctcactacccstctcttctctcctcacccagcacatggcgactgctgatgggctgagacagcgctctgggggcatggaacgcccctttgtcctggccagggccttcttcgctggctcccagcgctttggtaaggtttagagaatggagctgtggcagaagggtgtgaaggccagatctcaggagccatggacctggacctgcctctctgaggaatgggagccacacactgcatctgtttcctctcagctatgcgctttgaaggaagtcagggtgtgggaggtccactccttgttcaaatgttcttgtgaactgcatcttcagcagggttctggggacccagagcggatgtgggaggtcagccatgtaaaaagctgaactcctttaccatgtgcaagctccccacttcttgtcttcctcaggagccgtgtggacaggggacaacactgccgagtgggaccatttgaagatctctattcctatgtgtctcagcttggggctggtgggactttccttctgtgggggtaagacagggaggaatttggggtcttggtttggtgggaaaggggcaaagtagagggcacaggaccaaggtgttgtaagcaaagagagttgagagtccaagttagggccttgggaagtttctcaagcagtatctctccttcaccctcttttccaacctgcttcctctctctyctctaccagcggatgtgggtggcttcttcaaaaacccagagccagagctgcttgtgcgctggtaccagatgggtgcttaccagccattcttccgggcacatgcccacttggacactgggcgacgagagccatggctgttaccatctcagcacaatgatataatccgagatgccttgggccagcgatattctttgctgcccttctggtacaccctcttatatcaggcccatcgggaaggcattcctgtcatgaggtgaggcattcacttgggctgtgaagagtgggctgaggtggctgggggtattagggactgggcttcatctctgggtctctttcttcactcactacagccttgtaaaggatggaaaatcattaaggtcaagagtgaaggggagcttaatggagatgaataatagtaaacatttaaagaaaattgacagcagtcataagctctttcagaaaaataaaacagggtaatgggattaggtggtcataaaatccctttttgaggccgggcacagtggctcacacctgtaatcccagcactttgggaggccgaggtgggcagatcacctgaggtcaggagtttgagaccagcctggccaacatggcaaaaccccatctctactaaaaatacaaaaattagctgggcatcatggcgcctgtaatcccagctactcgggaggctgaggcatgagaatcacttgaacccaggaggtagaggttgcagtgagccgagattgctctgctgcattctagcctgggtgacagagggagactccatctcaaaaaaatgaaaaaaaaaaaaaaaaaaaagttttgagaagaaggctgtgtgagatgaggcctgaatgagtgggacagaccatgttatgtaggaagaatcttccaagcagagggaattgcaagtacaaaaattctaaaggagaaattagtttgttatgtactaggaatagaaaaaaacagtatgtcttgggtaaagaagcagaaggagagctaggagatgagattaagaagaaagtgtgatctgctcctggagggccttgcaagccagggttgcaacccagggttgtaagccagggcggtgaaacatgcaaggaggctactggcaggctgctgtgcagcatggtttcagtagagggcagagaagaagcagggagatggcttaggaagttaaatgtctaagactggattgtataactgagacctgaaccccaacccgactgtctgactgcaaactcctgggtcttaacccctgtgctgttcttttcttttctttttttttttgagacaaagtctcactctcgtcccccaggctggagtgcgatggtgtgatcttggctcactgaatgcactccgcctcccgggttcaagtgattctccagcctcagcctcctgagtagctgggatcacaggtgcctgccaccatgccyggctaatttttgtatttttagtagagacggggtttcaccatgttgttcaggctgatctcgaactcctgacctcaggtgatcttcccgcctcggcctcccaaagtgttgggattacaggtgtgagccaccacacccggcctatgctgttcttttcttattgccagttcctggaggagcatytctgacttgtgccaaaattgaaaagttttcctttattgtctttcttccttcctaggcccctgtgggtgcagtaccctcaggatgtgactaccttcaatatagatgatcagtacttgcttggtgagaaatgaggatagttggtggtgggttggctttgggccaagcagcactgcggatgcccagggagggactagtgaagctggtggtgcagagggcaggcactttggtgttccctgttctgggaactaatccccctattcagagttgattctggcatattttaggggatgcgttgctggttcaccctgtatcagactctggagcccatggtgtccaggtctatctgcctggccaaggggaggtgagttaaggaagggcatggtggggaaagatggtggaagccaaaggaggcaaacaggacgggacccctgtgcaytgagtgatccggtatcttacctcttttgtcactcacaggtgtggtatgacattcaaagctaccagaagcatcatggtccccagaccctgtacctgcctgtaactctaagcagtgtgagtaagcctggtctggctgccggttccatctscctgtaaatttccagaaggggagggaatgtgtgccttagggtccagtacctatgtgggcatacatkagtaagcaaaacatgctgtggggcccaaggttggacaagggggcaacttcatcctggcattgctcttgccctagatccctgtgttccagcgtggagggacaatcgtgcctcgatggatgcgagtgcggcggtcttcagaatgtatgaaggatgaccccatcactctctttgttgcacttagccctcaggtaagtgcataggcagcgagtctcctcagccatttgcctgccttcctaggactcagttctctggggttgtgcccctcactccctcttgggctcaggcgctcacctatcccacttcttgctcagggtacagctcaaggagagctctttctggatgatgggcacacgttcaactatcagactcgccaagagttcctgctgcgtcgattctcattctctggcaacacccttgtctccaggtaatgggtcacccactcttccttggctgcctttgctggggcctgatccttgtgggggctcccagttcactgtgctcttttctcacattctgaccttgctttgggtctcctccttccttctgttctgttatttttccccctgatggacatctgcttttaccatctccagctcagcagaccctgaaggacactttgagacaccaatctggattgagcgggtggtgataataggggctggaaagccagcagctgtggtactccagacaaaaggtgagtgaccaatctggcccctaggatgggggaaggagrggaagccggggcaggtttagggatgcccttgcctgtaggaacgttgttgttatgctatagcccattggtatgactatggcactcttttattcctcctccaggatctccagaaagccgcctgtccttccagcatgaccctgagacctctgtgttggtcctgcgcaagcctggcatcaatgtggcatctgattggagtattcacctgcgataacccaagggatrttctgggttagggggagggaaggggagcattagtgctgagagatattctttcttctgccttggagttcggccctccccagacttcacttatgctagtctaagacccagattctgccaacatttgggcaggatgagagggctgaccctgggctccaaattcctcttgtgatctcctcacctctcccactccattgataccaactctttcccttcattcccccaacatcctgttgctctaactggagcacattcayttaygaasaccaggaaaccacagggcccttgtcgccccttctctttcccttatttaggagccctgaactcccccagagtctatccattcatgcctcttgtatgttgatgccacttcttggaagaagatgagggcaatgagttaggkctccttttccccttccctcccaccagattgctctcccacctttcatttcttcctccaggctttactcccctttttatgccccaccgatacactgggaccaccccttaccccggacaggatgaatggatcaaaggagtgaggttgctaaagaacatccttttccctctcattctayccytttcctctccccgattccttgtagagctgctgcaattcttagaggggcagttctacctcctctgtccctcggcagaaagacgtttcyacacctcttaggggatgcgcattaaacttcttttgcccccttcttgtcccctttgaggggcacttaagatggagaaatcagttgtggtttcastgaatcatggtcacctgtatttattgctaggagaagcctgagggtggggggagatgatcatgtgtgctcggggttggctggaagccctgggtggggggttgggggaggactaatggggagtcggggaatatttgtgggtattttttttacttcctcttggttcccagctgtgacacgttttgatcaaaggagaaacaataaagggataaaccataaataactggtggtagtctggattctagttctagcctgagccacagaccctagaagcctagagaccttacatttgctttcctttttttttcttttttgagactgagtctcactctgttgcccaggctggaatgcaatggcatgatctgggctcattgcaacctctgcctcccaggttcaagcagttctcgtgcctcaacctcccgagtcgctgggactacaggcatgcgccaccatgcccagctaatttttgtatttttattagagatggggtttcaccatgttggccaggctggtctggaactcctgacctcaggtgatccgcctgcctcggcctcccaaagtgctggaattaaaggagtgagccactgcgccctgcgtcttttttttttttttttttttttgagacagagtgtcgccaggctggagtacagtgtgtgatcctggctcgttgcaacctctgcctcctgggttcaggcagttctcccacctcagcctccttaatagctgggattacgggcacctgcgaccatggccagcttcatttttgtatttttagtagagatggggtttcgccatgttagccatgctgatcttgaactcctgacctcaggtgatctgcccgccttggcctcccaaagtgctgggattacaggcgtgaggcaccatgcctggccatgggccttacattttcatttggcttcagcataagcatcctttttgggttttttttttttttttttgagatggagtctcactgttgcccaggctggagtgcaatggtgtgatctcggctcactacaacctctgcctcccaggttcaagcgattctcttgcctcagcccccaagtagctaggactacaggcacctgctaccacgtctggctgatttttgtatctttagtagagatggggtttcaccatgttgtctcgaactcctggcctcaagtgatccacctgcctcggccttccaaagtgctgggattacagggatgagccactgttcccggccagcatgagcatccttgatttcagcaaaatgagcaagtgcaagccttccttgggttgctagatattttcgtagaagagcccagcaagatcatcacattttagtaggcctagttagtaagtggtgatcagagccaatggagtccctcttggatagaaatagccataaggtcagatagctgtttctcaaactaaacttttggaggatgtcgggggttgaggagacatagtttcgctctattgctcaggctggagtgcggggagtgctgtggtatgatcctggctcattgcagccttgacctcccaggcttctaaagttctgggattacaggcatcgatcactgtgcccaacctagaggcttctgcttgtagctaacagcacttttgtttttgtttttgtttttgagacggagtctccctcagtcgcccaggctggagtgcagtggtgcgatctcggctcttggcaagctctgcttcccgggttcacgccattctcctgcctcagcctcctgagtagctgggactgcaggcgcccgccactacaccctgctaatttttttgtgttttttagtagagacggggtttcaccgtgttagccaggatggtctcgatctcctgacctcgtgatccgcctgtctcggcctcccaaagtgctgggattacaggcgtgagccaccgcgcccagctgctaacagcactttttaaagtttcccattgttttagtgacaggaagtatactgttcccccttcccctcattttgtagactgaccacaagtcagagattattttaccagaaactttttttggggggttattttttttttgagacggtctcacccagtcacccaagctggagtgcagtggcatgatcacggctcaccacagcctcagcctcccatgtcagcctcccaagtagctgggactgtaggcccgcgccatcacacccagctaatttttgtgttttttttgtagagacggggttttgccttgttgcccaggctgatctgaaactcctgggcttctaaagtgccaggattacaggcatgagccactgggccgggcccttttttttttttttaaaggaaaaatgagaaggatggcttgtgcttgtgaggaggaaggggatgcattcatggaattccccagctcaggaactatttccaatcaatttcctggtagttaaaacacttccttggcacccctgttgtcatctgttgaagaaatgtgggccagaggacacactagagatgctggaatcgggtgtccagaaaggacacaaaactgccctgtggcaatgacataatttttgtcaactttggtttcttatctatctcaaagtattatagtgaggattccaggagagacacccagaggatcatgtggtgggccttagatttcattcgtgtaataagtattgagcaacagctattgggtggcgtgactgactggatggatgaataaggtgaagatctgggcgccaggactggctttctcaggcaattccgtgatgagggggcgggtctcgaggtaggtaccacgtgcacctactcgagattctgcacctacccggggttttgactgccggccacgcgagtttggcacgccggatgtgacgtcaccacccggtggttcccggaacctggcggtgggaccggaaatcaagtctacaaggcgggggggtgcacagatgaccggaagcgtgccctggcggcgctgccagccccagctgggagctggtaggggagtgcgaggaaggcgggacgcagggcggagccgctgcaggggcggggcctgcggacaggagccggggtttggggcgggaacccctcgtcccctgcagaccccgcctgctcgggcgcgggcggcggcgcggccatgaagctgaagctgaagaacgtgtttctcgcctacttcctggtgtcgatcgccggcctcctctacgcgctggtacagctcggtgagcggggcggggcgggggtgcggcgggctggcccgagggcgcccgccgccgtgcatcccgccctggggatgaacccccggcaaacaccattcatccgctcggccctccggacagctctgcggcctcaggcgcactgccctctatagaacgcaccgcggctacccgccgcacctcggatgaaatccagactccttcccagagcctgcaaggccccgcatgatcctgctgccgtccgcctctcccaaccccatttccacccctctccctcgctctgctgcagccagactggcttgctgacagtttctcgaaaaccccacgctcattactctctcaagcacttaacttgttccctctgcttggggtgctttgcttccagcgtttcccgggctgcctctttctcatccttcaggtcttagctcaaatgtcacctcctcagagaggccttccctgaccaccatagctaaagttaccattcttaattccattcccttttattctctatcctgattattttcttcatggccccatcacagtttgtaataatgttattaatttgtttctttgcttagtgtctgcttcctccactaaacagaaagctcgatgagggcagggactgtgtctgttttgttccctgctgtatccccagcacctaaggcagtgcctcctaggaagagtattcaataaatatttatcctacgatggaatcaatgaatttaacaatgagtctttggtcacctagccaagggaatggatcgaaccctgccccttatgcaaagatttagggacagtgccactgcgttatcctcaggtatttgaaagactgtccaaaaggggttccatagtgtaatggttagttggcaccttggactctgaaaagactgtcctgtttaaggacatgagcttgttagaagcccagaaggcaaaattaggaccagcaggtagaaaagatggaatcagctcaatatccaacataaaattgtaacaatggaatttattaaagttggagagggtctgctgcttgaggcagtgagtttcccacacgagaggtatagaaaaggctactagggaagtcataaggtgatacctgcattggttaggaattaatgagacgattacggccctttgggatgctgaacattctgcggttctctgtccccaccttctttccccattaatgcttcctgggaccaggccagccatgtgactgccttcctcccctgcgggcagcagccgagcagctacggcagaaggatctgaggatttcccagctgcaagcggaactccgacggccaccccctgcccctgcccagccccctgaacccgaggccctgcctactatctatgttgttacccccacctatgccaggtatgggctctggtgcactcaagaggtctgcgttgtccaagaagttggagttgatgatgaggagtttggggaggcactgggctaggagttgttcctcaaactagagcatgccaaagacaggataaatgaaccacatttatactcaaatatttgtgggaaaatagttctttttcaggctgggtgtggtggctcacgcctgtaatcccagcactttgggaggccgaggcgggtggatcacctgaggtcaggagttcgagaccagcctggccaacatggcaaaaccccgtctctactaaaaatacaaaattagccaggcgtggtggcgcatgcctataatcccagctactggggaggctgaggcaggagaatcccttgaacctgagaggcggaggttgcagtgagctgagagtgcgctattgcactccagcctgggcaacaagagtgaaactccatctcaaaaacaaaacaaaacaaaagaaaaaagaaaaaaaatagttctttttctagaaggaaaatacaaaatttctaccaaattataagatagaacaataacatttcaaagaaattttgagcttggcagtgaattaactctctctccttagggaccgtttggcaagaaagttaaaaccccctgattaaagttgaaagggcttgtctgggcgcagtggctcacgcctgtaatcccagcactttgggagcccgaggctggcggatcgcctgagctcaggagtttgagaccagcctggacaacatggtgaaactcttgtctctgaaaaaaaaaaaaaaaaaaaaaaaaaaaaaaagttagctaggcgtgatggtgcatgcctgtaatctcagctactctggaggctgaggtgggaagattgcttgatcctgggcggcggaggttgcagtgagtggagatcatgcagcctgggcgacagagagagcccatttcaaaaaaaaaaaagttgaaagtgcttggcctgatagtcatactagggtccagaaatagttataccagctgttacttacagtgtgtttactctctagcaggcactgtatttagtgatttacatttgcttttgttttaaatcaaatgtaattggttttactaataaaaccaattggggaatgtggttttggatctgtagccataagggtgttaatacatcttctgggaatcagatggctgtcccattcacgcataggaagctctagaccccacctgcgacatgcacacacaaccagccctgggacaggcaggtagatctgaaggataaagaagtacagaagaggccaagccccacgttccacattcctggtttgttccttttttttttttcttccccccgcctccccgcaacaccgagatggagtcttgctctgttgcccaggctggagtgcagtggtgtgatcttggctcactgcaacctccacctcccgggttcaagcgattctcctgcctcagcctcccgagtagctgggattacaggcgtgcaccaccacaccaggctaattttttttttttttttcccgagatggagtctcactctgtcgcccaggctggagtgcaatggcacgatctcggctcactgcaacctccacctcccggattgaagcaattctcctgcctcagccccccgagtagctggggttacaagcatgcgccaccacacccggctaattt

SEQ ID NO: 94810 - DNA, 19511 bp, Homo sapiens
tcttcctacctcagcctcaaaaatagctaggacatgcctgggtgtggtggttcatgcctgtaaccccagcacttcgggaggccgaggtgggtggatcacgaggttaggagttcgagatcagcctggccaacatggtgaaaccccatctctactaaaaatacaaaaattagccgggtgtggtggcatgtgcctgtaatcccagctacttgagaggctgaggcaggagaattgcttgaacccgggaggcggaggttgcagtgagctgacatcacgccactggactccagcctgggtgacagaacaagactccatctcagaaagaaataaatacagagagagagggagagaaaagaaagagagagagcgagaaagaaagagagaaagagagaaggaaggaaggaagggaaggaaggaaaggaaggaagaagccaggactgcaggcacatgccagtatgcttggctaactttttaagttttttgtagaggtggggtctcactatgttgtccaggctgatgtcgaactcctgggttcaagtgatcctccttgccttggcttcccaaggtactggaattacagctgtgatccaccgcgcctggccaataccatttcttataagagccggcactgcctttcatttagctgccccagccaaaagcctcaaagccattccccatcctatcctctctccctcatgtccatttccaatccatgttctttctagccttgctgctaaatattattcaaatcctttcacctatcacgccctctactgcccccagtctcatgtaggcaccatcatctcccacctggactggtggcgtaccctcctcactggcctgcctctcaacttcctgcaatctattcaccccacagctagagagatgtttaaaacacaaataagatcatatcactcctgctcaaaatcctcctattaggatatgtaataacagcaaacatttacatagcacttactatatgtttggcattctggcaaatgtgttatatatatgcagtttatttatttttattttattttattttttgagtcggagtctcgctctgtcgcccaggctggagtgtaatggaatgatctcagatcactgcaacctccgcctcctaggatcaagcgattctcctgcctcagcctcccaagtagctgggattacaggcgcccaccgccacacccagctggtttttgtatttttagtagagatggggtttcaccatgttggccaggctggtctcaaactcctgacctctggtgatctgcccacctcagcttcccgaagtgctgggattacaggcgtgagccaccacatccagcctatatatgcagtttatttaaataaaaatacaaaactctctactgttttccacaaggtcctgcaccattcagcccccataacctctctctcctctgttcactggactttgatgaagtctctttgctgttactcaaacaggccacctcagggcctttgcacttgctgttccctcttcttggaatgcccttctctttgttcttttgcaagtcacccctgcttatccttcaggtccccattaaaatgtcacctttggccaggtgcagtgcttcatgcgtgtaattccagtatttttcagaggctaaggcaggatgatgacttgagcccaggaatttaagaccagcctgggcaacatagggagaaccctctctaccaaaaaaaaaaaaaaaaaaaaaagaaaattgaaaattagttgggcatggtggtatgtgactgtggtcccagctacttgagaggctgaggcaggaggatcgtttgagcccaagagtttgaggctgcagtgagctgtgatggcaccactgcaatctagcctgggtgccagaatgagactttgtctcaaaataataaataaataaaaataaaatgtcacctttgcagggaagcttttcctgacatcccccatctaagctgagctccccatgacacctcagagctcccagttcccccaaacatgagctcaggatgtagttaattaagcagttacttatgtgattcacaattgtctgtcttgccttcattagaacataaactccataaggcccaggacttttgtctacttgtttattgctctattcttgcatccacggcacatagcaccagctcagtcaatatttgttaatcaaacaaattcaccaatattgggcaccaacttacaaactggcacagagcctggaaagtggtcagtgttcaaattatgttgaatgattaaattactgttggaggccaggcacggtggctcacgcctgtaaccccagcactttgggaggccaaggtgggcagaacacctgaggtcaggagtttgagaccagcctggccaacacagtgaaaccctgtctctactaaaaatacaaaaattggctgggtgtggtggcacacacctgtagtcccagctactcgggagcctgagggaggagaatcgcttgaacccaggagtcagaggttgcagtgaggcgagatctcaccactgcactccagcctcggcagcagagtgagattctatttaaaaaaaaaaaaaacaaaaacaaaaagccgggcgcggtggctcatgcctgtaatcccagcactttgggaggctgaggcgggcggatcacgaggtccggagatccagaccatcctggttaacacggtgaaaccccgtctctattaaaaatacaaaaaattagccgggtgtggtggcgggcgcctgtagtcccagccactctggaggctgaggcaggagaatggcgtgaacccgggaggcggagcttgcagtgagcggagctctcgccactgcactccaacccgggcgacagagcgagactccgtctccccccagaaaaaaaaaaaagaccgggtgcggtggctcacgcctgtaatcccagcactttgggaggctgaggcgggtggatcaccagaggtcgggagtttgagaccagcctgaccaacgtggagaaaccctgtctctactaaaaataaaaaattagccgggcatggtggcgcatgcctgtaatcccagctactcggaaggctgaggcaggagaatcgcttgaacccgggaggcggaggttgcggtgagccgagatcacgccactgcactccagcctgggcaacaagagcgagactccgtttcaaaaaaaaaaaaaaaaaaaaaaaagactgttggaatcagaaaatgtaggcgtgggaaacgagagataaaagatctctccctgccccctgacagctcccgcctctcccacagctccggggaaccttgtacaacaccggccgacatgtctccttcctgcctgcaccccgacctgtggtcaatgtgtctggaggtcccctcctttacagccaccgactcagtgaactgcggctgctgtttggagctcgcgacggagccggctcggaacatcagatcaaccaccagggcttctctgctgaggtagtggccactgattgtttacccgccaccctccgccctgagtcaccccaattcctcccacctcaccctcttagtgtctcaccccatcctcctccacagaactggcctcccaccctaagcactaatcctcagcctgattcgggcccccaaagctggggtcatgctctcctccccttctgctgggggaccccatgctctgtgctacccccaggtgcagctcattcacttcaaccaggaactctacgggaatttcagcgctgcctcccgcggccccaatggcctggccattctcagcctctttgtcaacgtgagcggaggcgagattcggagggagggagcagttgggtgcctggaacccggggtctgagggaagcggggtgctgggaggcccagactcctgggtcctgggggaggagaaggttgagggcttggacttctgggctcctgtgtcctcacctcgtacccccacacaggttgccagtacctctaacccattcctcagtcgcctccttaaccgcgacaccatcactcgcatctcctacaagagtaagtccctggcgtgctgggggcagtggtcacacacgagggggttcaagagtgccatccctctttactctggcctgatattcccgcagatgatgcctactttcttcaagacctgagcctggagctcctgttccctgaatccttcggcttcatcacctatcagggctctctcagcaccccgccctgctccgagactgtcacctggatcctcattgaccgggccctcaatatcacctcccttcaggtgaccctctgtccgcaccgcccttcctaggcctgggtactccactcactggcctgggcatccccttgctcacctgccctccctctcctcatagactgaactcaagtaggtaagagggtcagaccaccttgggggtgggtggggctgagaacagaccccgcccacctgctcccaggggcggggtttcctgcgtgacgtcaccaagaccattcactattcactcccagtttcccaccctccttccactgcagatgcactccctgagactcctgagccagaatcctccatctcagatcttccagagcctcagcggtaacagccggcccctgcagcccttggcccacagggcactgaggggcaacagggacccccggcaccccgagaggcgctgccgaggccccaactaccgcctgcatggtatggtccagtctgcaccccctctaagtcttgggctaaccctcttatatgtgtctccccttggtgtctcagtgtgattcagtcccatcctccttcctgcgtctatatggtctagcctcgtgagctgtctctttttctctctttccctacatgtctatgtggtacagtccacctgccagccctaggccattgctagcccacgatttgtctttcctcttcactgctttgtaacttggtctataacccttgacccctgccttcctatggtccaattacctactgttctgtgcttcctattactgtgaatttccaaaatggtacaatttggatcctctctccctttccaagtcgtactaccttacgctgttccacaatctgatgctcccttcccccttactgagaatctacaaggtacaaccccttccctccacctctgcctccctgtggtttagcccaggaatctcacacacccccggcttcgcaacatggtacagtccacaccccccccccccatgaagaccttcaagtagttcagcctactgctgaatctggacgtcccgattcccccctcctattggcttcttgtggttcagcccagtgcttctcgacctagtacattctggttccccgctcgcagacttccgacggtagggcccagcgcggcgcagcccacgccccctgcacaccccccgccccttccatcctatactgacgccccctgccgttgttctctgtcttacagtggatggtgtcccccatggtcgctgagactccccttcgaggattgcacccgcccgtcctaagcctccccacaaggcgaggggagttacccctaaaacaaagctattaaagggacagaatacttcctgttttctcagtggtctgattctaggcgcggtggggaaacatttgggtattaaagaacagacttcttccggaaaccaatcttcctctttctaaacctccgctctcggtattttggcttcctgcttctcaaaaccatctttaggaccgcggcccctttaagcggcgccccttttccccccatcacccccctcgccatcaggcagcacgagcagagccatgtgcttccccctcccgcctgcctcattggcccaaactgggtcacggtcccgccccccagtaccgcctcccattgggcaaatgtaggtcagtgtcccgcctcccaccgaaaggcaaggcaacttcacgcgctgagcccctcacgcgccctcctgggccctggcggacccagaggccccattggctgtgcgtctcaaggtgtcggagacgattggtccgtgtttgcagccggagggaggcacgcggctggggtgcatgcccatagaggctggcggggctggacgcgccgggcggggacccggaggaggggcgcgcgctgtggcgtcgggtgttttggtttggatttttttttccgcgaaagaagtttgctttggccacgcctcaaggcggccgcctcctcctgccccctcctcsgcccctccgcgcacacctctcggtgcagattgcaaagcgccttccrttgcgagagctgcagattttgcaagagccaggctcgcccaccttgtagaaggagcgccttgagtcccctctcaccctcggttgcaaagagccgaccgcttgatctggacaccccctcgcccagattgcatgatctcccgggaccctcttgagttgcacgtttctgcaccgaggacctcaaatccccgtcgctcctaggatttgcagcgttctggatactggagggttgcaggctacactcgcccgcccctgggcagacactcgtccaaaccactggagtgtgctggtgactsgcaggccagcccttcgcctctccatgaacccgtgagcctgggggcaggtgccaggcgatggcgcggcctgtgagcgacaggaccccggcccctctgctgctgggcggcccggccgggacaccccctrgcgggggagcgctgcttgggttgcggagccttctgcaggggaccagcaagcccaaagagccggccagctgtgagttctaacmcccatctcacccacttcggacaccctacccccttagggactcaggtgccgtggggtggggtcccatagaaacctgcgtgcggggagtccatcttcccaaccttaatctactcaattactcaggtgtttaggcccctagatcccttagcgcccaggacccaaaagcgccggctctgaagcccgtccaccctaaggacccaggcaccaacgtccccaacgtcctccccgcttagttcacaagagtgtaggccccagcctcctyttccttttggtccgggagtctggacccctggggtcccagggagggggtgtgtcgggtgctcacacggtggtgacacgggcttgggcggggcgtcatggggtcacatggagtctagggatgagggatgtgccccaggaatagagccccttcctgccccttacagatggtgggggaggggaagggggtacagcgcgcaggggatgggggttgggtaattacagtgaaattacagagctgtcattttttctctcacctgcccaaccctccacctaccctgtccctgcccccctattcctgaacttccgtctctctttctctggttcgctgtctttctgtgtgtctattccttcccggcattctgtccccatctctgtgaatctgtccacctgtctctgccacccccgtctccattctttctgggtctctctcccactctgcgtctccgtccctttttctcccgtctctcctctccgaccccccgtcccctctttctctggatctccgccctgtgcctctcggactcggggtctcttctccatctctatctcccccacctcaccctcatcccaacccgtctttcccggcccgcaggtctcctgaaggaaaaggagcgcaaggcggccctgcctgcagccacaacccctgggccaggcctggagactgcgggcccggcggatgccccggctggggcagtggtgggcggagggtccccgcgggggcgcccggggccggtgcccgccccgggtctgttggcgccactgctgtgggagcgcacgctgccgttcggcgatgtggagtacgtagacctggacgccttcctgctggagcacgggctcccgcccagcccgccgccccccggtggcccgtcgccggagccgtcgcccgcgcggacgcccgcaccctccccagggccgggttcgtgcggctcggcttccccccgctcctctcctgggcacgcccccgcccgggctgccctcgggaccgccagcggccaccgcgcaggtgcggcgaagggggcggggcgggtcctgacggggcggggcttggactcagggggcggggctgtgcgacgctgggggctgggaccgtgggacctggctgcggcctcgaattctgtgtccagttgtcgagaggtgtcgtgggagggggccagattcggtgtctcttaatgggtcagggaccaatggatccatgggggaggagagacttggaaccctaaattccaggaagcctgcccaatgagattttgtgggtttttctgtgggacttggggacaaacgatgtggatactcgtgaagccagaactggaagtccggaacaccagagttatttactggggagtggactgacccccgaatctgggcccataatcgatggaactgggataggactggagcccctaggtcctttacaggggcaaaggcaaaggagaggcacagaattctgtttacccaggacataagagactggcagcccaggtccctgggtcccccagtggggcgtgctgcagccccgggtcccagagttcttcagaagggaaaacgttagggatsttgtttctggatcctccaattggggctggggccaagcttcctatattcctaggagaggcctgggatcccagaatcgtggtagcccagtggcgggggttctgggaaggtccaggaggccgatgctccccggagagcagggggttgggaatctttggaggttgagtggaactaagtgactggaagagcaagaggaaagatgtttccctttgggcacattgaggtctccagggacggactgcaggtcggggattcctgggcacacctgctccaggtccgacctccgggccgaaccagggccctacccttcccagcggcacattcctgcgccacgtgagtcctcccatccctcctccgcgcttcgcgcaggcgccttcaagcgcgaggggggcggggccgggggaacgtgagggcgccgatggcgggggcctgggaggaagggaggaggagggaagcaggcgtcagcacgtgactcggccctgaacctgtgtccttagctggccccggctggctggtgcttaaaggtacaggcgcctcctttcgaaccaatcttctggaaccttagagcagcttctcctcctctttccagcgagtagctcttagactctaacttgagagcttttcagtgcagtagattctttttctctggacagtctggggtctaagcttaggtcgtggattcggtaagtaggattcaggctagactgtgcatctgaagtcctgaggttttagaagcaatagccccatcgcttctcggccttttggctaagatcaagtgtagaagcaatagccctgattcgtgtgttacctagggcaagtcagttatgactgggactcagtttccttgtttgtaaaggtggatatggctccatgatctctaagcatctttatggcttaggggaaccttcatttttctcgttattttggagacggagtctcgctctgttgtccgggctggagtgcagtggtatgatctcagctcactgcaacctccacctccagggtccgggttcaagcaattctccagcctcagcctccctagtagctgggcttaccggcacccgccactacacctgggcaattttcgtacttttagtaaagatgaggtttctccatgttggccatgctggtcttgaactcctgactaaaggtgattcgccgcctcggcttcccaaactgctggggttacaggcgtgagccactgcgcctggccaagggaaccttcatattttatattagggagattaatccctggccgaatttatgctagatcccagaaggactttccatgtggctatgataccacagcaaaaagtagcttcaggaaaccccctccttaaaatacacactcagctgacacgtgctgtttccccaaggcctgacctctcgggacacacccagccctgtggacccagacaccgtsgaggtgttgatgacctttgaacccgacccagctgatcttgccctatcaagcattcctggccacgagacctttgaccctcgaagacatcgcttctcagaagaggaacttaagccccagccaatcatgaagaaggcaagaaaaatccaggtgccggaggagcagaaggtgagcagagctggatgtgggagatagacttggctggagacatgccccayagccagggaggggccttttctcacagtcaagcctgggcttctccttgggattagtgctcagcctctcctggcctgcagccacagattagtcctccttggccacggggcacaagggggcaggggcytgaggtttatraagacagtgtcaactgggcgaggggcctcactcgtktaatcccagcattttagggggctgaggcaggaggatctcttgagctcgggagttcaagaccagcctgggcaacatggcaaaaccccatttctacaagccacttgggaggctgaggtgggaggactgcttgtgcctgggagattgaggctgcagtgagccaagattacaccactgcactccagcctgggcaacagagggagaccttgtcttaaaacaaaagacagtgtcactgtggggtgctgactcagccagctctgctaggtctacttgtagagacttggagcttctcctattacttgggtccagagctccaccaggcacacttgcaaaggacagtcttcctttggcaatgggatatcagcctgtggcctgtctctccttactcagcaggcctttgatctctgatgtgggacttcctttggagtgattgcatttggctaggatgaagactgtgccagcccctttaggccttgtttcctgggcctggacttctcactggtgggagacttcaggcttctgttagcagccagtgccactttctgatttggggtgatttgagcagtcattgcatctttgcatgattttgttttttgccattactggagtcttccctagcaagagttgcttgggcttctgttacaagactttgtcattccgggccaggcgcgttggctcacgcctgtaatcctagcactttaggaggctgaggtgggcggatcacttgaggtcaggagtttgagaccagcctggccaacatggtgaaacctcgcctctactaaaagtacaaaaatgttccgggtgtggtgtctcacacctgtaatcacagcactttgggaggccgaggcggacagatcacgagatcaggagaccatcctggccaacatggtgaaaccccgtctctacaaaaaaatacaaaaattagctgggcatggtggcrctcatctgtagtcccagctacttgggaggctaatgtaggaaaatcgcttgaacccaggagacggaggttgcagtgagccgagatcgcgccactgcactccagcctgggcgacagagtgagaactccatctcaaaaaaaaaaaaaaagaacaaaaattagccggacatggtagcgggcacctataatcccagctacttgggaggctgaggcaggagaatcgcttgaacctgggaggtggaggttgcaatgagccgagatcatgccactgcattccagcctgaacgacagagcgagactccatctcaaaaacaaacaagactttgccatacccttgcgtaacacatagctacttgaagcacctaggactggcctggaagtcagatctacaccagtggtttctccttctagagggccctgttgctagggactggatttaccctcacaagcaggaactgggctttaattaaatagtggagtagagagcatctttctgagccccgtggtccttggttactaaggaggagtcttccttaggaaccaacttccaggatgggaggactttaggtataatcctctggggaggtctcaggatagtcccctttcctaagagacagctcttctctcagtcaggtcctactggggaggaggctattctctggcctcagttcaaggccagcaggtcagaggctggccacagtcattgaaaccacttagacctcacttttgtttgccaaggatggatgaggttgccttggcaaccaggtcagaaggccccagctctgcgaggattttatgggacaccaaaccccatcaccagggcaccaagctttccttagcaaccaggatctggaaaggcaatgtgcagggcagggcagtgctcttcattgggagaagccctcagaccatgaaggccttgttgctagggaacaagcatccttagcaagcaagagctaactgcatgcaggcctttatcatgtggggagggctggggtccgctttgcagagtggagacttgaagcgagttgcttgagggtggggggtctatctcatgcctttactgttgctaggggcccaatctccttagcaaccagggccctagaaaggcagacccttgggtacctatcccagcagagacctggtgtggtttaggcccsgctgctggggctcccttcctctctcgctgggacctgggtccctctggacctcagtgctctccccctcttctcctgcaggatgagaaatactggagccggcggtacaagaacaacgaggcagccaagcggtcccgtgacgcccggcggctcaaggagaaccagatatcggtgcgggcggccttcctggagaaggagaacgccctgctgcggcaggaagttgtggccgtgcgccaggagctgtcccactaccgcgccgtgctgtcccgataccaggcccagcacggggccctgtgaggctgccccacatccccacctggcggagctctcctccgccttgctgagacttacgccmtgttcccttcctgccctgtggcccacgggccggccagctgggtgccccagggacgtgataatgcagataaatacatttatatttttaagaaaaagcgagcctcccccctcccttgcgggggcggggagggttctctgtgtgtgtccccggcacgtcagggaccctatcctcccaccgcctccgttaacacgatcctgaataaatcttgagaaccccagagccagctgttgtggaagaagagggcagctcccwggcatactggctgcagcccgtgrgcagctccgggctgtcgtccatagagggcaggcgctgctggaagtgctggagtctgagtcctcccgcgggctgtcggatggaggaagggcagaaggtctgagaggaatgaagcgactgcctttattgcatagaccttttcaattgctttttagattggggacggaggacgcgcatgagacgaacaggggatatgaatttccccgcccccacccgcggggagaggaacattagtgcaaatcctagcgccggccccggggaacctgcccctcctgggctgattggccagctaaatggaggcaccggagtggatggggcgaggctgcgggccctgaccggccgactcactgaggcctaccccagccagtamattccaggtcctgtcattgggcgacgcgtaaaatagactccgccctcagccatcctggccgggtaggagcaggtggcaagcgtcaggactgagccctgccccgtaagggcggccccagatcagacgccaggccccgccctcattgatcaggcactaccctcgggacgagcccatttctctttaaccgtgacgacgcccaccttccagcatcacgtctggtcccatgaaagcgagcgcaatcctgagacggggccagggcccctgccaccacaactctagcagccaggccacaccccctagctcaggctccgccccattggaatgtaggccccgcccccggcgggtaccaagcttgtttagtttcagggctcccgccccgggcagccaggaggcccagtgagcagtgtaccgatgccagggtgcatctgtgcctgtagcggcccatactccacctgctccccgtccactgtgagcacgccgcgtggtgtgagcggctctaggcggaaggcacgggccgcggcgtagcccagctgcggacagcccaggctgaagtggctaccacgctccatggccaagaaaaggcgcagcagcgcagcccgcgagatgccgctacgcacccagcacaggtgcaccaggccgtcgtcgaagcgcgcatgcggagctgccaccaggtcagcgcctaggtggctgggcgagatggccaacatgagcacaaagtccccctccagcgtcacccagtctgggggcagcggggtgcccagcggaggcagcaggtggtcgggcgggccgcaggtggaggcccctacccgggcatcaggggtgggaagtgggagcccagaggatgggggaattacgggggccccttcggagacgggtgagtgtagagctgccttgggagagccaggaggtgaagacagcagtgggtccggggacagcggagcatccccagccccaccccagtccccagccagctctgggcccccaccgttgagggacaggatgggcaggggttctggcgagccaggagaggccagggcaggctggggcaggggaagaggcaggtcagacacagaacgatgcaggggtgagtgggccatgggcggggctgggtctggggttagggtcagctccgacttggcacgaggcaggctatgggcaggggtgggcgaggcaggttccacagtggcggggaggtaggagaggcgtccgcggtaggtgtgcagtgtggcgaggcccagcaccgtgcccagtgtgaagcgggcactgcccaaggccctgaagcgctcgctctggatatccacatctgacacgaagccccaggccacagacaggaaggagaaacagcgggagcccgaggccagcgtcacggagagcaggtccagtgggtggccaccaccccggcacagcaacagtgagcagttgagcaacaggtcgaggcccagggctggctcaaatcttcacagccggagatggacggacacacagaaggaaggagcaaacaggggttggggaaagagacaggtaggaaagcagctggcaatgagaccacgaaggccatggcccaggcccaccacagccgtggggccacctccaggcgactccttacggggccaggttcctggtcatctctttcatttgctccctacaattcactgagtgcctcccatgccaggcagagttctgggcgctcgggatacagctgggaagcaggcaggcaaaaatgtccaggagctgggggtgagcatcccacaggcaggctgatttacttgactgactgtgggtttggctgagtgggagatataggggtccctatcaccccaggaggggctcatccctcccttcgtggtatcctcaacctaccccccgtgctggttcactgctccggccagcgcgttgcccgagccgcaggggaggatgcccacaggcatcttcacagcttcctcccagtcagggcgatctaggagcccgttcagcacctggagggtgggagaccagaagcctgggtcctggtggcagtctctatagtcccccagggcccagggctaggggcagggtgctcctgctctacctcatggagcagcccgtctcccgagaccgtgacgatgccatcccactcactcaggctcagcccctggaccagctcccgggcgtggttctgtcgttctgaagtgggataccgggctgttaggcaggctgtcccaccccagccccatagacccaggagtcccacccaccactttgctcccttaggactcagctgtcccagcccccagctcccattctcactggcccttacctgtctggatgaggttgaaggacagcccagcttcagagatcatgggaagcacgtggttcttacaccactgccaggccaggccccgacccccaaagggattgaccaatagaagcaaccggggcggccgaggtagcaggtcaggggtgatctctgtggagagaggttagggtctgcagaggccagtgacccaggccccccaccttggaaacagtcccttcatcagcccccaacggaattggtggagggctggcccctgggacctgctggctctcatgtggccaggcctaggtatgcagccctgccccaactcctagctgctgagacaaaggcagggcttaggtgtgaaaccaaatgccctttgtccccatgtgtgggaggagctgtagttcagagctgtggttcccactttcctcaccccaaacacctattacccaggattaggttacttccagcccttaggggccccaggcaggattagatgccacctctgaactccagggaagccctagacctctgttggcacccatcactctgggtggtacctggtcctgtctcaggctgctgctctcaccaccctgggtgactcacctgtggtcaagacccatgcaaaggggaagaggataggagacagaaacataaatctagcaagagaacagcagatgtaaatcacttttctctgcctgcgtttttgttttgttttgctttttgtgatggagtatcggtcttgtcgcccaggatggagtgcaatggtgcaatctcggctcactgcagcctctgcctcccgggttcaagtgattctcctgcctcagcctcccgagtagctggaattacaggcatccgtcaccatgcccggctaatttttgtatttttaatagagacagggtttcgccatgttggccaggctggtctcgaactcccgacctcaggtgatctgcctgccttggcttcccaaagtgctgggattataggcatgagccactgcacgcgacctctgcctgtgcttttttttttttttttttttttttgagacagagttttgctcttgttgcccaagctggagtgcaatggcacgatctcagctcactgcaacctctgcctcctgggttcaagcgattctcctgcctcaccctcctgtagctgggattacaggtgcgcagcaccacacccggctaattttttgtatttttagtagacatggggtttcaccatgttagccaggctggtctcgaactcctgacctcaggtgatccacccgcctcagcctcccaaattgctaggattacagacatgagccaccacatccggtcctcttgtctttttgttccttctgtagcccatccctgtgtatcactcctaacggatccagagagatacatcacccagacacacagaaaaataaagacacagctgcctatggaggaaattctgcagagacaccaaggtggctccaggatagagcagctgcccagcacctcacccccatccccgggcagtggcagtcctcggagcagacaggtgagggcagtggcccagcgctgggcctcggcacggttctcttcgtaggtggcggccccatctgcccggaaggtgcgagtggctctgcgccgggccccgcgccggccccgagggtaggtgtagatgcagaagtaggccgctgagtctgaggggctgcggcttcgcagggtgcagcagcctgagacctcggccaacgggaccaggccaccccggggcctggcttcaggtttggggcgcagccgctgtatgtgcagggcctgcgatgtaagggtgagggcaaagcgtgggcctcgggctgggtaggagccaaactcgccatggaggagcggggtgctggcagccagtggcggtgggggcggggccatggccttagccctgaccagggtgctcctaggcccgtggccccagctcccggtcagctcctggtctggcctctgtgggaagggaggagagaaggggtgagaattcaggaccccatggcaggggcagggaggggcaggggctgtggacaggaggagacaatgaggggcagtggcaggtgagacaggagcatcagagacagacaggctcagacaggtgtgggcagaccttgaggatgcgggacagaggccagcatcccagagggggccggagacccgggcatgcaaacatccaatcatttattccccagtaagtattcagtaccctttatgtgccaatcacggtgctaggcctagcaaacacagcaggagacaaaatagccccaaatccttgccttcataggaatagataaacaagagaaaggattgaaatatacaggtggttgggtgatgataacgggctttgggggaaaagaaggcacaggaaggggaatggatagtgggattggatatgcagaaacagacatgcaaagactgaaagacacacctccccgacacccccaccccccatacggtgcagtgggtaaaacagcaaaacaatcacaaacgcaatagagatagggtctgagagccagagaaacactgagaggagacaaacagggtcaatgaggtgaaactcaggcgatgaaagatacttaagagagtaagactttttcaccccaacgagaaaggcaagacagagtggaagggagagcaaataggaggggtacgaggcaggcatggagacagctggagagaagggatatgacagggactacggggtccgagaggagccacatgcgagcgcctgcaaggggcaggggccaagagctggtccctgagcactgacctgggtgtctggccgcctgctctccagggagcgggtgggagcaggactgaggtcccttccccacaggccctctccctgccctctgcccggattctgcctcctcctttcgctcacctttgttccccactgccccgcccagccacctgccagtcctgcccctcacattccccaggcccagagcgccaggacagccccccaccccccaccgcctgtggactcacccttaggaactacatctgcccccctatccccagcggctctctcgggtccaggacgtctgcttcacccccaaacctgccctggccccattatgggaacctcaaatcaggttcaagcacagagccctagatgtcctccagtcttgggcctgggtctctgtccctgggtccccgagacctggacctgggtctccatccattggtccccaatccataggcctgcgtgtctggccctgggcccccaaaccgccatccgcactcttatttccagaacccagtcccaggcctggctgggttcagtcctggcccaggttttccatttccatctcccaccccggtgccccagtcccgggcctgagtctctgttcctcttggtccctcagtcccctagactccggtccctgccccgacccccgcaccctcctcacacgccgggtcctcctccaggcggtcccgcaagtcagcaccaacagcccccatcagacctaggggtggggggagggtgtgcatccgctcagccaatggccgtgcagccggcctgggccgcaccaatacgagggcgcggggggtggagccagtcagctcgcgagcttggtgcagggaccggccgcgggagaggccgagagctgggcggggcctcgcgcttcgggagactggccgccatcgtgggtgagggccgacgcgcagcggagacgacgtcgcggccccatagacagcgccgttgtcgccatctttgttaagggagagtgggcctgtctcatccattgaattcacaaaagaaaaggggcgtgagggaggaggtctttagctgcaaagacagagactcta

SEQ ID NO: 94811 - DNA, 35078 bp, Homo sapiens
gagatgtgtctctttatgttgcccaggctggtctggaactcctgagctcaagcgatcctcttaccttggcatcccaaattgctgggattgcaggtgtgagccaccatgcctggccctgtttccaacttcttgatctcttttctgactgccttagagcaggaagccacataaagtgctctatagaaaggatgcctctttctgggcctagatcttcatttatttttatgtattcagtattattcagtgctttccatggttaggcagagctaggtctcagtgagtacgtcttagatgcccagaggtggtggaattcccatcacagagaaccaggatccttctgtcttccacactgactgactccatcacagcttagatctctaggacgcaagctctactgtgagctgcttcaccagaaggttctcccactcagcagttcccaagctgtgttatcacaaatagttgttgattttgtgggttaggaattcaggtgatgcccagcagggagaacttattacaaatcaacaaaggtcttttctccaaaaactatatatccagaaatacggcccattaaaaaatgagtcaaaacttgaacaggcatttccgaaaaatgaatatccaaattgccaacaagctcatgagaaggtgctcaacattattagaaagcagaaagttaaaaacccataagatcctactgtatccccactagaatggctgacattgaaaggactgacaattgctggtgatttatgcagtaactggaactgtcatgcattgctggtgggaaagccactttggaatactggcagtgtcaactagagctaaacatacatctacccaggacccagaaatcccaccctataggaatgagtcttaatggattccaagagccaggtataatgatgccaaaagcagctttattttaaatagccaataactgaaaacaatccaaattccatgaatagaagaatgaacaaataaactgtggtttatcaacataattccatcattcatataatggtatatttactctgctataatgaaaataaacatgctaacactatgtgcaaaaacatggatgggtctcacagaagtgttgagtaaaaggatccagacaggagaaaggacacacgatctcattccacttacacgaaattcaggagagggaaatgagtccatggtatcagaggtcagatgattggtgaccttggtgagaactggaaggttgcctattgaaggctcctggtgcagtgctgtaagttttctctctttatctgggaggtgattccagaagagtatccaagtggaaaagcccacagagtagcacacttaaggcctatgcactgtatgtattacacttcaatgaaaagcatgcttggccaggtgcggtggctcacgtctataatcccagcactttgggaggccgaggcgtgtggatcatgaggttgggggtttgagaccagcctgaccaacatggtgaaaccccgtctctactaaaaatacaaaaatcagccaggcgtggtggcagcgcctgtaatcccagctactcaggaggctgaggcaggagaattgcttgaacccaggaggcagaggttgcagtgagctgagatcacgccactgcacactccagcctgggcgacagagcaagactccgtctcaaaaagaaaaaaaaaaagcatgcattaaggcctgtgcactgtatgtgtattacacttcaatgaaaagcatgctcatatgtcttacattatttgtgtgcttgtgttggtttgctttccctcataagatgtcaacgtcctcaggacatgtgtttttgtctcttcttgttcgctgatgtaacaggtgtttgcatatcacctaggacagtccctgagcatagcaggtgctcactgaatagttattaggcaaattataggctctatcttaatggtgtcatttcaaattccctttagatttttatttatgcctacttctttggataggtgagattgatgggcacatacactcttaggttctgcagttttttctctttaacattttacctaagaatctgtacatgttggcagtctatatgcatgcctatttctagcatttaatggctatcattacttcctgtggataaattatagtttgcttagtcattcttaccctattgggcatgtggatttttctcatttatttatttttagaacagagtgatcatgtttaaactaattccttctctggtttttgggtactttatttgagttggtccccaaaggcaattactacaaggcaaaaggtgagaatggtgttatggtattatcatagataaattgctctctagagagaatagctttttttttttttttttttgatgtggagtcttactctgtcacccaggctggagtgcagtggcacgatctcagctcactgcaacctccgcctcctgagttccagcaattttcttgcctctgcctcctgagtagctggaattacgggcgtgtgccaccaccctcggctaatttttgtatttttagtagagatggggtttcaccatattggccaggctggtctcgaactcctgacctcacgtgatttgcctgcctcagcctcccaaagtgctaggattacaggcttgagccatcgcgcccagcccagagagaataacttaattcatggtgacacctgcaagtcacatggatctttctgcactaccttaggtacttgagggattgcagtttcatcttataatatttttataggtttatagaataccttcaagttttctaccttcaccttttttgtttatagtgtgtgcatgtttctgccaatgaatcacagtctatgaatctacctgtccttgaatctcctgtataaaactctctgtttacccattctctacctgtggcttagtcaactcctggagaaaggttaaagaatgatcttgtggcagtcaagaccttctctctaataggcacaatgtaattaattatgattctgttctaggtttcctgtggcataatgtgatggtcaattttctgcatcaacttgactgggctaagggatgctcagatggcaggtaaaatcattgtgcttgtgagggtgtttccagaagagatttgcctttgaatcagaagacagcaaagatttccttcagcaatgaaggaggcatccaccaaactgtcagggcccagagagaagaaaaagacaggaagggtgaatttgacctctctgactgggacatccatctctgcctatcctgggacctccacactcctggttctctggccttcagacttgatcagggactaacaccatcgcctcccacccccacctttgttctgaggcctttagcctctgaatgataccactggctttcctgcttctctatcctgcagtcggcagatcatgggacttcttcactccaaaattgtgtgagccaattcccataacagatagataaatttataaataaacacacaaatttcctacagccttatcttagtggtgtcacttcaaattttgaagaaccctgacctagtacacatagcaaaaaacaacaacgacgacaacaacaacaaacaaaaacacacacacacacaaaaactcatcatcaataagttttaaaaaatcaaacacaagataaaacgctgcagcatatctattacctgggggcttttctatatggaaagcactttctgagatgccttgcagtaaactccaaggagattttgagggaagatattctcttttctcctggtaaatctccctgttgatgatcattattttaaagactccaaagatgaaaacatctgcttgcacattttgtcgattcattttgggtgagggtctctggcaggcttggaagggtgggtgaacagtggaagggggctgcctctggtgactagcatcactcatatccatgtctgtggcagtcatcaggtgcttattatatattcgacttttggccacccctaatgggggtgttaaatgcaggaagagtccagtcaagtcattgcaaattggcattgacttttgggacctttctacacacgatagtcaggtagataccttctttttaaatttgacttgttattacttttttttgagacagggtctcattctgtcacccaggctggagtgcagtggtgtgatcacggctcattgcagcctcgacttctcaggctccaatgatcctcccacctcagcctctcaagtagctgggaccacaggtaaagggccaccatggccagctaattttcgtatatttggtagacaatgtttcaccatgcttcccaggctgggtggatacttttcaaaaataagttcagttcatcctgcctagccttgccccagcagctctagaggaattacccactctggtgctgggctcaggctgcctgtctctggaataatgtgctcagagctgcagggtaggcctgctgtctgactggcagagagagtcccatactccctaccctgtaccctgaaagatcaaggctgcccagcctgtccacctggtagaccatttccctgcccaattctccttctctcattcctgatgtgcagcttgatgcctgcagggactgtgccagctgagattgtctctaggtcctcccttctgccagctggtgtccagggaagtgggtcctttggcctgcttcctgccaccagaattttgaggaccttgtttctcccactgcaacttttgacccattcctgggtttctttttcttttttttgagacggagtcttactctgtcgctcaggctggagtgcagtggtgcaacctcagctcactacaacctccgcctccccggttcaagcgattctcctgcctcagcttcctgagtagctgggattacaggcacccgccaccaggcctggctaatttttttgcatttttagtacagtcgggatttcaccacgttggctgggttttagactagggtttcttcacctcagcagtactgtcattttggagggcaaaatcatttgttgtggggcactgtcctgagcattgcagggtgttcagcatcctacgcaaactctacccactagatgccatgggcgcttcccagtggtgacaattaacaaagtctccagacagacctacatgtcccctgaggggcaaagttacctccacttgaagaccagtggtgtgctggatggatactaatattaaaataataataataataataatagaaatcataatataactcatgtagttaaggtaagtcctttttgatggaacatttatttcagttaataatatttgtatatgtctgtcctggtagttttttttttttaactttttattttgatttaacatgagagtttgagaaatttacaaaacgaatgaatacaaagacctctgattaccccagattctaacgtttccacatgggctttctcctccctccccaagtccaccagcccctgctccccacctttctgtctctcttcccacccagcaagctccctaggagcacagcaccacttatgacaaaaacatcattttcttttctctgaggcggtattcctgacgtttggatttaggctgataagtgacagtgagttataatcatccttgcctgtgttgtccttcccacgttaggtctgtcatgccacgtatgtccgcagtttataacaatctctatcatacattgaaaagttttgaaaacttatccagtgaatccctgagcaccaaatgttcttttgtgttatttttctttattaggctattattactttattcagaatctctctgttttagagagagcctttctttcttgcctaacctagagtgcagcggcgcgatcatagctcagttcagtcttgaacccctggactcaaccagttctcccccgccctgggcttctgggcgtcctgatctctctcctgaaacccacggggctgggaggtgggaggagatcctactcctagccccatgagcgcgctccaggcctccagattggcccgtttcgggggcagggcgggccgtggggcggggtcgcagcaaggcttcccctctaccctctctgkgcctctcacaaacgctgagccccgccccgctgaggcctgtctgcagaatccacagcaaccagcaccatgcccatgacactggggtactggaacatccgcggggtgagcsagggtccgctgggcggtgggacgggggtgcgtgggggyggggaagtgtggagcagctgcaggacgggctctagggacggttcctyttcagggctgtccctgacagcggggtctgtgcttgccgctgtctgtgcgtgtggctgggcgtgcggggtgggggcgggtgaggcaggaacgagaggaggagatggggctccccttgtgcagagtcgtcacaaagtcagggaccctccatctctgacccgagctgtgggccatctctcccagctggcccattccatccgcctgctcctggaatacacagactcaagctacgaggaaaagaagtacacgatgggggacggtaatggcaccctcgagtctgggccctgccccctcacactaagttggcaccaagcaaccgatagtggccacctgtggctgactctgcaggcctcccttgctggaactgcaggctgtcccttccctgagccctggtgagggagctccttgcaaggcagaatgctggggcgggatgctgggcccccgtctgggtaattatgatgggtgtccctyagggcttgcctaaaccctggaagccttagctgtgtggggtccagagccctcactggaattctttttctctgaatcctgggatgtgggactgagtggtcagattctagatccacctgtctcagggrtcttgccactggctccttgggagggtccccaggaaggagggctgggctytggggaggtttgttttcacttcatcttccccaccacagctcctgaytatgacagaagccagtggctgaatgaaaaattcaagctgggcctggactttcccaatgtaggtgcaggggaaggggcggttttgggggaaagtgcgacgtgtctctgactgcatctcctctccccascttagaggtgttaagatcaggagtcttctgcccaattcctctcactcttggctgtctacacagcccttgcatgatgttctgtgtcccagctcatttattagtgtgacagtatttctatctcaggcctgccatgagcaggccctggtctcctctytgcccttgcatatgggaaggggatgctggggagcctggtggcccaactgagcttccccggtttcccatctatccagctgccctacttgattgatgggactcacaagatcacccagagcaaygccatcctgcggtacattgcccgcaagcacaacctgtgtgagtagatttggttgcaagatgcggggagggaccgtggcctcctcctcggcttggctgggctgtgaggctgagagtgaatctgctttacgagggtaggcggggaatcagaaaaggagcagattcgcgaagacattttggagaaccagtttatggacagccgtatgcagctggccaaactctgctatgacccagattttgtaagtccccccaccccactcccagtctccccttccctactcccagtctcccctttccctgcagagtttgtgtccaaaattgattccttctggtgagttmttggtcttgctgactctaagaatgaagccgcggtcctacacggtgagtgttacagttcttaaagatggtgtgtccggagtttgttccttcagatgttcagatgtgtccgcagtttcttccttccggtgggtttgtggtcttgctgacttcaggggtgaagccgcagaccttcgcagtgagtgctacagctcttaaaggtggcgcgtctggagttgtttattcctcttggtgggttcatggyctggctggcttcaggagtgaagctgcagaccttcatagtgaatgttatagctcataaaggtagttcaaacccaaagagtgagcaacagcaggatttatggtgacgagtgaaagaaaatacacttccacagcctggaagacaacctgagcaggttgctactgctgcttgggaagggcggaggtggggggggaaatcccttatttggccccacccacatgcagattggtccattttacagagagctgattggtccattttacagagtgctgattggtccgttttacagagtgctgattggtctgtttttacagagtgctgattggtgcgtttacaaacctttagctagacacagagcgctgatttgtgcatttacaatcctttrgctaggcagaaaagttctccaagtcctcacctgacccagaagcccagccagcttcacctctcattttgatcaggagccaagacwgtggtcctgccaaatacacgggtcctgttttctgtttgaactctttagtgctactcatccttcaagctatttcctatactgccaccagagtgaccctcaaaccccaaagtcgtgtcaaataaaacctctaaatcaattccccaccaatctacttatagaatcctgactccccagggtatgaattcactctctagacagtaatggttacttccagaatcccttccatctctgacccatgacctgtgctttgggccatctctcccagtggtttatatcatctgcctgctttaggaatacacaaactatgaggaaaacaagtgcaaaacaaaggagtaatggcacctgaaattttggtgtcttccgagtgctctcttgacatacactgagatcagcgaattttcctaacagacagcttaggggcagccagaggctctttttccccctcctttcttccactyatcctctgaatatctcctcatctttccagaaaccactcaatgtccattgtattctwctgctgcccaactaggaggaaatttctacttctttctctgagctcctttagttctttgcatccttgattctgctcatatctggtccagagcctaccaggtgctcaggtgctcctggggctgacccagaggttgttgggaggtcagtggggacagatttagggacagtgtcacattccgctctgccatcccatcacctcagaaagactccagctacccagttggagtctaataaatgctgatgtatccagctgaagcctggacagtgacccagttccagctgtggggaagatgactgcttgcccgcggccagctggggccatgcacaaaactgggaggccgcatctgtgcagggagcttgtgtctgagggtgttgacagctgttttctgcctcaggagaaactgaaaccagaatacctgcaggmactccctgaaawgctraagctctactcacagtttctggggaagcagccatggtttcttggggacaaggtaatgggggcgtgtgatggggacaccacagatttgtcatacttcctatattatggaggtttcagcccacatatccttggccttatccagatcacctttgtggatttcatcgcttatgatgtccttgagagaaaccaagtatttgagcccagctgcctggatgccttcccaaacctgaaggacttcatctcccgatttgaggtgatgcccccagcctcctttctctttatgtctcttattcctttccctcctttgtgatgctttcccagtcctggagctacacaaagaataactcacatttttggccatgtgcggtggctcacgcctgtaatctcagcgctttggaggctgagggaggcagatcacctgtggttaggagtttgatacctgcctgcccaacatggcaaaaccccatctttactaaaaaaaaatacaaaaattagctgggcgtggtggcgagcacctgtaatcccagctacttgggaggctgaggcaggagaatcacttgaacctgggaggtggaagttgcagtgagccaagatcgtgccactgcattccagcctgtatgacagagtgtgactccatctcaagaaaaaaaaaaaaaaaaaamaaaggagccgggcatggtggctcacacttgtaatcccagcattttgggaggccgagttgggtggatcacctgaggtcgggagttcgagaccagcctgaccaacatggtgagacccctgtctctactaaaaatacaaaattagctgggcgtggtggcacatgcctataatcccagctactagggaggctgaggcaggagaatctcttgaacctgggaggcggaggttgcggtgagccaagatcgtgccattgcaccccagcctgggcaacaagagtgaaactccatctcaaamaaaaaaaagaagaaaagaataacttgcatttattgagtgctggcttcatgccacgaactgtacccagcacattatacctattgtgttgaatttgaaatttacaacattcctacagggtggtagaattatctcccccattttagagacaaagaaactgagaatgagagggtcagtcctttgctcagggtcccagagccagtggaggctgtgctgggctccctgcgagcctctggatctatggttggcagwcagggctctccswtttgtgacaraagaaaagcctcaggccttgtccagcctgggtttcatagcccaggacactttggaagaggcagagcacttcaggaccacggatgcagctggcaatagtaggactgacacacagtagcattgatgttcaatactgaacccacaggcagtattcacagctacacccagaaactttgtatgattgaacccccatgtggggaatcctgagagccagggctgtggctggagctggattaaggtacatatgtgggtgcccctgttgaaggagcttatgctgaaatgccctgtgctggagcactttccttctctacctcttttttttttttttttttgagacggagtcttgctctgtcacccaggccggagtgcagtggagcaatctcggctcactgcaacctctgtctcctgggttcaagtgattctcctgcctcagcctcttgagtagctgggattacaggtgtgtaccaccacgtccagctaatttttgtatttttagtagagatggggttttgctatgttggccaggctggtctcaaactcctgacctcaggtgatccacccacctcagcctccctaagtgctgggattacaagcgtgagccaccgcgcctggcctcttcctctctttttttccctccaatgttccaggtgttccccctgtgagatgagtagcacgctgattttactcctgttcactgaccttctcctctgcatgaggcagggtgtgaggcacagtgggagatgcatagatgacagccccatcctggaaatgagtgcagtgagaggcctgcaggcagagcagcctgtgaagtgtgtgctgaacttgtttgagagcagcaaatcctacattactacagatttggggatttgaggcatttgtccaacaggcttctgagccttgaatctgtttcccttttccactccccatcaagagatctgcttgctcagctagttcccatcagctctggttctgcggttctggtccaggctgagtggccttggagttaggtaagaggtggtgggaagggagggatggaggagagctgagagctatggcccgttatgtgccagggtcaagcctgtcacccaggctggagtgcattggtgcgatcttggctcactgcaacctccgcttcctgggttcaagcaattctctgcctcagcctaccaagtagctgggattacaggtgcccgccaccatgaccagctaatttttgtatttttagtagagatgggttttcaccatgttggccaggctggtctccaactcttgacctcaggtgatccactcgtctcggccttccaaagtgctgggattacaggtgtgagccggatgtttttgaataccttatctgggcattcaatcctggtaagattgtgcacagcacatctgagtgtcatgtagcctgatctgcagcagggctggagatgccatgggttagggcacagtgagattttgctaagataccagatggagaaccttggactttctgctttaaggggaatgattagagcctagtctcgcctttgattttcttgtgcactgccactccccattccactttcatccaggttttactgagacattgggtgagtgtgttcagagcccctttgttctgctggaggtcccttctgtgtctctatacccagacaagccaagagcctccctgtggaaaaggagactgtttgtgcagtcaaggagtgacagggcctggtgtgaggggtggtggggcagaagaagaagagaatttggcagaaagaggccagaactggagagagacagaaccaggctacaytgaagttctattccccttactaggtatttaaatgtaaggaagttgctgaacttctgtttcccacatgasaaatggtgataatagattcagccttgcagagyagtcgagtgggttttctaagcttacgttgtaatttctcttgggtacagagcacccagcaccgtgtagaatcttcataagtgttagctgttactgtggtacaacattacttaaaggaagttggaagagttaactccgcagatctggggaccctaagaagctgtgtgatgcctcagcacttgagcccacatggaaaggctgtggccagggccctgacctgctgtgtctgcagtggggttgtsccagccctcatgggcagctgaccttgagttctggccttattttcccccctctcagggcttggagaagatctctgcctacatgaagtccagccgcttcctcccaagacctgtgttcwcaaagatggctgtctggggcaacaagtagrgccttgaaggccaggaggtgggagtgaggagcccatactcagcctgctgcccaggctgtgcagcgcagctggactctgcatcccagcacctgcctcctcgttcctttctcctgtttattcccatctttactcccaagacttcattgtccctcttcactccycctaaacccctgtcccatgcaggccctttgaagcctcagctacccactatccttcgtgaamatcccctyccatcattacccttccctgcactaaagccagcctgaccttccttcctgttagtggttgtgtctgctttaaagggcctgcctggcccctcgcctgtggagctcagcccygagctgtccccgtgttgcatgaaggagcagcattgactggtttacaggccctgctcctgcagcatggtccctgccttaggcctacctgatggaagtaaagcctcaaccacatttgctgtgtgtcttrtcttatttgctcctggccatctacccagactgtctgtctgtctgtcactgcctcttccaagggactggctggtgatcctggcagtggctgggttctaaaggattctgctgggcatagtaaggcgcttgagaattcttgctcccattcctgagagactcagagcaggaagccccatgaggcactgtggaaaggatgtctctttcttggcctggatstcccattcattcatccagccgtattgagtactttccataattgcacagagcttgtgtctcattgaataggaccccaagggggtggaatctccatcagagagaaccagggtcccttttaccttctccactatatgactrcatcacttctgttaggtctccaggacccaatctctattgtttttctcagatggcttccaggtaccctctccaggcttgctgcacagctgtcatcaggacgttctctctgggtttacttcctctctttcctgggtacctgtgagagaaatgtctttagtccttgcataactgaaagtgcctttacatgcttactgaatactctggctgakgatttagtctgttctcacgctgctaatagagacatacccgagactgggtaattgataaaggaaagaggtttaaaggactcacagttccacagggcctgggaggcctcataaccatggcagaaggcgaatgaggaccaaagtaatgtcttacatggcagcaggcaagagggcgtgtgcaggggaactcccacttataaaaccatcagatcttgtgagacttattcactacygtgagaacagtatgggggaaactgcccccatgatggagttttctscaccyggcccccacccttgacacctggggattattacaattcaaggtaagatgtgggtggggacacagccaaaccatatcagctggggatagaattctatgatgaaaaccttcagacttctaatagatttattcacttttttctagaattgagcatttctggtgagtaggtcgatgccagtctgactgcatcctttgctttttaaaaattattattattgttgttattttgagaggaagtattactctgtcgcctaggctggagtgtggtggtgtgatctcgtctcactgcaacctccccttcctgggttcaaacaattctccttcctcagcctcccgagtagctgggactacaggcgtgyacactgtgcccagccgatttttgtatttttgttttagagacgggttttcaccatgttggccatgctggtctcgaactcctgacctcgtgatccacccacctcggcttcccaaagttctggaattacatgcgtgagccactctgcctggctatatcttttgcttttttacgctttttctgtttgtcattctgaggtctataattccaaaggctgtgtggggatctacaggttgatctcttcttgattcacatccttgcaggaacatgctaagcataggcttcctccaccctgacagcaatctgcattgcctcttgttgaagtaacttaaaatctcactggagagtgaactgcttcagaggaagattctcatagcttagcagttcctaagctgtgataccagaaatagctgttgagtctgtgggtcatgtattcacgcaaggctcagcagggagatcttgttacaaatcaacaaaggtctcttctccaaaaactatatatccgaaaatacaactcattaaaaaatgagtcagaatttcaacaagcatttcccaaaagtgaatatccacatggccactaagctcatgagaaggtgctcaacatcattagacagcagaaagttaaaaacccctaagatcctactgtatccccactagaatggctgacattgaaaggaccgacaattgttggtgatttatggagtaactggaactgtcatgcattgctggtgggaaagccactttggaatactggcactgtcaactagagctaaacctacatctacccaggacccagaaatcccaccctacaggaatgagtcctaatggattccaagaaccaggtgtagtgatgccaaaagcagctttattttaaatagccaataactgaaaacaatccaaattccatgaacaaatgaactgtggtttatcaacataattccatcattcatataatggaatacttactctggtataatgaaaataaacatgctaacgctatgtgcaaaaacatggatgggcctcacagacgtattgagtaaaaggatccagacaggagaaaggacacacaatctcattccacttacacgaaaatcaggagagggaaatgattccatggtatcagaggtcagatgattggtgaactttgtgagaactggaaggttgcctattgaaggggcctggtggagtgctgtaagttttctctctttatctgggaggtgattccagaagagtacacaagtggaaaagcccacagagtagcacacttaaggcctgtccactgtatgtatcttacacttcaatgaaaagcatgcattaaggcctgtgcactgcatgtgtattacacttcagttaaaagcatgcacattatttgtgtgcttgtgtttgctttccctcataagatatcaacatcataagggcatgtgtttttctctcttcttgttcactgatgtaacaggtgtttgcatatcgcctaggacagtccctgagcatagtaggtgctcactgaacaattattaagcaaattatacgttcatcttaatggtgtcatttcaaattctctttagatttttattcatgcctacttcttcagataggtgagactggtgtgcgtgtttactcttagattctacagttttttctctttaacattttacttcttttttttgagacagaggctcactctgttgcccagactggagcacagtggtgcaatctcagctcactgcaacctctgcctcctgggttcaagcgattctcttgcctcagcctcctgagtagctgggactacaggcatacacctggctaatttttgtatttttagtagagatgaggttttgccatgatggccaggctggtctcaaactccgggcctcaagttatccacccacctctacccctcaaagtgctgggattacaggtgtgagccaccactcctggcctaacattttacttaaaaatctgtatatgggctgggcgcagtggctcatgagtgtgatcccggcactttgggaggccgagggggcagatcacgaggtcaggagatcgagaccatcctggctrkcacggtgagaccacatctctactaaaaatatcaaaattatttttttttgtatttttgggcgtggtggagcttgcctgtagtcccagctactcaagaggctgaggcaggacaattgcttgaactcaggaggcagaggctgcagtgagccaagatcatgccactcctctccagcctgggcaacagaacaagactccctctcaaaaaaaaaaaaaaaacaaactgtatatgttggcagtctatatgcatgcctacttctaatattgatggctatctcatattagttcctgtggataaactatattttgcctagtcattcttatgctatggcatgtgtagatttttctaacttatttatttgtttttagagcagggtgatcatgttttgactaattctttcccgtttttggtgactttgagtagatccccaaagcgcttactacaaggtaaaggatgagactggtttaatggtattacaacagataatttcattgctctccagagacaataacttaatttatggtgccaccagcaaggtacacggatcattctgcactattttagacacttaggagatcgcgatttcatcttatgattttttttttttaataagaacaccttcacattttctggctgggcatggtggctcatgcctgtattcccagcactttgggaggccgaggcgggtggatcacttgaggtcaggagtttgagaccagcctagccaatatggtgaaaccctgtctctactaaaaatacaaaaattagccgggcatggtggtgggcacctgtaatcccagctattcaggaggctgaggcacaagaatcacttcaacctgggaggcagaggttgcagtgagccaagatcgtgccattgcacactgcactccagcttgggtgacagagtgagattccatctcaaaaaaagaaaaaaagaataccttcaagttttctaccttcaccttttttgtttattggttgtgcatgtttctgccaatgaatcacagtctatgaatctacttgtttgtgaatctcctgtataaaactctctacccattctctactggtggcttagtcaactcctggagaaagcttaaagaatgatcttgtggcagtcaaggctttttctcccataggcacaatgtaattaattgtgattttgttcttggtttcctgtggcataatgtgatggttagttagttttctgtgtcaacttgactgggctaagggatgctcagatggctggtaaaattattgtgtttgtgagggtgtttccagaagtgattcgcctttgaatcagaagactgagccaagatttctctcagcaaatgaaggaggcatccaccaaactgtcagggcccagagaggagaaaaagacagaggaagggtgcatttgatatctctgactgggacatccatctccgcctatcctgggacctccacactcctggttctctggccttcagacttgatcagggactaacaccatcgcctcccacccccacctttgttctgaggcctttagactcacactgaatgataccgctggctttcctgcttctctgtcctgcagccagctgattgtgggacttcactccaaaattgtgtgagccaattcccataagagataaataaatttgtaaataaacacacaaatttcctacaggcttatcttagtggygtcacttcaaattttgaagaaccttgactagtacacrtagcaaaaaaaaaaaaaaaaatacacaagtgggtcaccatcatcaataagtaagttttataaaatcaaacacaagataaaacgctgcagcatatctattacctgggtttytttctatatggaaagcactgtctgagatgcctcacagtaaactccaaggagattttgagggaagatattatctttcctggtaaatctccgtgttgatgatcattgttttaaagtctccagagatgaaaacatctgcttgcacattttgctaattcattttgggtgagggtctctggcaggcttggaagggtgggtgagcagtgggaagggggctgcrtctggtgactagcatcactcatatccatgtctgtggcagtcatcaggtgcttattatatatttgacttttggccacccctctgggggtgttaaatgcaggsagggtctagtcaagccattacaagttggcagtgactcgtagcaactttctacacacccttctcrgtcagggtggataccttttgaaaataagttcagttcatcctgcctagctttgccccagcagctctagaagaattacccgatggtgctgggctcaggctgcctggctctggagcaatgtgctgagagctgcaggggaggcctgctgtctgactggcagagagagtcccaccactccctaccctgtaycctggaagwccaggctgcccagcctgtccacctagtagaccgtttgcctgcccaattctccttctctgattcctgatgtgcagcttgatgcctgcatgggctgcrccagctgagattgtctctaggtcctcccttctgccagctggtgtccagggaagtgggtcctctggcctgcttcctgccagccagaatttcgaggaccttgtttctcccactgcagctttcgaccctgtcctggatcacagactagggtttcttaaggtcggccgtacagagatttggagggcagaattctttgttgtggggcgctgtcctgagcatcgcagggtgctcagcatcctacccatcctctacccactaataccacgggcgcttcctggtgtttacaattaacaaagtctccagacagacctacatgtcccctgaggggcaaaatcaccttcacttgaatcacatccagtggtgtgctggatggatactagcattaaaaatattaataataataaaaagattcataatgtagctcatgtagttaattcctttttgatggaacatttatttaagttaataatataagtatcattaatacctaataatatgrgtatatgtatatgtaattttcttgtttacctttttatattgatctagcgtcagagtttgagaaattgtagaaagattagaaacgactctgattaccctagatactaatgtttccacatgggctttctgccccccagagtaccctctgcccctccttctcctgcccccgcctttctgtctctgtctcccccagcaagctccgaatgagcacaacaccattataagaaaaacactattttcttttctctgaggtagcattcctgatgtttggattcaggctgrtaagtgacagtgatttataatcatccttgcctgtgttgtccttcccatgttaggtcatgtctgtagtttatgacaatctgtgtcatccatgccattttcaaaatttttgaaaacatatccagcctaatgctgaggataaaatgcccttttgtgttgttatttttctttatcacgctttttgtacttcattcagaatctttatctcttaacatgttttggcctgtttgtgtttcttccacttggtggtaacatcaattaacatagagtttagaaaaatgtttccccaatttaaaaaatcacttgtactacatcttctttcttagttctgatttgtattaacttataattatattttttgtttttgttgtactaatgctgtgttaattacctaagttttttttgttttgttttgtttttgtttttgagacggagtctcgctctttcgcccaggctggagtccagtggcactatctcggctcactgcaagctccacctccctggttcatgccattctccggcctcagcctcccragtagctgggactacaggtgtctgccaccacgcccagctaattttttgtattgtcagtggagacagggtttcaccatgttagccaggatggtcttgatctcctgacctcgtgatccgcccgccttggcctcccaaagtgtggggattacaggcgtgtagttacctaacttttaasagaataaactattacatataacaagcaaattggttaaagtttcaatatttctcttaaggtmacttattgcttccacttctktttccatctctaactttgtgcctgttctactttcttgaaattctagtttgtttgccttattcttggtatcacaggcatgttggaaaaatgttttctcaattcaaatttggtagcatcttcaaatggtgatttytattttcttcttttcagattgaagaaaagattctttatatttcagatttcctaagtttacccaaacaatatttaagagactttaatacatttccatgaattaggatacattttattttgtctgtcagtatttgtttctaatagattagtttttaaaattctgacaacatgttaggtagattttctgttaatttgccttgagaatgtaagaatgttgtcagaagagacagaaggaattatgaawtccagtccagaggtcccattacaggcccttggtaaagtgggacccagtgcattttgactgtctggcacagcattgttttaaaaattagaacttttccacattttgcagttcagacagcacatacaaatgcagaagtccaggccctgtcgggactgagtttctgtgtggtgacaactggctacaaccccttccttctgaacacttgcagcttccctcatccctgctgctcctgatccccgtccacagacccactttcccygctggtgtgatccttgtggccactatggcagctactttggagagccgctagtccagtccttcccgccttccgcagagctctactcctgcttctgaagaagccacctggggcctggccttcttcctggctcctcagagtccttgcaacagcaggcactacttctctctcctgcactcaacccctctcccactccactgcctctcagtgtgccaaaacacgaagatgtgtcctgattttcaaaatctctcccctgaagttcccacctgatatgtagttggagatgggcaaatacagygtccttgaagcatcattttattcatagtgcctggaatgtagtaggatctcgacaattgttgtttcaataaaggaatgaccaaatatattaatactgtaaaaagtaaagtagaggttcctcttcaaagagacttttctccccatctaattaagaataagtcgtaacttctcttagaagcaaaatttattcaaagaccggtgctgatattctgaaatatctgctagctgtaataaagaaattaatgtactttatgttcttaactcccacaatttagcctaaatacttgccctggcatgcttatactgatccaaacaagcatgaggtcatagcctgttcctcttccttatttgaaggtgtttttaccttactcagcattccacaagtgagttcccccttcctttgttctcctctgcctctgcctcttttaaaaagttctaagttgctagccaatcaggacaaatacagaatgtgaggtcccgttccagccagtggaaactggacacagcagtagggtggacacatcaagttataaatgaccctttctcctttgttcagtgtactctcgtggtaaaactgctggcgagtgtaccctttctgcagaaagtaaaaatggcctttgttgcaggaagtcagggaccccgaacggagggaccggctggagctgcagcagaggaacataaattgcaaatatttcattttaatatggacatttatcagttcccaaattaatacttttataatttcttatgcctgccttactttaatctcttaatcctgttatcttcttaagctgaggatataggtcacctcaggaccactgtgataattgtgttaactgtacaaattgattgtaaaacatgtgtgtttgaacaatatgaaatcagtgcaccttgaaaaagaacagaataacagcgatatttagggaacaagagaagacaaccataaggtctgactgtccgcagggtcaggcaaaatagagccatatttttcttcttgcagagagcctataaatggacatgsaagtagggaagatattgctaaattcttttcctagcaaggaatattaatattaatactctgggaaaggaaagcattcctggggggaggtctataaatggtcgctttgggaatgaatgtctgtcctatgcagttgagataaggactgaaatacaccctggtctcctgcagtaccctcaggcttactagggtggggaaaaacctggccctggcaaatttgtggtcagactggttctctgctcttgaaccctgtgttctgttgtttaagatgtttatcaagacaatacatgcaccgctgaacatagacccttatcaggagttctattttgcccttgtsctgtttcctcagaagcatgtgatctttgttctgctttttgccctttaaagcatgtgatcttcgtacctaccccctgttcgtacaccccytccccttttgcaatccttaataaaaacttgctggttttgaggctcgggcgggcattacggtcccactgatatgtgatgtcacctccagcagcccagctgtaaaattcctctctttgtactctttctctttatttctcagccagccgacacttatggaaagtagaaagaacctacattgaaatactgggggcaggttcccccaatatctggtgcaccaacatggttttctttttcctaagtgcatgtgggaacctgattccctttggtaggtgtggagaaacgatcatcagtccagtcctcagaaacgcttgttcggctccctgatgattggtgaattttctatgtattgtctcgggtaactatgggtcacatggagtctaaatattatgcttatctctgctatattaaactcctgttaaaacagggtggagtttgggtgcccatggaaaatatggtcaccctattcagggtgttggaagaacactgtccttggtttcctgaaaagggaaaattagatgtggaactatgggatcgcgttggtgcaaaattccaggaactgatcccatcaggaaattatgttcccttcactgtttggggtgattgggccttggtatgtgccatcctaacgacataccaatcccgtgaccccctgcagttaccacagttttctgaatctggcgaccttctacctcttccacagctttcctctcccactcgggcttcattatctgctcagcctctcccttcgcctactcctcccccacctaacgatattgaggattcaatatctaactccggtgactttggcttaatgtcacccccgatggtcttatttcttttcatgaagacctgatacttgtagctcccatggccctgactcggacagctctgcaccatatctatgctaactcttcccttttcaaatctttgcaggctttgcctccagagccatctaatggctccagaccaaactacaatttacctgtaattctgcaggccctcccccaccgcagcccctcaccctcctgtcatttcggtccctcaaccagtcactttgccattcactcaacctgcttctctgtacccttcttcacacatggaygcccctgccactctggttgcacaggatttcccaataatcaccagtatgcttctgtctcttctgctcccccaatgcmcctttctcacactctcatactggtctgacctcctgaacctcagtttcccttatctacacatacttttactgtcacttctatgccaactccatctcatgtgcctgctcttgaaacttccatgcaatgcttattacgccagaacaaagaaacaagtggattagaggtgtgggcttatccggtcacgctggaacctcccaatgctcaaggggtacaaatgcgttgatatgcactgctcaatctkaccttttcaaaagaattcaaggatgcttgtgctcagtatggtcctgcttctccatatgttaaaatggcattacagactctttgtactgaggtcattttgcttccttcagaatgggaccttttggcgaaagctgttctaactccatctcagcatttacaattctgtacctggtggtcagaggaggcccgtctgcaggctcagctaaattgggttgatggcattctaattactcaggctcagctcacaggctctgataatcactctgacactaccgcccaattagactttgacgctctcaccacggaacaagtaacaaagttgtgtatgagagtttgggataaactaggtgccccaggccaagctcctgtttcttttactactgttaaacagggtcgcagtgaattacatcctgattttttggctaaattacaagatgctgttcaaaatctgtctctgatgattacgctcaaggtattctccttcatatgttagcttttgagaatgcgaaccatgagtgtaaagtggtcatgcgttctgtctaatgacaaaatttacctgatcacgaggtgtgcctgcatatattaaagcttgtgaaagcattggatcagagacccacaaagctattctgtgggcacgggccatgaaggatggcaatcaaactggcttgactgaattcttttcttggagcctgctataattgtggtcaacttcatcatacccaaaaaaattgcactgttaaaagcggccaagccagctcaacaaacatggccaaatgctcctgctactgtttgccctcattgtcgtaaaggtaaacactgggcaagtacttgccactctaagtctgatatagatggcaatcccttgccacagaaccagggaaatgggaagcaggrccagtcccaggccccagtatcaaatgggacacctcagactcagaccaatattgtgtttctgcttcaagcggtcccaatacagcccccagcacargcaaatttacctacagccaacccagrtgggtcccagtcgcttcttctgtctcagtacaatgcttgtctacctccacagtagggggcagggcggtcaatctctgtagtaccactcctctaaatttactaccgaattctttgcctttaattgtccccacgggggccactggccctttacctcaaggtttggtgggcctggtgttaggtagggcatccacctctgctaaaggtatcatagttcatactggtctcattaattctgattcctctgatgagattaaaataatcgtgtctgccaaggttcctgtttccattccggccagtgagtcaattgctcaactacttttactacctaatattgttttaaacaaaggagataagacagggggccctgggatgggctctggcggtgaaaaagccgcttattggattaaagtaatttctraacaacagcccacctgcaccatacatattaaaggaaaaaagtttgagggcctagtagatactggggctgatgtttctattatttcctctaatttatggccttcttcctggcttaaacatcccactaacatgggactagtaagggttggaaaagctgatgaagttcaccaaagcacatttatcttgccttgcactgggcctgatggtcaaaagggaacaattcagccttatatcatgccaatccccattaatctttggggtagayatttgctggaacaatggggggctgaaattaatattccacataactcttctcgtgctcccagtcaacatataatggaaaacgtggggactgttcctggactcagtctcggtccaaaacatgaaggaattactaaattcctttatggtttaaaagcataatttaaccactccccactcccaattccatttagcattgtttactttaaactttctaaatgttcctaaagacaatactctgactgcagccgaacaccattatacaggcaaaaaattctccctaaatgaaagcaagccagtgttatggaaaaactcccagacaaatacctggkaacctggaacaattataatgtggggaagagggtatgcttgtgtttcaccaggagatcatcaatcccctgtctgggtgcccactagaagactttaacttcgtgtgaatactgacaatgaaaaacacagggaagagatgtccacgtcagagactgccctcatacctggtgagatctgtgccaactcctcaaaaactggcacaccaaatcaaaatggatctcattcaatcctccctaatggcaacagagacccctctaactaatcccacttctcctaattacctttctttttctccttacaaacctgaaaatctcaccatttctattagcctgaaaataacatccctctgttcttctcttcctccttcagcactggatctcgcttacaataggttttatttaataattctactccttatactttctgtctcaccagtttcccctcacactgatttgcctgctacacaaaattattcttattgggcttatgtgccttttcctccacttattcgacctctcacctggatgaatgctcctgcggaaatctacactaacgatagtgtgtagatgcctggagctatagatgaccattgccctgctcaaccaggagaagaaggcactgcatttaatgttactatgggttataaataccctcctctgtgcctcggacatgcaactcgttgtatccatctagaaactcaagtctgggctgcttatcttctggagagattagctacaggaaaatggggacatttggtctccggcctctccctttgtcctttaagacaaatgaaaaggggagtaataggagataccccatactttcaatataaacctgtaggaaaactatgtcctaaaaattttgagggcccatctaaaactttaatttggggagattgtgttaactcacatgcagtagtattaaaaaatgactcatatgctttagtaatagactgggcaccaaagggctatttaaaaaacacttgctcctctgggggaggggaattcctggaggctacttattttatttcttattgggaggacgaggatcatcatcctactttgcataggtggttcggctcattctttaccttaaaatgggaagataaggacattaccctccacccccaaggccttgtatgatattccccattctgagcccagaacacccagaactttcgaaattggctattgtcatgtctggactgccagtatctgtgattctgaaccccatgataaatcccctttgaacctttttcctctttttgatgccgatcctcctttacgggactccaattggcattacgataattcttatcgacccaggtatgcccctctacttcttcagcatccccaggcacctcggtttgcttctttatggtggagaacatcgggcattgccaccgccgctcctctccctcagtatcaacatagattcaagcattctgctttgtttacctccaacctgactattcctatacagagttgtgttaagcttccttacatgctgttagtggcaaatatcaaaatttggacaaacaatcaaactgtccaatgcattgtcatttatacacttgtgttgactcccgttttgactccaggaaaagtgtaatgttggttggagctcgagaaggaatctggatactgtgtgccggaccagccaaagaatcctgtgtcaaaaccgagagaacgaataagccttcatcaccatggcacatttatataaaaagaaagggagagatgttgcgggaagtcagggaccccgaatggagggactgactggagccgcggcagaggaacataaattgcaaatatttcattttaatatggacatttatcagttcccaaattattactttttacatttcttacgcctgtcttactttaatctcttaatcctgttatcttcataagctgaggatatatgtcacctcaggaccactgtgataattgtgttaactgtacaaattgattgtaaaacatgtgtgtttgcacaatatgaaatcagtgcaccttgaagaagaacagaataacagtgatttttaggcaacaagagaagacaaccataaggtctgactgcgtgcagggtcaggcaaaatagagccatatttttcttcttgcagggagcctataaatggacatggaagtagggaagatattgctaaattcttttcctagcaaggaatattactattaatactctgggaaaggaatgcattcctggggggaggtctataaacggccrctctgggaatgtctgtcctatgcagttgagacaaggactgaagtacaccctggtctcctgcagtaccctcaggcttactagggtggggaaaaacctggccctggcaaatctgtggtcagactggttctctgctcttgaaccctgtgttctgttgtttaagatgtttatcaagacaatacgtgcactgctgaacatagacccttatcaggagttctacttttgcccttgtcctgtttcctcagaagcatgtgatctctgttctgctttttgccccttaaagcatgtgatctttgtacctaccccccgttcgtacaccccctccccttttgcaatccttaataaaarcttgctggttttgaggctcgggccggcatcacggtcctactgatatgtgatgtcacccctggcggcccagctgtaaaattcctctctttgtactctttctctttatttctcagccagctgacacttatggaaaatagaacctatgttgaaatactgggggcagtttccccgatagccttgctgaggaaattaaatttatgttcaagtgctatttctttatggaaccaaggaacaagtatttcaaacaatactaatgtaacagtactggttctatgtgtttcaaaattattattctcatgagtgttagctttcttaaaaaatcgtttttatcaattggatctagacatcttatctttcacagctcaagacccattaactcaaaatcataaactcttaatgcataatgagaaatataatgattcctagggccaggcacttgtgtctgtgctggtgctattgcctcaatgcaggaaaatctatgtgagaattcactgtgaggccaaaactgcttcctaaacatggatacctgccaggtatctgagctgggagtactgcccaggtctggatgggtggggagtgtttgcaacaaggactgtgccttgccagcctcagtgacacagtgtccaagtgccccaacttagcagccacctgctgaccacctgatttctgtggcctaatagggatgtgatgaagtctacctgtttactcaaccccaaaccacacattatccaggtggtttgaaacttttttgatatactgggttcatcctctggagtcctaacaatgttttagctaatttacaaaaaaacaaaaacaaaaacaaaaaacaaaaaactactttttttgcagcacaacagcctggtttacattgcaaaatgatttctcattaaaggtctatcatctatttccatatatccattattatttgtaatatcctttaaaaaaagcagtcaaccccaggctaatccattgcacaactcttttgaaagtcttccttctaccttgaaagaagaaagttggcaggttggacattgttcttgcggaggttgtaccatgggtcacatatcacggtgtgacttcaaaggccactggagccaccgtctcatactgaagaacacacatgggtcaggagccaggtccaggtccggcatggtggatctggagaggggagagtccctgcctgtgatcctgtggggagccctcaggctcctctctggccaccatcctctgacctccctcctcagcaggacagggttctggcttctctgagggacaggttctgtggcaggccaggtgtcactaacacaggcctccataacaactgtttcagtactgactgagtgatgaaattaaatattaaaagctgaaaaaagccagtacctttatacagaggctggatgtaacaaaagcccaccaagagttttgcttaggcctttcctgggccttaaagcatgacaaaacaacgaaggaattcttaacaggacctatttagaattaaacaagttttattgtgagtctgaagaaactccccaggcctccacaaacaagtttactgggcatctgaaggaactccccaaacctccatgatttagcaggagacaagataagggcaatcatcccccgcacctggacccatttagattaagtaaatagactgaggctccagagtaaggtcctcaggacccagacctcagttacagattaaagaagttaatcacttatgtctttagatgaatgcacacttacttgtagacatataccttagaaggtatatatgctctggaaaactttaattttgagttggtctggtagtaatttccaggccttctccctgtaactggttgcagaaataaaacctctcttcctccccatttgatctgcatctcgttattgggcctagagaaatagcagccggaccctcagtttggtccgggaagttcttccatcctccctcgcctgctctctgtggccactgcactcactgttgctgttgctgttccggtctctgtgaggttcacctagtggactggctggacatttctagggggcacctcagatacctcaccaacttgctggatctgatccttggatttcgattcataaattgtgccaaaatacgaagtggctaatttacatagtacttagccagatgaccgaaggactcagtatccaaaggcccctaacagaaaacacagaccacatttcctttactctggcccttttcctgggggtccttcctataccactgacactgttcctgtgtaggcggggctagaggggagactaagccctcggagtagctttcggatcagaggaagttctgctcttacagtgacaggggctgaattaaattcccaggttggggccaccactttttagtctgacccctgcagccggagtctcccagagcccttgggaactcggcagctgagagaaggctgagggattccgcgggcagggaggagaagggagaagagctttgctccattaggatctggctggtgtctcaagcgcacagccaagtcgctgtggacctagcaagggctggatggactcatggagcctcagggcgggttggggaagctgtcgaggccgagccccgctttgggcttctgggcgccctgacctcgctcccggaaccctggggactgggaggcgggagggggcttattgattccagccccgggcgctcgctcgggggcctacagaatggcgtgtttcggggttgtggcgggccgaggggcggggtcgcagcaaggccccgcctgtcccctcctgggcctctcaaagtctgagccccgctccgctgatgcctgtctgcagaatccgcaccaaccagcaccatgcccatgactctggggtactgggacatccgtggggtaagcgagggtcctctggtgggtgggacagggggcggaggcggggatgtgtggagtagctgcaggactggctctagggaccgttcctcttcagggctgcccgcctcagaagggcctgtgcatgacgctgtgtgtgtgtttgggggtgggggcgggtagaggaggcgacgggtacgtgcagtatagactaggggctggcctggtgcagagaaagtcaccaagtcagggaccctccatctctgacccgagccgcgggccatctctcccagctggcccacgccatccgcttgctcctggaatacacagactcaagctatgtggaaaagaagtacacgctgggggacggtaatggcaccctcgtgtccgggccctgcccactcacgctgagttggcaccaagcaacccatggtggccacctgtggctgcctctgcaggcctcccctgctggagctgcaggctgtcccttccctgagctcccgtgagtgagccctctggccttgcaaggcagaatgctggggcgggatgctggacaccctgtctaattgggttgggtgtccctcagagcttccctaaaccctggaagccttagccgttgtggggtccagagccctcagtgggattctttctccctgaaccctgggatgtgggactgagtggtcagattctagatccacctgtctcagggatcttgccactggctccttgggagggtccccgggaaggagggctgggctctggggaggtttgttttcacttcttccccaccacagctcctgactatgacagaagccagtggctgaatgaaaaattcaagctgggcctggactttcccaatgtaggtgcaggggaaggggcggttttgggggaaagtgcgacgtgtctctgactgcatctcctctccccaccttagaggtgttaagatcaggagtcttctgcccaattcctctcactcttggctgtctacacagcccttgcatgatgttctgtgtcccagctcatttattagtgtgacagtatttctatctcaggcctgccatgagcaggccctggtctcctctctgcccttgcatatgggaaggggatgctggggagcctggtggcccaactgagcttccccggtttcccatctatccagctgccctacttgattgatggggctcacaagatcacccagagcaatgccatcctgcgctacattgcccgcaagcacaacctgtgtgagtgtgggtggctgcaatgtgcggggggaaggtgacctcctccttggctgggctgtgatgctgagattgagtctgtgttttgtgggtggcaggtggggagacagaagaggagaagattcgtgtggacattttggagaaccaggttatggataaccacatggagctggtcagactgtgctatgacccagattttgtgagtcccacaccccactcccagtcacccatttccctgccttttggcccagaccagggagggacttccaaagtcaggtctgtagcagactccggccagctgactggagacgtctataacctggttctccaaaatgtccacacgaatcttctcctcttctgaagattcttgtggacattttggagaaccagaccacggacaactggatgcaactggtcatgatctgctaccacccagagtttgtgagtctccccagtgagctgcacctggcagagtttggatttggggccaggactcttgcattcctgcacgcactggtcttttcttaagtccttggtaccactcatcctccaagtgctttcccatactatcagcagttattctcacgactccaatgtcatgtcaacaaaagcagaggcaattcccaccaatcttaggacacgatccaggcatcccacggtggaaattcaattcctagatggtaaaatttgtgttcagaatctccttcatctcctctggcctctggcctctgtcatgggtcatttctgtcagttgatttatatcacctacctgctcctagaatatacagactcaagtacaagaccaaggaatgtaatggcaccctcaaattgcatcttctcctcaaagttttccaagtgctgtcattgacatgcaccgggatctgcgcattttcataacagacagctcagaggcagccagagggcctttattcctctccctccttcctttcaacttgaacttctcatctccctggaaactagtcaatgttcattgttttcttctgtcaccccattagaaggaactttctacttctttccctgagctcctttagttctttgcatccttgattctgcccctgtctggatccagaggctgccaggtgctcgggcgctcatgcggctgacccagaggctattgggaggccagtgaggacagattcaggaagagcatctcattctgatcacttcagatagggtctggcacccagtcagagtctaataaatgctgatgtatccaattgaagcctgggcactgccccggttttagttgtggggaagatggctgcttgcctgtggccagcctgggccatctacagccctggggaggccacgtctgtgcagggagcttttgtctgagggtggtgacagctgttttctgcctcaggagaaactgaagccaaaatacttggaggaactccctgaaaagctaaagctctactcagagtttctggggaagcggccatggtttgcaggagacaaggtaaaggaggagtgatatggggaatgagatctgttttacttcatgtgtttcggggttttcagcccacacattcttggccttcttcagatcacctttgtggatttccttgcctatgatgtccttgacatgaagcgtatatttgagcccaagtgcttggacgccttcctaaacttgaaggacttcatctcccgctttgaggtgatgcccccatcctcctttctctttgatgccccttgttcctttctctcctttcagatgctttcccagtcctggagctacacaaagaataactcgtatgtattgagtacgggcttcatgccaggaatcatgcccagcacattatacctatcgtgtagaatttgaaatttccaacattcctacagggtgacagaattatcttgcccattttagagataagaaaactgagaatgagagggtcagtcctttgctcagggtcccagagccagtggaggctgtgctgggctccctgtgagcctctggatctatgg

SEQ ID NO: 94812 - DNA, 40874 bp, Homo sapiens
  misc_feature (1)...(40874): n = A,T,C or G
gcctcctcgttttattttttgttaaacttatgagaatgtgttaagaaagagtgcagctcgagagacattcagagatggaacacaccagaccccagatcacaaagccaaccatgcccagcccctcccaacacccccagccccacgaccatcgttctgaattctgacgacgccgtgagcctgcctttgtactttaaactcatggaaggataaccaccttcacgttttgaaataaatgtttcctgttgaaatgattttagattttagacagaaatattgaaaaggcactatagtgtcctcctataccttccatccagctgcccctaataatgatgttttgcagtcccatggcacataagaaatttaggccgggtgtggtggctcacacctgtaatcccagcaatttgagaggtcgaggcgggaggtgcaggttcacttgagtctagaagtctgagaccagcctgggaaacctaggtggacccggtctctagagaaaagtcaaagaaattagccaggcatggtggcgcgtgcctatagtcccacctagtcaggaggctgaggcaggaggattgctggagcccacgagttccaggaagcagtgagccatgattgcaccactgcactccagcctgggtgacagagtgagactttatctcttaaaaaaatttaagaaatttaatgtgggtacaattctattaactaaataataatgtgaactattatctaaggttatgaaggctagaattatcccatttttgcctaacttctcgtacctgtcccaagatcccaccttggactcaccctctgccttccactcatgtctcttcagcttccttcacatggtccagcaaacacacacctgggctgaatggtagagctgattgctcatacacaaaggtagaccggtgggcagggattttcagacttatacagtcaatgagttttccttggtgttctggagagcaccgttgagaaacactttgacagtgaatctaggcctcaggatccatcagctgctctagcttgaattttgctcaagctcagtgaacacctgctctgccgggtgcacgtgaaaggggcaaggatgagtaagctgtagataaagaagacaggacgcagggggtctgtctaagctctatcccctgccttcagcactgagggatgaaatccaactcttagggaacggtggccacgtgctgggccagccccaggctctcaggatctgacagtgagtgacgcagaaccaggccttgcccctggggagctctccagcatacacctccctctcccctcccagcgtcccgcaaagcagacgtcaacgccattgttaatgcacagaggaggaacctgactgttagacctgggttttccagggttgcacggcttctgggagacggatgtgaccctgaggatagggcacaggccagtgtaatgccaggatggaatgagctgtgatctgtgctgcacagaggcctaggccaaggtgggactgacggatgaccaggtcagccgggtcactgaaaacactcttgggtcctcacctgctggttcccaggagtccggaactgccaggagagtggtggcaggtcccccatcctcagctgggtgggcctggatagaacagcaaggcgagggcacatttccctggccgttccctccaggcacagctgtgacctgctcattccaattttggggaaatatttccacatacacagaactgcaaagagcagtggacatggtgagaggtgtttggacatgggataggcaggattttggaggcagagcccccagggcttgccgatgggttagctgcagggcttgagcggggaaggagaatccaggatgatgtgttcacatcggtccattcgcttcctccgtgccacgcctgtgctgggcactgggagagacagatgagcacaggagcaccaggctgggggaggtgtggggggaagcccagagtgtctgggcagggtaggaaacccagagcgtctactgggagctgaaggcttatgtctacctcaatgctgtccgcgttcgctgtatgaacaagttcaggctgagctgcctggaggaggagcagctgctgttgctggtgaccagcacgttcgggaacggagactgctctggtaacggagagatgggtggcctgaggtctggatggtctagggggtgatagggcacagaaggacccaggaaagggtctgggggatgcaggacgttctacagagggcgtttgggagtcagtgctcaggtcactccaggtcacgcaggtcatttgctggcctctgtcgtaattattgccatatgagagtgccacctttcctgcgacataatttagatattcctgtgaatggcctacctgtttatatttacaacttcatgtttaaaggaaatttgtatcactctcacaaatggaaagccagcaaaacataaattcaatgaaaacaaaatgaagtcaatgaactttagctagatgctattccctgaccaaggcctgctggaggcggtacaaccagggtttgaattgagatctgccaagcttctgagtttattctgtttcccccgcaccagggttcctcaatactgcattactgacatcaggggccagacgattctttgcgatgggggctgtcctgcacctggcaggatgtttagcagcttctctggcctccacccactggaagccaggggaatgcagaagaggcttgtttattctcccatttaatgctcaggacaatatctgacataaatgttatgtcttttattttataaatgaagaaaatgagactcagaaaggtttaagcgagtcacctaagaacacacagacagcaagaggtagaacccgaaactgaacacaggtgtccacatgagacaacaaaaaagttcagattccagcttcctttgagtctctcatttcaacaatggccatcatctgcatacgagctgaagtacaggaaagctgggctgaactctcctcccatcaggcctaggagccccggaccagaaccccagcccaaggtctcccagtcaggcccgctggagggagctggcatccacactagcatggtttctcaaagctacagggatgccagtctcgccgctgatgaagaaaatgaagggcatttgcttctcctgcaggctgtcgggatttaacacagattccttttcttgctctcttctcccgtagcacaaaactgggtggtccatccccctcccgctgtcccaaggctttgttgcgtgttctctttaatttctcccactctggcagtgcaccctaccctcgtctccctggcaaccattctgctctatcctctccacacctggatcacaagaacacttgggaggccccttaacaagctacatcccaaattatgattcccctttgtcctcagccagtgcccaggtccaacttgctctcctgaggtgactttctttcctgcccaatatggtttcctcatctgtaaattggggataatcgaagtcttgatcctgatattgggctctcaaagcagaagtagcaagctcagccaagtcacttaaacaagaggagacgttccttgtgaaccaaaagggcactggtcacaagggccgctccttctctcaggcctctccagcacacccttggctcagccaaagaagagactcaggctgtgcttctgcgctgtggggataacgtaagtacctggtccttgaccctgggactttaacagttccctcttgtggctcagttctacagcttcaatgacaaaaagtggcttttgctcaaaatagcctttgataggttaaggtactcctctgccactctaagtctgtgtggaacagacagggttttgcttcacagagaagatgcataaaatttggtcttaaaaatgagttcaccatgcacacatacacacgaaaaaagtaaatactgcattactgtatatatgaggttccaaaataggcaaaactaatttatggtgacagaatagtggtgacctctgagggtcagtatcgactgggagagaacagaagagagcctactggggtgctggaaatgttctgtatcttaattttgcaggataattccttggatgcatccctaaaaattcagtcaagctatgtagtaagatttgtacagtttacgtaagtaataggagagataagagggggaacctgtggagaagcagaacatttcaagatctagaaagcaacatttgcaagggtacacagtgttcagacagggaccaaatcatagaaactactagggcttgccatgctgaaacgactgacttcaaaccatagggcatacataccttccactgaagaagagcacctgagtgaaatgactagaggtgcatttcaaagattattctattggaaatataaagaacgaattggaggagtaggaggcaaatagtccaagggacagatgaagaccttttttttttttttttgagacagggtctccctctgtcaccctagctggagtgcagttgtgcgatcatggctcactgcagcctctacttcctgcgctcatgcaatccttccatctcagcctcccaagtgtctgggactccagatgtgcggaccacacctggctaatttttttattttgttgtagtgacgggaatctcactgttgtttcccaggctggtcttgaactcctgaactcaggcaatcttctggccttaacctctcaaagtgctgggattacaggtatgggctacagtgcctggccttattaaaatgttgatgtaataaatgggactacctagtgctgtgctttctccttaaaggagagagctgacagaataaaactagcagtaataatctggtaaattgtgctttctacagagtaaattttgtttgtctcatgacatttatgcaaatattcaaatgtttcaggaatataaacatttaaaatttgggttataaataatgcctcctggctctgaaattatctgaattcatgaagcaatcagtagtaaatatgaaggaaaaatgaaacacagccttatatgcaaggacaaacacaaatttctaattcttgttataatttgggtgcccacctggttttgaaggtgagccttggtttgactggttctgagacatttctctcaaatagcaaatgagtagtgggtatgaatagggtacattggaaagtcatgtcaaaattccatgtaatttttggagcgttttttctcccatgtaatttatataatttgacatgtgtattcctatgtaaaatatttaaccacttctctacaacaagcattaagtgggctaattagtatgctcttcttatttcatatttctgtgatttctcttatctggaatgacttttttatgccacccaggctggagtgcagtggcacatttactgctcactgcagcctcaactccccagggtcaagccatcctcctacttcagcttccctagcagctgggactacaggtgtgcaccactatgccctgctaatttttgtgtttttttgtagagacggggttttgctatgttgccccggctggtcttgaactcctgagctcaagagatccacccaccgcaacctcccaaagtgttgggattacaggcgtgagccactgcactaagcttcttttctaatttgtttttattctgagatcagatgagatcggcatgttcaggttggtatggccatagactgcttttatctattctaataattttgtattgtacaatgtgttggaaaggcaagatgaagttagattatgaagggttcatttccattcaattctgtctatccttctggacttggtgatttttgttgctttgtccaagaatacccaagtgagttatttgtccgtttttctgtatagacagcatgttttgtaacttaccatcattttgtatacataagttagactatttttatgtacccttttgtttagtcagattggtttgatcacttaatgtttgtacctcttgaggaaaaatttagttgggaaaatagtggtgaattcctgtgacactgctgtttgaacattaggagacagcaatcaaatatatgactgatggatgtttactgaaacatattctgggagacccaantcttaccaaattcagwgtcattattttggatgaagcccatgaaagaactctaactacagtgagtattttaatttattattattttttattagcaagtagtttgtttgggtagctttttattgtgtagagaattgcctcctcttactttttaatttaatttaattttttagagatggagtcttgctccatcacccaggctggagagcagtggcacgatcatagctcactgcacccttgaactcctgggctcaagtgatcctcccanctcaacctcctgagttgctggtactgcagacgtgcatcaccatgtctggctaatttttaagaatattttttgtagagacagtgtctcgttttgtttccctggcaggtctcracctcctggcctccgaccttggcctcccaaagtgctgggattacaggtgtgagccacygcacctggctcctacttatattttaatgtattaaaataggaattccttggttagaacagcagcgtatttagaatagtttggctgttaagtgtgcttgtgacttactagaaatttacttttctttcaggatatcttatttggtctattgaagaagctatttcaggagaagtctcctaataggaaggagcatttaaaagtggtggtaatgtcagcaactatggaattagccaagctctctgcattctttggaaattgtccaatatttgatatacctggaaggctttatccagtcagagagaaattctgcaatttgattggtccacgagacagagaaaatactgcgtatattcaagcggtattacttggcattcatttaatgtcttttttaaatatctatgattcttactaattgggtggtttgataattcatttgttcactactattttaatgacagtcctcacaggtcctagaacttttaagaaccaaatttaatttttctgtggggcaagggaagtggtggtaagggaatgactgtatttccactagcatattatgcctgcatttcttgctttagattgtgaaagtcaccatggatatccatttgaatgaaatggctggagacatcttggtttttctgactggtgagcattcagtatcaagttaaaaaacttaagtatttgtaagtaaggaatgtggcacccagatagagtgctacctctgttgggaattctgtgcccttctcaagtgttgccctagctttttctgattatctgaataattttaggtaaaagatagataaaaattgtaagctagctgccaaagaggattatatatatttatgtcaaagacataatagtatgtatatatattttatgtcaaagacatagtagtatatgtcaaagacgtaatagtgtatatgtatatatacacacacatatatgtcaaatgtcaaagacatcaggctcattagtaaatatatgtaaaacacactgaccttttaatagaaagaaattaaatagtgaaatattgttttttgttggtctgtcttagatagaaatgtaacctgactaaacagacctgagttaattccattatttcaaaggacatttcaccaggttcttctttgggtggtggcattgtactgtgtgataacaacacataaggtgtagaatctatgtgtcgtagacaagcatgtggcatttttggagatcaaaaataaaatagttaaatcccaaactagtggcataacttttcaaatagcagcaccctcctaataggaattagtagtttccttgtttacctttttcctctgccttgtactaatgtcagaagtgagggattgtcacaatctttgcctttttggagattacttaagtattttgaaatttaaccaaatgcaatagcacctggactagcttttctcctttgttaacaatttggtgagtcttctcaaatacagggtgaaaagcttgacgatgataaatatttttattcctttagagatttaggtttcttagaaactgatgtttcttctacttcgaattttattgttgaaatatggtacagcttatgtgttcatctcctttacattaaatgagagatttacaataacttttaggcaaaattaattttaatcttgacattttctttatttttaaattaatttttctgttcagttgctgaagttatttttttcttcccattttaggccagtttgaaatagaaaaaagttgtgagttactttttcagatggcagagtctgttgattatgattatgatgttcaagataccatcctcgatggcttgttaatattgccgtgttatggatcaatgacaactggtaatttctcattagaatagaaaatttgatttttttaaaaaactttttattgaataatcgtgtttacagaaaagcagtcagatcttaagtgcttaggtaagtttcacaaaccagtctcacctttgtaacccacatccagatcatgaaacaaatcagtgagaaccagcattccttgacagtagtgatttttgcctgaagtctttttacattcacttttttgagagtcgtggatatcccccttattatcgtttagagtattgtttctcccagcaaaacaaaactattggtgagaattctttgaaatgaggacagtagtttcttgctggtattactgtaagtcaaaacctaatttgccattgccacagaatttttagaaattgtgtatatccagctatatctaagtctaaacacagtggattgttttgttttttttttgtgatggagtctcgttcttgtcatccaggctggagtgcagtggcgcaatctcagcccactgcaaccgccacctcctgggttcaagcgattctccttcctcagcctcccaagtagctgggattgcaggcgctcgccaccacacctggctaagttttgtatttttttttttttttttttagcagagatgggattttgccatgttggccaggctggtttcaaactcctgacctcaggtcatctgcctgccttggcctccagaattgctgggattacagatgtgagccaccatgcctggctgtggatcattttccttttaaagtagccatgccttagtctgcttttcaagaatgatcctgttctttggtgaattccaagagcaaatgcaaactcttgatttgacattttggttatagtaaatattgttgaatgaggtttagaatttgttttataaaacttttattatggaatttaacttgtaaagttaaagggaaattaaccttagcctcctatttggagttggaattagcatttgaatgtttttatattttacatgtatgcgtattaacagcttttgttgattgggtgattcttatccctatattaacaaagttttggaatatatgtgtcagtaaagaacatagatgtgctattttggaaatcttttttatgatgatattagcttcttactctctattgaagcatagatatctattttagattttgtcatcttcagggaaattcttaggatcattgtttaaggttctcattgttttctcaagatttggttcaccgatgcttttataatttacattgaaactgataaaaacccattatgtttggtttgttattaatcattaactaaatatgtacatagacatatattattctatacagagtaaataatttcattctttcttactgctacattgaaaataatgttctggattttctcttgcctctgtttttttttttttgttttttgagatggagtctcgctctgtcgcccaggctggagtgcagtggcgcgatcttggctcactgcaacctctgcctcccagattcaagcaattctcctgcctcagcctcccgagtagctgggactacaggcgcgcgcccccacgccctgctaattttttgtatttttcttagagacagggtctcaccatgttagccaggatggtctcgatatcctgaccttgtgatcctcccgcctcagcctcccaaagtgctgggattacaggcgtgagtcaccacgcccggcctagaaacatgacttgtaatgaaaaattgagttcttcaaaactcgagtttgacacatgcatgttgtaaattggtattttctttttatatatacttcagatcaacagaggaggatatttttgccaccaccacctggaattagaaaatgtgtcatatccaccaatatttctgcaacgtctttgacaatagatggaatcaggtaaaacttttgaactttctcttaaagtcaaggaagcctatcgttactaaacattagctaaacattactgagtttgcttttctgtgccctccactaattcccttctctcctactttttgatgttcttaacatgtaatcacctattttgttttgtaattattgattgctttgagcaggaaatggagtaggaggtacatactatattcctattcacactttttgtttttttagagacagggtctcattatgttgctgaggctggaatatagtgactattcacaggcgtgcagtcatagcacactacagccttgtatggagatcagccaatcctcccgcctcagtctcctgggtagctgggaccacaggcatgtgtcaccgtacttggctgttcacactttttaactacttggcaacttgaagcttcttttcaaatttaagattatgtataatgctttatgggtttcactaaataggaagccaaacctatttttctgtactcccattataagcatataccttagatgatttgatatttccttctaccttgcagcctcactcggtagagttagtttgtatatccagtgtttatctggatgtattgtctctgactttttacctttttgtgaaaattaactatgattcaggtcccttatcttttctggatgtagtaaatagtgctatcaaatttttgggtaaatttagtaaggaaacactaagaaattttaagtctggactgacaactaatgcaaagttctttaagactgggttatttatcatttaccgaatatattttatttctttagctaagtctgattgtctgtctccggaaggctgaacctgaatctcaaagatcctgtgtgtttcttctgggtaaaatgatcacccaggtctgagaggaagtctaatttcctctgcttttcttcgttactttaaaaataatggtttcactaagggattaagggagtgctctcctgggtaaattaacctctgtaattttctgtttcctgcacaggcaaaagccattaaatagcatgtttcagaatgttgtcttgttactgctatcctactttggttccttacctgacttgttcaccatttaattggcttagaatggcatgttaagggctagttgaaattagattctgaatctgtttaaatggtctgaagctgactttcaagtttgtgtatttttgtattgaggcaaaattcacataaaattaatcatttaaaatgaaaaattaagtagtacttagtacatttacagtattgcgcaaccactgcttctgcttagttctaaaatatttcaacacctcaaaataaaaccccatacccattaagcaggtactccacattcccctcttgaccccagcccttggcaactaccagtcttactttttgtttgtacgtattttcttttttaaaaaattctttagatgtgtcagcaggaagcagtaggtattttctattctggatatttcatacaaatagaatcatataatatgtggccttctgtgtttgctttctttcacttagcataatatttttgaggttcgtccacattgtagcatgtatcagtacttcattcttttttgtggctgaataatattgcatagtgtgtgtgtgtatatatatatatatattccattgtgtgtgtatatatgcgtgtgtatatatactacatacatatatgcaaagcaatttgttcatcccttcttccattaatggttaatggacatttaggttgtttttaccttatggctgtgattcatagtgctgatatgaacattggtctataagtatttgtttgagtacttgttctcagttctttttggtgtacacttagaaatggaattgctggatcatatggtaattttgtgtttaacttcttgaggacctccgaacaattttccacctcggctgaaccattttacattcccaccaacaacatacgagggttccaatttcttgactttcaagttttacacttaacataaaaggcattgtgtacctgctagtttgctagaaaaggagaaaccaaagtggttaacaattaacaagtcttcttttattttccagaaacttaacttgctttgattcttcttagatatgtggtagatggtggcttcgtgaagcagttaaatcacaaccccagattagggttggacatcctggaggtggttccaatttcaaagtaagtctctatgtcaaatctttttattcaaagaacaactgattaggtaatttctagctgttttggggagacaaagtaaattacctgagaaacccacagaacattttggggaatttttgggtttttttccttttgtaggagcgaggcattacagcgaagtggccgagctggcaggacttcttcaggaaaatgctttcggatctatagtaaagatttttggaaccagtgtatgcctgaccatgtgatccctgaaattaagagaactagtttgacatctgtagttctgaccttaaagtgccttgccatacacgatgtcataaggtatgtagacaactagaaaaaaaaggaaaaacttgttagcctggaaccaagttattggctcaaaaattattttgaaatatttgactgatacatccctgagagttgaggctaacctcttttacaggttggtttttatattggttgcttttcttttctttttttttttttttttttttttttgagatggagtcttgttccgttgcccaggctggagagcagtggcacgatcacggctcactgcaacctccgcctcccgggttcaagcaattctcctgtctcagcctcccgagtagctgggactacaggtacctgccaccatgcccagctaatttttgtatttttagtagagatggagtttcaccttgttggtcaggctggtctcgaactcctgacctcaggcgatccacccacctcggcctcccaaaatgctgggattacaggtgtgagccactgtgcctggctctattggttgcttttcaactaaactaacacagaagacttccttgcattgctttagtaggatctcttgctcatgtttaaccttggcttaatggcggggttagggggttgtgctgatgtttatgtggatcacttagtgaccactgtttatttgtaatgaaaggtatataatgagctgggcataacagcttatgcctgtaatctcagcactttggatggccaaggtgggagggttgcttgagcctaggatttcgagacaagcctgggcaacatagtgagaccttgtctctacaattaaaaaaaaaaaaaagtctgatatggtgcatgcttgagtcccagatatttggaggctgagacgggaagattgctggagccgggcaggtagaggctgcagtgagccatgattgcaccactgcggtccagcctgggcaacagagtgagaccctgtttcaaaagaagggggctgggcgtggtggctcacgtctgtaatcctagcactttgggaggccaaagtgggcggatcccttgaggccaggagtttgagacccgcctggccatcctggcaaaaccccgtagctactgaaaatataaaaattagctgagcttggtggcacgtgattgtagtcccagctactccggaggctgaagcacgagaatcacttgaacccaggaggcagagactgcaacgtgccaagatcacaccactgcactccagcctggtcaacagagcgagattctgtctcaaaaaaaacaaaacaaaacaaaagggtatacagttggaaagtggagtgttttttttgtatggccagcatcatactatataccatgaaagacagagtaatactctgtagttttttgctttcactaagcttaagttatattaggaaaacaaggttcagacacgtgaaataaaggaagaacagttaaattagccaaatattaatataatttattggtataagatagaatattgttatagatagaaatttctatcatacatggtaggggaattaatggaggaaagtactatcttctttattttggtcttaattgccttggaatgtaaaactgctcaggaattttgggggatggtaaccgtgcagtttttaaattcatagtaagtgattattaggtgcatccaaatatgtattgtaggccgggtgcggtggctcacgcctgtaatcccagcactttgggaggccgagacgggtggatcacctgaggtcaacctggccaacatggtgtaaccctgtctctattaaaaatacaaaattagccaggatggtggtgctcgtctgtgatcccagctacttgaaagcctgaggcaggagaattacttgaacccgggaggcagaggttgcagtgagccgagattgcgccatcgcactccagcctgggcaacaagagcgaaactctgtctccaaaaaaaaaaacaaccaaaaaaagcaaaaaaaaccccaaaacccacaaatactcattgtatactcttggaaagccaatttgccaatttcaaaatgttttgatagttatcattagactagagattttctgaatgagaatatgtagatactggaaagagaaaagcatgtaataaatgaaattctgactgtagcaataaattataccaatgaaaagaaggaaagcgccatttaaagaaatccaaagagcccaatagaaaactttcagatgaacccagatattaaaataatgtcttgatttttttcatttggggaaaaagggccatttttggaaatagctgctcagtaagtttgacattgactcttagtatattcacaaaggatagcagagcagcctctaaccaagaatgagtatatattagaaaaataggaacaataattaatatcatctgcattgaattatttttccatcttaagtcttaaaagccatagtgtactaaaaatcgcaaaattttgtttcaaaatgcttgaaacaaaaaacaaagacttcctttttaaaaagttgtataaagaataaggagaggtagagccagtgtttggggtagatggtataggattcatagacgacagaaagaaaatggaccttctcaattattattttgctttccctttcttttccatcaggaagaataattttaaagctgaaaatgcaagaacaggtctgaataagaaggaattgatgactaaggtggaaggaaataatgagggaaaacctaccaccataagtgattttgtcttgagcatttagacattatttccgtggtgttaaaagaacttgcagatttagcgtcagagtcactgtaggtcatctatgagaaattatgcagaatacgttatcagaaaatggtgagaaaggcaaaagtcttaatttttttcatttggtaaaaagggcgggttctggaaacaactacccagtaagcttgacattgattactagcgaactctagtacagtttattgaaaaatggtttaaggaaatttaatgacgattaatgagtatgaattttaaaagttcacaatgaatatgtcattttttgttgttgttgtgtttggttttggttttctgaggcaggatctcactctgtcacccgggctggagtgcagtggcacaatctcagctcactgcaacctccacctcccaggttcaagcgattctcgtgtctcagccttctgagtagctgggattacatgcgtgtgccaccatgcccggccaaatatgtcattataagccatttccttttcagtttgaggacaggaccgtccacataatgggtgctccacaagaatttattgaaatttaacctaatgtcttttattttcagcacagtatttaacaatactgcatttgatatcttgtgaataaaaaagtagtctgtagatgacagtactgctgagtatagttgccagatagcccagtctagaaaagtattaattaattgcttagtgtagactagatgaagtttttactggtattgtgctgaacttagttttttcttgataaacatttttaatgatactgaataaaaatattgaagttatgattatatttttctggaaaatatcttaatatctaataggtagatgaccaagctttaaaatgactttaacagattagaaccatgggcaaaaatcaacagggtgtaaatttgaaaggatatatcttatatcctgtgtttgggatgtacaatagcaaatacatgtggtagagatctgaaattatcagatcatcacaaccttaatattggcttatacgtatggctctgtttaaaaaawttttttttaggccgggtgcggtggctcacgcctgtaatcccagcactttgggaggccacagtgggcggattgcgaggtcaggagatggagatcatcctggctaacacagtgaaaccccgtctctactaaaaatacaaaaaattagctgggtgtggtggcagacgcctgtagtcccagctactcgggagactgaggcaggagaatggcgtgaacccgggaggcggagcttgcagtgagcccagatcgcaccactgcactccagcctgggcgacagagcaagactctgtctcaaaaaaaaaaattttttttttaattccactggcatagactttggttacattaataaactaggtgatggggaattacagcattcctgttatgtgttggtcactcaacatttggagttcagttttggatataatcaagttttatgaggagtttgacatactagtgtttttagagaatggtacttaggtatggtagatctcttagaaaccaagtaacttataaggagtggttgacagaattggtaattggaggaatcaaggggggaaattaattgcaatattttagaataagtagtttttccttttatatagaagaagcagctgactggtttggtattgctctagcacaagggtggcaaactgtggtctaatctcactgactgtttttgtaaataaaatgttagaatgcagccatacccatttgtttatgtgtggctgctttcactgtaatagcatggttgagtaattgtgacagagaccatatggcctgcaagcctaagctatttactatctggccctttacggaaaatgtttaccaattcttgctgtagaagctaccaggacctattggtacaaattgtaggaaagctggcagtagaacagtgtaagagattattgtttgcttattattttttctttttataagagatgggatcttgctgtgttgcctaggctgttgtcaaactcctgagctcaagcagtcctcctgcctcagcctcccagagtgctgaaattataggcgtgagctaccatccttggccttgttttatttatttatttttaaatagggttatcaatcctggaatggacattttatataaggtattggaccttttgtcttctattggatttttttcaaggtgagaagttggagtagatgatttttcatatccagatttaaggtggaaaaaataacccagtgcagatgatatcaagtaattatttttcctgtttttaaaaaatatatattcatgtttgatgatgctatcccttttgaatattattgttaattgttaattttattatatttattaatagcgcattatggtgatgtaagagaatgtccttattttcaggagatgcatgccgagatagttgtaagtgtgcaatggcattgtatttgcaacttattctgagatagtttggcagaaaataagtacatacacatgtacacatatgtgacacaaatatggctaaattaattgaatatatttccccatttatatgaaagcattttgtccggccgggtgcggtggcttacgcccgtaatcccagcactttgggaggctgaagtgggtggatcacctgaggtcaggagtttgagacaagcctgaccaatatggtgaaaccccgcctctactaaaaatacaaaaattatctgggcatggtggcaggtgcctgtaatcccagctactcagcaggctgaggcaggagaatcacttgaacccaggagacggaggttgtagtgagccgagattgccacactgcactccaacctgggcagcagagtgagactccgtctcaaaaaaaaaaaaaattaaattgtatttaagaagcattttgaggctgggtgcggtggctcacgcctgtaatcctagcactttgggaggccgaggtgggcggattgcttaagcacaggagttcaagaccagcctgggcaacatggtgaaaccctgtctctactaaaatacaaaaaattagctaggcgtggtggcatgtgcctgtagtcccagctactcgggaggctgaggcaggagaattgcttgaacctgggagatggaggttgcagtgatcagagatcgtgccattgcactccagcctgggcaacagagtgagactccatctccaaaaaaaagcattttgaggtactattgaacaatttataattttcagtactaattaatatttctctactattaatacttctctactattaatatttctctactatttttataaaagtttggaaaaaaattatggactgcagaaaagagtagacttgacataggctgtgaaggatgggtggggcaggattaggataagtagactggtgagagtatttcagctaaggggagtcaaaaagaatcacttcttgaagtagaggagtgtgattcagaaaaaaattatttcctcttttgccaaatgctgatcatgatcatataatttttttttagaaaaagatgacttgaaaaatagaaataaaaccttttaaagaaattttcgtcatrtctatataaaatcctaccatgttcaaggaatgcctctcacttcatatctyatttaaacacacaggtttccctatttggatccacctaatgagagacttattttagaagctcttaaacarctttaccagtgtgatgctattgacaggtaaaaaaaaaaaaaaatcacaatcaaaacagatattgatctcyttttaaacagggctctaaatacctttctctaacagtagaaaataatttctttaaattgaatggattgttagtctttcatcacaattctgattgaaaaaccagccgggcgctgtggctcatgcctgtaatcccagcactttgggaggccgaggtcggtggatcatgaggtcaggagatcgagaccatcctggctaacatggtgaagccccgtctctactaaaaatacaaaaacaaaattagctgggcgtggtggtgggcgcctgtagtcccagctactcaggaggctgaggcaggagaatggtgtgatcctgggaggcagagcttgcagtgagccaagatcatgccactgcactccagcctgggcaacagagcgaaactctatctgaaaaaaaaaaaaaaggagaaagaaactrcacgrtataatcccttttgtttaataaatattggtattatttaacaagtaatttctgagtaccatttcagtgccaagcattatgctggatacataaaaatgataagagagccagagtccttgttttcatgtttgtgtgatggggtggttaggtttgatattaataattattattctcttggatgtgcgtggtggctcacgccggtaattccagcactttgggaggccaaggcgagcagattgcttgggcccagttgttcgagacaagcctgggaaacatagtaaaacccatctctactgaaaatacaaaaattagccaatggtgttggcacacgccagtagtcccagctactcgggaagctgaggtgggaggatcgtctgagcttcggaggtgaggggtgcagtgagctgaggagattgcgccattgcactccagcctgggagacggagcaagaccctgtctccaaaaaaaaaaaaaaaggtaaaatttaaaaaataaaattattattctctcatgtcttcaaagacatcttcctttttttttttttgagacggagttttactcttgttgcccagactggagtacaatggtgcaatctcacctcactgcaatctccacctcccaggttcaagcaattctcctgcctcagcctcccaggtagctgggattataggcatgcaccaccatgcccaggtaatttttttatattttggtagagatagggtttcaccatgttggtcaggctggtctcaaactcctgacctgaagtgatctacctgcctcggcctcccaaagtgctgggattacaggtgtaatccccctcagcctccttagtagctttgcaacctttgcctcccgggtttgagtgattctcctgcctcagcctcccaagtagcagggactacaggcgcatgccaccacacccagctaatttttgtgtttttagtggaaacggggttttgccatgttggccaggcaggtcttgaactcctgacctcaggtgatccacctgcctcagcttcccaaagtgctaggattacaggcatgagccaccacgcctggcctaattttcttaaattgaattgaacttctggaggtgattggaggtaaygtaaattatatctgatttattctgaatgatgaatgttacatttgtactctcctagtgtagaaagacttacaaactttttctttgtattaaggagtggccatgtcaccagattgggtttgtctatggtggagtttcctttgcctccacatctgacatgtgcagtaataaaagctgcttccctggattgtgaagatytactacttccaatagcagcaatgttgtctgtggaaaacgtcttcattagacctggtaagatgtttattttaagttgtgttttttaaaactaatagacttggctgggcacggtggctcacgcctgtaatcccagcactttgggagggcaaggcaggtggattgcttgaggtcagaagttggaagaccagccttaccaacatggtaaaaccccatctctactaaaaaaaaaaaaaaaaaacaccaaaaamaaaattaatagactttattttttagagcatttttaagtttacagaaaaattkagtagraagtacagagggttgacattcatcccctcaacctcccacagcaatttctcctattaacatctttgatttgtatgacatataagttgcaattggtgagccaatattgacacattattattaactaaagggatcactctttgtgttatatggttttagctgggattataggcatgtgccaccacgcctggctaattctgtatttttagtagaggcgcggtttctccatgttggccaggctggtctcgaactcctggcctcaggtcatctgcccgccttggcctcccaaagtgctgggattacaggcgtgagccagcacgcccagccgggttgttttcttattgttaagaggtctttgcatattttaaatagttatttaacagatagatcttttgtaaatattttctcccagtctgtggtttatcttctaattgttttgacattgacttttgcagagcrgaagtttttatttttgacgaagtctaccttatcaattatttctttcatagattgtgtctttattgttgtatctaaaaaagtcattgtcgtacccaaagtcatctagattttctcttctattgtcttttagtatttggacgyacagttgttgcggtaccatttgttcaaaacactgtcctttttctgttgaaatgccttcgcttctttgttaaatatcagctgactattcttatatgggtctgtttctgggctctgtatcttgttccatttatctgattgtctgttcttccaccaataccacactgtcctggttattggagctttatagtaactcttgaagttttgttcttcctcttcaaaattgtttaggccattctgggtctttttcatataaactttagaaccagtctgttgaaatccacaaaataacttgctgaacttgctgggatttttttttttttttttttgagatggagtcttgctctgtcacccgggctggagtgcagtggcctgatctcggctcactacaagctctgcctcccagattcgtgccgttctctcgcctcagcctcccgagtagctgggactacaggcgcctgccacaacgcccggctaattttttgcatttttagtagagacagggtttcactgtgttagccaggatggtctcaatctcctgaccttgtgatccacccgcctcagcctcccaaagtgctgggattacaggcgtgagccaccgcgcccggcccttgctgggattttaattgggattatgttttaattaagatagattaagttgcgaagaaatgacatcttgacagtattgtcttcctatccatgtacatggaatatctcttcatttatttagattgccagtaattcattgagcatttactgagggtttaccgtgccttagccctaggacagaaaactaaggataaacaagttttgttgttgttgtttttgagatggagtttcactcttgttgcccaggctggagtgcaatggtgtgatctggactcactgcaacctcctcctcccaggttcaagcgattcttctgcctcagcctcccaggtagctgggattacaggcatgggccaccacgcctggctaatttttgtatttttagtagagatggggtttcaccacgttggtcaggctggtctggaactcctgacctcaggtgatctgcctacctcggccttgggattgcaggcatgagccaccacgcccagcccggcgttaatttcctttcattagtaaaggaagatagtgcttttatagtacattagtaatttactaattttttttttgtaggatcaaaagaaaaggtagtttagcccttgcatccttagagaattcttttgaagtttccaggtctttaaacttctgcttctttcttttcttggtgtgtcagtataggacacaatttaatttgacatatgttagatttgttttcatgcagtggagtaattttttctttcaaggagcttccaagtgaacagtataccttgtctgcagccagacaacagaatgggttagctcactggctttatacctttgtaggctggaagtgtcgggtccagattaatttattattgccatgattataatggaggatacatttttctataaaaatactctaatcaatatactgtttcaaatagtttgcagtctttttttttttaatttaaaaaatttttaaattttattgagacaaggtctcactgtgttgcccaggctggagtgcagtggcgtgatcttggctcattgcaacctctgcctcccaggctcaagtgatcctcccatacctcagcctccccagcagctgggaccacagatgcttgctactatgcctggctaattttttgtatttttatagagatggggtttcactctgttgcccaggctggtctcgaactcctgagctcaagtgacccaccagccttggcctcttaaaatgctggtattacaggcctgagccattgcacccagcagttgcagtctgaagtgtcagaattttaattctggtaatacccctaattgcaattttttgttctaataaaatgctgtataaaaataagtaatgttaactggttttcatgaggcagtatcagagctaaaaataccagtgggcacagtggtatcccagctccttgggagactgaggtgggatgattgcttgagcccacgagatcagggccagcctgggcaacatagcaagaccccatctctgataagaaattaaaaaataggccaggtgtggtggctcacacttgtaatcccagcactttgggaggctgaggcaggtgggtcacctgaggtcaggagtttgagaccagcctggccgacatggtgaaaccctgtctctactaaaaatataaaaattagccaggcgtggcgtgcacctgtgttgccagctactggggaggctgaggcaggagaattgcttgaatccaggaggcggaggttgcagtgagctgagatcgtgccactgcactccagcctgggtgacagagtgagactccatccccaaaaagaaaaaagaaagaaagaaataaacaagctaaaatatttcaaaacctattacagagtattgaagtaggagttaagagtgcagggttctgtccagctccactactacctaattatctgaccatggccctagcttttctagatttcatttttcatttgtaaaaccaagaagttggattaaggtgaccaactctaatagtcttttaaggctagaaaaagaaaaatgttttttccatgttggaatatttaaatagataaaatcagtgtggtgttagccttttttgggtgacatttattcttatataatttcaaataagaatagcaaaggaattcctttataccttctatgcagtttccgcaatttttaacattttaccccctttgctttattactctgtctccctctatatatgtatatataaacagatttttttctttttctgaatcatttaagaataaattggaagcattgtgctcccttaccacaaaatatttacatctgtattaggcaagaacaagggcaatctctcatttaaccatagtacattaatcaaaattaggaaattgttttgttttgtttgagagagagtctcactctgttgcccaggcagttagtgcagtggtgggatcatggctcactgcagccttgacctcccgggctcaagcaattctcccacttcagcctccttagtagctgggaccacatgcatatgctaccatgcctgactaatttttaaaaattttttgtagagatgaggtctccccatgttgcccaggttagtctcaaactcctaggctcaagcaatcctcctgctttggtctcccaaagtgctgggtttacaggtgtaagccactatgcccggcctaaagtttggaaatttaactttgatacaatattactatctaatccagaatccatattgaaattgtccattttccctagaatctacagaaagtagtttgagaattggtaagttatagtactgtgaaaaacaaccctatataactacagtttgatatttgtttacagttaattttaggtaaaatttacatatagtgaaatgcataaattttaggtgtataattcaatgaattctgtaaaatgcttatacccatgtaacccaagccctgtcaatatatagaacatttttatcactagcaagttccctcagtgccacttcttagtcagatatcactctacctacctttggttaaacacttttcttatttttttctgattagtttgcctcttctgaaacgtcatataaatagaattttttttttcttttgagacagagtcttgctctgtcatccagggtggagtgcagtggcacaatctcggctcactgcaaccttcacttcctgggttcaagcagttgtcctgcctcagcctctggagtagctgggattagaggtccccgacaccatgcctagctaatttttgtattttcagtagagacggggttttgccatgttggccaggctggtctcgaacccataacctcaggtgatccatcagcgtcggcctcagccttccaaagtgctgggattacaggtgtgagccattgtgcccagcccaaaacttcatataaatagaattatacactctcctttcttgtgtctggcttctttcagtcaacataatgtatgttaaggtttattcatattgttgtatgtatgaatactttattctttttattgttgactagtattccactttatgaacatacagttgtgcattatcctgttgatggacatttgaattgcttcttgtttagttctatttttgagtaaagttgttttgaacattcttgcacaaaaatttgaaggtgtttattttcatttttcttagataaggtaaatgcctaagaaagaaatttgctgtgccatcgagtaggtatatgtgaatctttaagaaactgccaaaccttttccctgaacagttgtaccatttaaaaatcacatcagcaatgtttgagagtacagcttgcactaaacacccctctcaacatttggtattgccaatcattttattttacacattctattatgtacctctttgtggttttaatttgcattttcctgatgactaataatgttgagcacttcttcatgtgcttattggccatttttctgtcttcctttgtgatgtcttttaaaatattttgcccatgtctttttatttttgagacggagtcttgctctgtcgcccaggctggagtgcagtggcatgattttggctcactgcaacctccacctcctggattcaagcaattctccttcctcagcctcacaagtagctaggattacaggcttgcatcaccatgcctggctaatttttgtaattttagtagagacgaggttttgccatgttggaggctggtctcaaactcctgacctcctgacctcaggtgatccgcccaccttggcctcccaaagtgctgggattacaggagtgagccaccatgcccggccccttgtcttaaattaaaacaaaaaaaaaaaaaaactttaattcgtggattctttcttctgccagcccagatctactgttgagcccctctatggcagtttccattttgtttcttgtccttgtcaactccagcggtcagtcagtgattggtcggaggttgtacctagctaagccttttaatttaagccagtgatgttttcaccttttactgttgaatctgtgtttctggttaggagactactttcatggttgagggagttgatgaatttgtactgtgttcagccaaggagtagaggctcagacgttccctctctatttacttctcagaaggcacagctttgggcatgagaacaatcttctagaacaccaggaagactatgctcttagcaggtctctgtttccttcattgatttcttcattgaatttttggctggtctgtctctattggtgtcacagcaagctgttagtctccactgattgctagctgctggctctgttgtttttgacagtgcccagagcataaattgctccatagtcttgatccaaataaagttgggcacctcggcaggggcaaggtattgcccgtctttgataatcctttccccatcctttcctggaaacaatctctgtgctatggagcaggagttggagagggtggtggtggtaatgggggcctgttcttcagtggctctcctatctgggtcctccctaaatagcagaagcttggggttggggagttaggagctgatactgtggctcactttgcatcttcctcagcacaaagccttttgagatgcaatctctggatgttcactagttgcaaacatacaaacctggaatagctctaggaaactgggagtagtgggaactaccactgagctgctgaacccattggaacaactcttctgcaacacagagctgtggggaatagaggactgcgtaggctgtcattagctgttatgctttgatcttccctaccgagtagcatttaggagtcagggaaagggtgccgctttcaggctgccttgaaggctctcgcatagcccttccacacacacagctgttgagagtggggcattcttcctactgtccttaccgaattccatagattaggcttgtcttaagcattttaatcaatctccagagactttgaatgattgtctttggtaattttgactagtttaatagatgtctctctagaaaagaagttttacctaactcctcacatcaccattcccaatacagttgacccttgaacacacaggtttgaactgtgcaggtctacttatttgtagattttttgtttttttgtttttttttttttttttgagacagaattttgctcttgttgcccaggttggagtgcagcggcacaatctcaactcaccgcaacctctacctcccagattcaagcaattctcctgcctcagcctcccgagtagctgagattacaggcatgtgccaccatgcccagctaattttgtatttttagtagagatggggtttctccatgttggtcaggctggtctcgaactcccaacctcaggtgatcctcctgcctcggcctcccaacatgctgggattacaggcgtgagccatgcactcggccaattttttcaataaatatattggaaaagtttttggagatttgtgacactttgaaaaaactcacagatgaactccgtagcctggaaataccaaaaaaattaagaaaaagtatgtcatgaaaacataaactatgtgtaggaaatgctgcaggataattaaggaatcagagagaccgaggggttgaggaggagttatttaattatttaggtgcaccaacccagttggattaacatccaaaggactgagccctgaacaaagagtcaagctaccttttaagcatttcgtggggcggggggagatctgtgcagggggaagcatattacagaagtgagaaacaaagacagttatttaattaagacgtgcattacattatttcttacttttcaaggaacaacatgttttacgacttgagattatctgtctagtgaccttgaagctgcacagctcgagagtcttcacaatgcctgggaaggggtgagataaggctcactagccacagagagaaaaacaggcagttaattttaaaggactccagctctttctcttcctcggggaattgggttttcttacatacaactgagtttttgcttataaagtctttaatttcttttaattcctgttccagtactagtctgttttataatttactaccataaaatatacacaaatctattataaaaagttaaaatttatcaaaaatgcatgcaaacacagactgcatggtgccatgattctagggattccaggaggcactgactcacaggtaggcttttctcctggtattgcgagccaggatggggtcgatgctggagtctagggcaatttgacttttggcatgatatcttctgggggatggcagttaggtgcttaaaatgaaatattttgggttaaaaattagtatccctggctggcgtgttggctcaagcctgtaatcccagcactctgggaggccagggcaggcggatcacctgaggtcaggagttcaaggccaacctggccaacatggtgaaaccccatctctactaaaaaatgtaaaaattatttgggtgtggtggtgtgtgcctgtagtcccagctacttggaaggctgagacaggagagtcacttgaacttgggaggtggatgttgcagtgagccaagattgcaccactgcactccagcctgggcagcagagcgagactgtctcaaaaaacaaaacaaaaaacaaaattagtctcccggagcagttcaagaaatggagattaataatcatttatatcttttccttaccagggtcatttgtatgtttgtatggtctgagataaatcgtattcttttttttttttttgtctctagctgcttcattcagttgctacctaggtaacatagttggaagctacttaaagcatgggatagaagactttataccttcatcagtgttttctttaatcaaattactttcctcctagtaacaggaactgctgctttgcagtttcacatcgtattctatagtaaatgctgctccctggattcaggcaacattgtgcctctgctagatctagctgtgataggtatagggaataggaattgtgatgtgacgtgttagattgaaggaaaggatccctatgcagttttgaaaaaatggcactctgaaagattagccctggataaagtgctgtatggggaatttgggcaatcagagagcacatgagtcctgaatgggatcaggggaagtggtatcgaagtaattaacagataaatctcaaaaacgtaatgttgagcaagagaaaacagacacatcaagtacatactatacgattcatttatacaaaggttaaaaatgggcaaaacccatctgtaggattagaagtcaggatatagttattcttgtggaagggaatgggtagttactcgaaggagggcataaaagggggctgttgagatgctggtgatactgtttgttgatctgggtacattggtatgttgtgtttgtgaatattatatgagctacacacttacgtcctgtgtaattttctgtatgcatattatacttcaatattacattaaaaaagaaaatgttcgtagtaggtcagttctgcatatatggagatcatgtctaattgcccataattgggaattggataaataagaactggttaaattgtgttatgttccccatactcctggggaataccatatcattgtttttttctttagacaaggtttcactctgttgcccaggccaaagtgcagtgatgcgatcacggctcactgtagcctcaacctcctgggcttgggccgggcacggtggcttatgcctgtaatcccagcactttgggaggccgagacgggcagatcacaaggtcaggagatcgagaccatcctggctaacatgtgaaaccccgtctctactaaaaatacaaaaaattagccgggcgcggtggcgggcgcctgtagtcccagctactcgggaggctgaggcaggagaatggtgtgaacccgggaggcggagcttgcagtgagccgagatcgcccactacactcgtctgggcgatagagcgagactccgtctcaaaaaaaaaaacaaacctcctgggctcaagcgatcttcccacctcagcctcctgagtagctgggactacaggcatgcatcaccatgcctggctaatttttgtattttttgtagagacaggatcttgctttgttgcctaggcttgtcttgacctcctgggctcaattgatccacttgccttggcctttgaaattgctgggattacaggtgtgagctaccacacctggccctatattgctgtttttgagagagaataattttatgtgtactgatatggagttgttattaaataaacaaattttcagattatatgttccatttatagaaaaatgaaacattatgtacatatgcttatatatacatagaaattacctggaaggacacacactaaataatgaacagtactttgccttgaggattggtttatgggtagtgtgactggggaacattgaacttttacatgatattcttttataccattacatttttttttctgtaagcatggattactcttataacaaaactaatttaaaaagtaaattacaaatactatttttaaaaggcaaatagattgggagaagtgatgttgctattcaggtaaaatctccaaagtgatatgaaaagaaaaaaaggaattgtgggagaaatagagcttcctaagagaagttaagaagagttaatatagttctaccttacttcaccccagaggatgaggcagattttaatgagtttctgaaagcaaagtgattgtaggcacttaatgcaaagtataactgaattgcctctccaattcttttagttgatccagagtaccagaaggaagcagaacagagacatcgagaattggcagctaaagctggaggatttaatgactttgcaactttagctgtcatctttgaacaatgcaaatcaaggtatgtaaggtagtcctttgtcctgaaaaatgtcaatttgatgtgtagttccaatacgtacttatgatgtggcttgtgacactaacgttcagtgaagatgatattgacttcaaggtattttgaatttcagtgaaattatctatgtcagatgactattgcttagtaggcatttattatataacattgattctcttgtttcctcctcaaacctttactgaaaatgaccttgtagaattttgcttctatataggtagcctagattaaaaaatgattggatatttgttattgcatatataagtaaagaaatccatttacaaattattttttaatttagtcaggggcacattcattaatttaaatgtttttttcaagtttcctaaaattcttttttagtacttggacaggtctcctgaaggaactgacagttgtttatgggtttccacttttgtaatagaaatgagaattttagattgtcttttacttagagaagatattttaaagataccagttttttgttttgcagtggagctccagcttcatggtgccaaaaacactggattcattggaggtgcttattttctgcatttcgtgtggaagctcaacttcgagaactaatcaggaagcttaaacaggtgattgccataatgttttttttcttgagtagcattttggacctatatatttcatattgaagtttcattgatgtacattagcaccctttctattctaccacccttccattctatttgtttctatgacctccttgaccccatgaaacattcctagtagtgataaaagaattgtcttcacagaaatgaagatatttaaaaattgctttcctgatatataattgacgtgtgataacctacacatatttaatgtatacactttgatgagttttgacatttgcgtaaaacaactatcaagataatggtacatatccatcatctcccagttttctcatcctcccccccacccttttttttttttgagatggagtctcactctgtcacccaggctgaagtgcagtggcgtgatctcggctcactgcaatctccacctcccaggtttaagcaattcttctgcctcagcctcccaagtagctgggattacaggcttgcgtcaccacacccggctaatttttgtagttttagtagagatggggttttgccgtgttggccaggctggtctcaaactcctgggctcaagtaatccacctgcctcggcctcccaaagtgttgggattacaggtgtgagcccccgtgctcagcctgttggtgttttgttttgtttgagacagggtctcactctgttgcccaggatgaagtgcagtgatgcaatatgggctcactgcaacctttgcctcctggattcaagtgattctcatgcctcagcctcctgagtagctgggaccacaggtgtgtgccaccatgcccggctaatttttgtatttttagtagagatgggcttttaccatgttgcccagaccactctcaaactcctgagctcaaccaatcctcccaccatggcctcccaaagtgttgggattacaggtgtgagtcaccgcacctggccacaaatagtgctttgtatccatgggttccacatctgtggtttctgcatctgtggattcagccaaccaaggactgaaaatatttaggggcaggccaggcatcgtggctcactttgggaggccgaggtgggcagatcacttgaggtcaggagttcgagaccagcctggccaatatggtgaaacccagtctctactaaaaatacaaaaactagctgggcatggtggcacacacctgtaatctcagctactcgggaggctgaggcaggacagtcacttgaaccygggaggcagaagttgtactgagctgagatcatgccactgcactccagccttgtgacagagtgagaatccacctcaaaaaaaaaaaaaaaaactgggggagtggataaaaggatggttgtgtctgaactaaacatgtatagactttttttccttattattccctaagtaataatagtataattactatttatataacaattgctttgtattaaatattttaagtaatctaagatgatttaaagcatatgggtatgcatagattatatgcaaatactgcatcattgtatataagggaccggagcatccatggattttggtgtccacatggggtcctggaaccaattccctagagatactaagggatgactgtatccactcccttctcggatgaggaaatggtgactgagcatttattattctcttaagtttgtacttgtgcgtatgtgggtgactatataggtgtccccattttcacagcaatatctgaagctgtaagattcataaagaagtagcagcttgcctgtaaagaaagcctacagaagtggggaaatcagtagaatatgaaagtttagggaagaaagattccaggaggtgggaacaacctatagcgtagaatgctgcaaaaatgtcaagcaggatgaggtttgaaaagtgtccattcattcgtttattccataaatatttattggccacttagtatatgccaagaactatattaggcattagatacagtaataaacaaagccaggccgggtgcagtggctcatgcctgtaatcctagcactttgggagacagagtcgggcagaacacctgacattaggagttgagaccagtctgaccaacayagcaaaaccccgtctctactaaaaatgcaaaacttagccaggagtggtggcacatgcctgtaatcccagctacttgggaagctgagtcaggaaaatcacttgaacccaggaggcagaggttgcagtgagccaaaatcacaccactgcactccagcctgggtcacaaagtaagactccgttgcaaaaatataaaaataaaaacaaagcacatgttgcccagtggcttccggaagttcctggtccacaacgtcaaggagctggaagtgctgctgatgtgcaacaaatcttactgtgccgagatcactcaccatgtttcctccaagaaccgcaaagccatcgtggaaagagctgcccaactggccatcaaagtcaccaaccccaatgccaggctgcgcagcaaagaaaatgagtagacagctcgtgtgcatgttttctgtttaaataaaagtaaaaactgccaaaaaaaaaaaaaaagaaaccctgtctctactaaaaatacaaaaattagctgggcatggtggtgggtgcctgtaataccagctactcaggaggctgaggcaggagaatcacttgaacccgggaggcggaggttgcaatgagccaagattgcgccgttgcactccaacctgggcgacaagagcgaaactccatctcaaaaaaacaaacaaacaaaaaagagagcaattgtccaatctgaagaacagagaaaaatagattaaaaagaaaatgaacagagagcctcaggaacatgtggggcaatattagatggtctaatgttcacataattggagttctagaaggagaggtgtatttgtttcctgtaaatgctgcaccaagtgatcacaaacttagtagctgaaaagaacagaaatttattctttctcagttctataggccagaagtctaaaatcaaagtgttggcagggctgcattgcctctggaggctgtaggggagagtccattccttgccttcttccagcttctggcagctgtcagcattccttggcttgtggccatatatctctctgctccatcttcacatggctttcttttctgtgtctctattgcctcttttgcctctctcttataaggacacttgggatggtattcaggacccacctgaaaaatccaaggtaaccgactcctctcaaaatccttaattacatcagcaaagaccctttttccaaataaaataatatttatgagtttcaggaattaaaacttgacatctttgggtgggtattattcagatactatgacagagagagatacctgcagaaaaaaatacattacaaggtatgtattgtacatacattgatttgagtgactgtggatttcttattagaaaccttgaggagtagaaacagtggaatatctttttttttttttaaattgagacggagtctcgttctgtcgcccaggctgaagtgcagtagcacgatatcagctcattgcatcctgggttcaagcaattctcccacctctgcctccagagtagctgggattacaggcgcatgctaccatgctcacctaattttcttatttttagtagagatggggtttcaccatgttggccaggcttgtctagaactcttgacctcaagtggtccacccacctcggcctcccaaaattctggggttacaggtgtgagccaccgtgcccggtgtggaatatctttaaattgctaaaacaaactgtctacccggaattagatatcaatgaaaatatccttcattaatgaagggaaaactaaagatattctcaaatgaagaaaaactaagataattcattggcagcagacctatactaatagaaaatatcaaaggtgccaggcacagtagctcatgtctgtaatcccagcactttggcactttgagaggccgaggtgggaggatcatatataaaattatatgcttggttgagtgtggtgactcatgcctgtaatcccagcactttgggagatcaaggtgggaggatcacttgagcacaggagttcaagaccagcctgggcaacatagtgacatcccatctgtacaaaaaattttagaactcagctgggtgtggcagcatgcacatgtagtcccggaaacttgggaggctgaggagggaggatcacttgagcttgggagttcaaggctgcagtgattcccagactgcaccactgcactccagcctgggtgatagagcaagactctgtctcaaaataaattaatcaaattaaatgatatgcttatattagaaagtaaataaaactaaaataaatgaaaccaaattgtattgaaaataccaataaaatagataaacttttagtgatactgaccaagaaaaaaacaaagatgacatagattaccaataccagcaatgaaagtgctaatgtcaatacagaacctacagatgttaaacggctaataagagaatattatgaataactttatgccaattccttcaagctcacttaagaagaaatatataacctgaataattctacagtgattaaagaaactgaaatttgtagtttacaacctttccataaaaaaaaaaaaaaaaaattctaggccagatggcctcactggcaaattctaccaaacatttaagtaagaaatgatatcaattcaacacaatctcttctacaaacaggaaacattttccagttcaggccagcattatcctgacatcaacaacagttaaagacattgtaagaaaaccagtatctcccataaacagagatgcaaaaatctcccacaaaatattagtaaaatgaacgcaatatataaaaagggtaatacactacaactccgtggagtttatccttgaactgcaaggctggcttaacatttaaaaatcaattgataggctgggcatagtggctcacgcctgtaatcccagcactttgggaggccaaggcgggtacattaccagaggtcagaagttcgagaccagcctggccaacatggtgaaaccctgtctctactaaaaatacaaaaattagccaggcatggtggcacacacctgtaatcccagctactcgggaggctgaggcaggagaattgcttgagcctgggagatggaggttgtggtgagctgagatcatgccactgcactccagcctggaggatagagcaagactctgtctcaaacaaacaaacaaacaaaaaaatcaattgataaatttctaaaaatataaaaattagccgggcatggtggtgcatgcctgtaatcccagctactcgggaggctgaggcatgagaattgcttgaacctaggaggcagaggttgcagtgagctaagatcgtaccactgcactccagcctgggcaacagagggagactctacatccaaaaaaaaaaaaaagacaaaagaaaatttcaccatatcaacaggctaaataagaaaaattgtatgattttttaataaaggcagaaaaagatttgtcaaaattcagtatccactcatgataaaaattcttagcagactaggagtagaagggaattaatttacttgacctgatagatgacacctacaaaaaaaactagaggccaagcacggtggctcacacttgtaattccagcactttgggaagccaaggcagcagatcacctgaactcaggagttcgagaccagcctggccaacatggtgaaaccccatctctactaaaaatacaaaattagccaggtgtggttgccgacacctgtaatcccagctactgggggggctgaggctggagaattgcttgaaactgggaggtggaaattgcagtgagccgagatcacaccaatgcacttctagcctgggcgacagagcaagactccagctcaaaaaaaagaaacaaacaggccaggcgtggtggctcacacctgtaatcccagcactttgggaggccaaggcaggtggatcacctgaggtcaggagttcgagaccagcctggccaacatggagaaaccccatctctattaaaaacacaaaaaaattagccgggcgtggtggcaggcgcctgtaatcccagctactcaggaggctgaggcaggagaatcgctagaaccctgggggcaaaggttgcagtgagctgagatgacacaactgcactccagcctgggcaacagagtgagactctgtctcaaaaaaaaaaaaaaaaaaaaaggaaaaaggaaacaaacaaatgagcaaaacttacaactgacatacttaatggtaaaaggctgaatgtattccccttaaaatcaggagcacggcacagatgtctactgtcaccattcctatttaatttattcataacatcacattggcagttacagttaatacaataaagcaagaaataaaaggcataggcatcagaaaggaagaagctgtttctatttgtagacaacactgtctacaaagaatctacaaaaaaaggctctgaaaatgcataaatgaggaatgggcaatgttattcaaagccacagcttttacttcaaattttctgtctccagatccttatatcaaatcgccaactggatatcttcacctgtgtgtttcccaggaactcctaagactcagtgtttccaagccaaatttactgatatctctccaaacttggtctttcaaaaaaattccctattcatctggtaatgccaccagtttacttattctaacatagcttcctaatattgatttatccatccatccatgctaaaaaatgaagatttgtcctagactatttctcttatctgccccatatgcttggtcagttaggctatcagttaatcttgttatgaaaccaactgccccacacctagaggcttaaaagaaaataatctataggccgggtgcgctggctcatgcctgtaatcccagcactttgggaggccaaggcgggcagatcacaagggcaggagttcgagaccagcctggccaacatggtgaaaccccgtctctactaaaatacaaaaattagccgggcatggtggcaggtgcctatagtcccagctacttgggagactgaggcaggagaatagcttgaacccaggaggcagaggttgcagtgagctgagatcatgccactgcgctccagcctgggtgacagagcgagactccatctcaaacaaaaagaaagaaaagaatctgtatttcctataattctatgtgtagactggctcactctaggatggcttcacacatatgtttggggcttcaacagagaatgctgagacaactgggaaggctggtagagctagggacactctcaaagtggtctcatcttctaggaggccagccttaatttaatcaaattgtggcaaagggttgccaacagtaagagtgtgaatcccaatggagaagaatttttcaagtctctattaacattacaattgctattgtcccaaggatcaaagcaaatcacttaaatcagtctgcgaggagactacccaagcatatggacattggtaggtgtgaaaaatttgtgtgggtagtagagggggtgacgagcttaactgcaacaatctaggacacttaaccctactgattctatttcataacctctccaatctcattcttcttcttgaatcccacttcactgacaagttcaagacctcatcttgttcctgaactacttataatagtctcctaatggagcttgcactgctactatcagcatatgaattttctgaaaaacacaaatccagtcacacaattctgttgcttaaaactcaatagcttccttttggccattagaataaactaagtgaggcccacaaactcattttctagctcatacttacctgacttatctcttactactctatccactctactcttccaaatacgaaaaacactctttaaaagaccatggtatttcaataccaccattttccatataatgtttctatctgcattgccctgttactgcttctgtcctggtaaatatcaacttattcttaagatttcatccaggaggctgaggcactagaatcacttgaacccaggaggcagaggttgcagtgagccaagattgcgccactgtactccaccctgggcaacagagcaaaactctatcaaaagaagaaagaaaaaaaaagatttcatcttaaatatcacaaatttaataaaagatttcttccctgacaaagttaaatgcttctaccttttgcttccattgcatctcacagaaccttcaattatagtgttttctccaaaatactgtaattatttgtttgcaggtctaaacatttccatcaccatgagatggcaacttttctttttcttttttttctgagatggagtcttgctctgttgcccaggatggagtgcagtggcatgatattggctcactgcaacctctgcctcaggttgaagcaattctcctgcctcagcctcctgagtaactgcattacaggcgcgtgccaccatacctcgataatttttgtatttttagtagagacggggttccaccatgttggccagcctggtcttg

SEQ ID NO: 94813 - DNA, 77020 bp, Homo sapiens
taaatcttgttaagcctctcctatgttctaggcatcctcttttttcaagatgataatatattataggagaataaagacttcaactataattctgtgagctgagtactatgccagtgctaaccaaagtgaattacgggaactaacagaatggacacagagtttagtgtacttgtgcttagaagataaaagacctcaaattattcttgttcattttagtttcacatatgtttcaaggttatcagttattctggctattagagaaacgggtgggaggaggaaggttttatgcgatcttaatttttaaaatattaagtaccagtacctattattttctaaatactttcaagggcattttcctagaatcaggtaaatgagagaaggcaagtgacctacttacagcaaaaattgctctaggttataaaggatgggaagccaagtgcatcctgaaaaccacagcatctggtcttgttttatgcctcatctatcaatctgttgttacaggaattgagaattaacatttcaactattgtttcttctattttaactaatgcatttgtatctttgttattcttactcaatctttcccacctcctccccatttaagaaaccataggcaggggcattatgaaggtcccaatttaatcctagggggatcactctttcatctacgccttaaaacttctgctaatgaggctacagtagggttagacatctgaagcaattctggttttgttcaatcctgatttttcacagatagtatcatttgaacagtactgtattaaagctaaataaaatattgtaggttgtaaatttccaagttctagaaaacattttttggtagaagtttttaaaaagtacacttggcaatgctgcttgagaaaaaggttacgtagaaatgcagattgtggattagtattaccctgataacacaagaaaattatatataacttctttttatatacactcatttaaaattatgtgtaaagtttaaaaacataaaaccatggaaagtagatttacagcaatatgttctttgaactttgctgttgtctttttttttttttagttctcttctttttacagaatggagttatcaattcatctttctacttcttccaatcttttgaaattttaaatttccattattttttccttgattctatcttattctttcttatttttattttttagtttagcttttttttcattttttaaaaaagtttatgggtacatagtaggtgtgtgtatctatggattacatgatatatgctgatacaggcatacaatgtgttataatcacatcagggtaaatgaggtatccattacctcaagcatttatcatttctttgttacagacattccaattatactcttttagttatttaaaaatgcacaataaattactgttgactgtagtcaccttgctgtgttgtcaaatactagatcttattttttctatctaactgtatttttgtacccattaccattctcacttccctcctaccccccaccactattcttcccagcctctgataaccatcattctaccctctatctccatgagttcaactgttttaatttttagctcccacaaatgagtgagaacatgcaaagtttgtctttctgtgcctggcttatttcactcaacataatgtcctacagttctgtccatgttgttgcaaatgacaggatctcatttttttaaatggctgaatagtactccattgtgttctatattatctttctattggagcttcaagtacagcttcaggtatagcttcatattcttgctttacttttctttctccatccattctacttaatttaccttgtcaaaataatggttcatatgattcagaagacatgatttaaaaaattaaaaaataatgattgaaattatccttttatgatatttttaaaagaacaaaggtaaccaagtgaattatactggcataattactgttatataattttacctatttgttgaagttctattctttctaaatcattgtcaagtgaattacttctaatgagcaatgaatagagtcaggtttactgtgtttacttattcaaagatttcagatttgtttttccttccaaaggcgttctatcctgaatctcatcatgaggcttccttgccttgatttcttgatgtattccagctgggttaatggttcagctgaccagataggccttttaggctaaggtagtagagatttttgcaaaaatacatctacagtcttcattcactagggcagaatttctcaaaatagagtccaaaactacctatatcccaatcagctcagatgtttgtttactgatttactgataggcttaaacaacagaaatttatttctcccagttctggagggtgggaaatccaatatactggcatatactctgtctggtgagggtatccttcctggcttgcagacagacaccttcctgcatcctcacatggcggagagcccagatgcttactgtaaaatgcagatttctaggccaaaacctacagtagttgaacgggagtctctgaagactgggagccaggaatctgcattttgccaagttgtccaagttaatctatatacagtgaaatttgagaacacctaatttttttttttgagatggaatctcactctgttgtccaggctggagtgcagtggcatgatcttggctcactgcaacctctgcctcctggattcaagtgattctcctgcctcagcctcccaagtaactgggattacaggtgcccgccaccacacccagctaatttttgtacttttttttagtagaaacaaggtttcaccatgttggccaggctggtcttgaactcctcacctcaggtgatccacctgcctcggcctcccaaagtgctgggattacaagcgtgagccactgcgcccagccaagaacacctaatttaaggaatcctttcttcccaccaggtgtctagtgcattaaccttgattgcagagcaaactagctacactccgtttaataacaaaagtggaaaattcagcaccttggaggagaactgccataactattttaagagttactgatacagaaaacacacacacacaaaacccaaaaactttctagaataaagtaataattctttttaatatcttgattctaacaaagagcaaaggcccagaaagtctacagtctgctctaatttcctgattaatattatatatattgaattatttattgagcccctactgtgggccaaatatggtattttgtgttgccagggattatataaagctatcctggaatgaaaagcatatgttcactctgctgtattctggaagaatctcattgatttgatgattgctgaaaatgaatgtacttgatgtcttaggcccagacatggaaggtttcttacggatttgctaaatgaaaatattaggtccaaaacatataggtgtaggcatttggtttccagtggctgaaccactggaaagggagtgaggtgtagcacttttcgagcttgtagactctttatggtcagcctcgtgactttattcaacagtttcccttcctgtgcaatcatccctcaaatattaggcagatgaattgagactagatgtaaccatactgggaactccatttcattgtaggattcatttaggatgtctctagtagagtgactcatgatttgcctgagactttgtcagccagttttatatcccagcaaaccttttagtctcatgcaaactgaaactgggtaggctggtcaccctggtccttagaagagggcaggtgaggctcttagttgaaccaatttcactcagtaaatgaatgaaaatccattactatcttgaatttctcagctcattttccttaccagtggatataattaccctattggggcacaaaacctgtttcttgcctttagtgaccctcccccttttagccctgccaaaccatgtgtccatgagcctcccaagcaatgattcagcttgggatcatccaaggacccagtggagagtctcttgaaagtctgctgagcactgatagcctctgttttttgttgttgttgttgttgtttgtttttaatgaacattgtcctcgtctcataatctttccgttcttctcaaaggtctatctctctaaatagtctagtaatcccaaacctagcttcacatccattttttttttaaattaggaatgtaggcatgcacgtatataaagccttaaatactaaacaggcacgggtgtattcaattccattctgattcctgtccatgaacttaaccatagttttcaacattcatgcatccctttcatcccatcctttaaagccttgtgattttggcatttcatggtcttactttcaactagattttaaagtttagctggtattaaattaccatctcaaagagaaaacgtaaagtacaaggtatgaattagacagacctatgttccaatgaaattgttgcctttatttcccaagtatatgaacttagaaaagtttctctaaggtttaagctttaaaatttgctcatttgtaaaaacggagaaaatgatagctattttagaggattttgggggagatatttaggttatgcatgtaaagcacatagaagcttattgccccaccccagcagacattaactaggtattatcttcaccacattattacaagtttgtaactagtaacattcgttaacaatcaggctgcaaaattgttattattattgagacaggggcttgctctgtcgcccaggctggagtggagtggcttgatcactgcagccgtgatctcccacgctcaagcgattctcccacctcagcctcccaagtagctgggactacagacatgcgccaccaaatccagctaatttttaggtggttttttttttttttttttttttttttttttttgtagagacgatttctcattatgttgtccaggctggtctcgaattcctgacctcaagtgatcctctcgcttcggcctcccaaagtgttgggattacaggcgtaagccaccgcgctggccaagctgcagaattctttagccatcaaagatgatgcctcaagtagaaaggcacaagctgccttcctgaggaacacagggagaactctcattacatcatagtctcaccgactctgtctgaaggaagtgatgcttctcgtatctcaggagtgtctaatgtcatctggcccaccggcagtttgtgtattcaggaggctctggctttcaggtttgctcccttgggacctcttgtgtcacgtcgctcgttctggaaaggaaaaggggtgaaagaaaaagggaaatcaccaaaatgcaaaatctgttaccagatgccctattccgtcctaactaccgagtctggtggcgtgggctgctaaatcttttcgcggaaagattgtcaggcgccaccccgaggtgtttgtcagcacagagatgggggagaagggtgagctcacccgagaattgaaaggcaggtggtgagggatgaggggtgaggagtggagggtggccataagcttctgcgttttggctaaagtacagacacaaagccgcggcgtgagggtttgcacagagtggtgggaaggagagaatgtatttgctgggtacgcagagcatttctgcactctcaagaaggctgcccgatttgtcaggtttgcgccccgagcccgcgagaagggcagggactttttgtgataagcgccttcccaaaggtagtgtctgttaaacgcagagccttagcgagtgctgctcgcagacacgccggcttcgcagaaagtctcagtctagcaggtagcttaagcagacatcaggtgcgcgaatttgctctccctcactgtttctaagcctgggagcacgccccctccgcgccggcgaccgcgggtcgcgcatgctccgtgggagggagtgcgccgcgcctcccgccggaagcgttctctcccaggttgcgtttccttcctgtgtgaggccggctgagggcacttgctcttgctgtttctgcccctgggtgagtagctggttcccgtggggcctcatgggatggttgtcgtatccttctgaggtcctttaaggaccgtctcggacctgggaacccccggaggaaaggtcaccccggtcttctcccacgccctacctcagtgccgcccccaagcgccccgcagcccttagtatctagaggattaacctccaagggcgtcccgggcctcgccttggcgtccggcccggcctgggcccttagggtctgcttagctcttccccaagactcgtgccattcccgagggaatctttgtcggcatcctggtcactgtgggggtttgaggtcgtcccggaagacttcagaaccaggcgaacctagacgaaggcggctggaatgaaccaggtctgattgtcgcacaggcgcggccaccaccttgtgcaaaatcgaaggtggttcttcagggccgggcacgctttcacaaaagatggtgatgttaataataacctgccctctttgtgaagattggcaggccttcattgtcataggctgtattcgtagggcctttatgcctgcaaaactgggacttttgagtttgagaaacgatttgtgaaatactgcaatgaattaggagagaaatactacagtgaatgctatgctatgaatgctatacatgtcaataaattgctcatagatgaggtagtacgatttcacggttttccactcggaaatggagaacttaaaatgaaacgacctgataccatatttgcctaacaaataactctaggttatagtgttttaggatgtttcttagttgcatacagcactatcatcgtatatgtacatatttgtgtattcattttgttgaacctaatgtttatacaggattgaaatacgctccctgctgttgtatgcgcatgcagcttttattgtatgttcgctggtgatggtattgctgctgtaacagccttacattttaggtatatcaataccaaatgaatgatacatgagtgtacaataaagtatatatagttacagtctacaaaacaagtttcagtttcattgaaggattttgaagtaatttaaaaaggtagactactattttacaagtggccttagtagacctaagtctttattacattaaaaatttcagaattgggaaggatataaacgggttttgtgtgttgaccttttatgggattaaaagttgttactatcttsatgactgggatgtgttcataacagccctaatttgttcatgtagttcaatgaatatccagtagatgacttggttggtagttttatcactaccaactctaaaacgaaaacgttttactggaatgccaccgcttttcacagattaggttaataaaacccttatcttgtctaaattattttcctctgtgagtataccccacgtagtgatataacacgtttcaactgcattttcaactttgtggaataaagactagaaaagtcagttttttacttcctatgagaagtgaaatattgtgtaacccgttttttttggaatccatgctgatggaagatagcacactttggtttgttccatgaagagagatttcagttaggtgccttctcctttttggcttcttttgctttctttataattaatataatagccggacagtgtgttctttgaatgaagtggtgatatcttaacaattattgtatatccaatatatagtgggcgtcatatatagatgttcagtaaatgcaaattgaatgaattaaatcatttaccatccctaggccaaagtttcttcctccaaaatgaaggctttcaattatttagttgttaagtttaaattaaatctaattattgtgaagtgaatggctcctagtggagaaatgtggaaccttttggaaatccttcagaagtgactgttgcaatgattgaatgggagatttccttcagttacaatttatctgttgaacataatttttgaatagcctctgttttgtgtgtggcaattataaacgtctgttttgtgtgtgacagttataaaggtagataagatatacatcttgtttataaggatttaaactctagtcgagtagatatctcaaaagcaagacttttttaagatagtgtaatagggcgaaatgaataatacgaagattcatgtgatttgaaaggctttatggagcaaataaagttgatttttgaagttaggatagaatttgactaatcctaggtgaatgagggtaaatggcccatgcaggatactagacagatacgctgaagggaaaatatatgtgggattttcagatggtagtgactccagctatttatagagtccctttgaaaagaggtgaaagagaaaatgcttacaattgactctggagctagattctagattagaatagttttgaatgcttgggaaacgtataaaggaaatactttggggtcttttgattagagagaaggagtatatatccttgagtggaggtgaggggtataaaaggaaataaaaaatttttggagctattctagagggaggaaggtgaagaggctctttaatttagtagtagtgagaggagaattttagagctggaaggaccatggatattaatctttgcagtacctaacttttatctgctgagccatacaaattctgttttttttcatgtttatgtaagtacaaatatatattctctttttcttatatatcccatagcattcagcacactcctgtgctgagagtataatggcagtatttgaagctaagatcctatctcccaaaatgtgatagtcatatcatccctaacaagcttattcttccgggtagttattgccattgacagaggagtgtatgtcttctgtaagcctagctttgattgatgtagctgttcagggatatatgcaaaaataggcacatttatctcattttttttctctttagcttgggtgagtgctgtattcttgtagtagttgtctcagttcaagatttttccaagttctattgcttcctacttagcccggttgttgggaacaatagtgtggctcaaaaaagttaataccacttattactgaggaaatggcatgtttaaatttaagcaggccttgaaaacctttaaaagtatgtatgaggaaaaagtgagtcagttcacaatttgaatttcactcaaaaattacctggtatatgatacagttaatagaagaaattcttaccgtcacattagtattgttgggctgcctttcttcagttggattagtgttatagttgatactttcctagactctgaaatagttctttaaagctgttttgagtaaataccttaagatatttactgtatttttcaaataaaatgattaattctactaccaaataaatcttaatttctagtctacttctagtttgcaagaggagctttaaawgtatttgtttacttaacatttaaaaatccatttctccttaaaatgaaacactttttttaaggtaggtaatattttaatttgactagaagttagtttttctttcttagtttaagctactttgttagtcttacaattttaataagtatagttattacctagtgacatttctgtttgtttttttaaggttaacattcaagatggtacatgctgaagccttttctcgtcctttgagtcggaatgaagttgttggtttaattttccgtttgacaatatttggtgcagtgacatactttactatcaaatggatggtagatgcaattgatccaaccagaaagcaaaaagtagaagctcagaaacaggtatgattgaaatgtttgaagatcatttttcttgtggctaacaagtattttcccctcaaactaaaaatttggtagagttcacaaattaatgagaaattctataagacccacatgaaaatgtattggtactcatagttttattactcttacaaagtactagtttattatgacattatttcaagtcattttttactatataaacaacttatcagaagaaaaatgaataaacaataaaatattgtgaacatcttcattagaatatttttgtcagctttggaggtaggatctagataaaagtttttaggctaacccaaaatatttatcttcagtaatgatatgccttttgctgtgtatgacatctgaaatgtggataatactgaaacgctctcagtcttaaacttataagctacactaaaatctaattaatgaattgctgtaaaagttgttgattattaatataagctgtagtttttaactttttatctgctgcctcttgtgttcatttccttttaaaggtgattggtttctgtttgtcatcaaaacataaaaaccttaaaggagtcttacagattttttgtgctgttaggtggcttttcccttctggctctttttttttaaacaataattaataactaaaatatttatgtcttattgaatatcttatggtataataacataatttatcttaaaataattaaataggatattcatggatttttagatctgtcttgtgagttgtgacagatttattcaataaacatttattgagtccctatcaactacttggtaccaaagaaaaaagatgaataaatcttgttctttcaaaatgctataggctattgtgggaaatagggatgtaaataaatgactgttttacaatgttagcccttaaatcagtaaaaagtgaaaaccacaattttataaacactgcaataagtatatatctgaaaggcactttggagaattctgaactttttccttgaattttattataaaatagttgactgaagttctagatgatattatcagcctatttgtaagtctctgggaagtctgaccagggtagatttaaaaaaaaaaaaaaagaaaaactagtttgagtatatccatatgtcaacctaagtgttgggtttttttctcccacctgaatcatgaaagtcagtttaagtatgatgtcaaaatattataagttacatcgtttcagcattttaaaaagcagaggtgtgacttttaaagataattttgtctttttttccccttggcttctaagaactcctgaatacacatatagaagacatacagaaagctaaatatagatgctaagtactacaagccttcattgaaaattatgtgtatagtattattctaaatattaggtatatgaaacattagatattatgtccttcatagtgcccatgatagggagaaaagacttgttcatgataatataaattataatagtaagtagcatatcccagttgcttattgagtagtgtagacagaaactgtggctcttagagaaaatagtagtcaccagtgattgtggtagttgaagatggcttcatgaaagagcttggcctctagggtaggcaaggacagttttaaatagaatgcattactttttccttctttggtcctttttgttttgttgggtggactgaggctgataaaaaatacacagcattttagaatccatcatcaactgaaaaggagggatactttttgcttctagcattatcccattccacagtaatttaccagtgtttaaaacactcaggatgaaatgggatttgcttggccaacggctatagcttcttggttacccctcctcttctcttccctacatctctgacsagctgttaaacatgctgttgactggccatgtggtggctcacgcctataatcccagcactttgggaggccgagacaggcagatcacttgaggtcaggagttggagatcagcctggccaacatggtgaaaccccatctctaataaaaatacaaaacattagccggacgtagtggtgcacacccagctactcgggaggttgagaattgcttgaacccgggaggcagaggttgcagtgagccaagatcacacccctgcactccagcctgggcaacagagagagactccatctcaaaaataaataaataaataaatatgctgttgaccaattgaagacttctgtaggcttaactcattaaatatatttgaatgggtgggtgatatacaatgttttaaggataattcaccttatagtagtatgcagaaggaataggagtcaagaggtactagaagcaagatctgttggtgatagactgcaacagtcctggcaaagacttagaataagagggtgacaaaaggaatgacttgagtgaaatagactaacacaaatgaatgcaggaaggactttgtgatgatgtgggaaaagaaaaaggacatcttaaaatcttaaaaacgaaccaaagatttgtctggatacstcaaagacttataatatcttttatagaggtttggaaactggtaggtagggcaaatttatgagaagatgacatttgatctggccatgttgggtttgtgttggtggtaggaattcaggaggaaatgttcatatagcaattgaagttgcaggtctgaatctcagaaaaaaggtcaatccagaggtatatttccttatcgatggttataagtagttgaagtcgttagaacagtgagtaggccatatggttattcctgtatgtgtagatatcatttgtagaacttttcccaaattattccccatctcccctcaccaccatcaagatttatacatatatttgttgagaaattctaatgtaattgtcactgtaataaatggtaatgactatactaagagtgatgaagtctccaaaagagrtggtgtaatgcagcataattggtaagctgaagcgtaagccttgatacatttcctttatttagggtatagaaagatgatgtgcagccagtgaagaatgaataggtcagtatgggtaacaagactgactcctgctgaaaacagctaaagaagcttgataattttttaaaaatcttgttttatttatttatttatttatttatttatttatttatttatttttgagttggagtcttgctgtgttgcacaggctggagtgcagtggtacaatctcagctcgctgtaccctgcttcttccgggttcaagtgattctcctgcctcagcctccggagtagctgggattacagaagtgtgcaaccacatgtggctaatttttgtatttttagtagagacggggtttcaccatgttgaccaggctggtcttgaactcctgacctcaagtgatctgcccgctttggcctcccaaagtgctgagattacaggtgtgggccactgtgtctggcctaaaaatcttaaaggcattcatgagctatcaacaaagtaaagaatgcaggttaaaaacttaaggcaaaaatttcagaaagctaaggtgagcttgattgccagcctttaccttgagagaatttgctgaattctgtttttatgatttcagaggggctcagtatacaaaacatagggccaatctaaagtaggtagtttcatagatgatactcctataaatctagaaccccaaaaggctatctgtagtatttcaactaaagataaagacacagtgttttaaagatgaatagtttaaagagagaaatttaagccatatgctgggtgaagtaacacatctaaaatatagattcagaaaggttgaaagtaaaaagatggaaatgtatataccacacaaatataagaagaaaactggctgggcaaaaagaaattgtaaggcaaagatattggagaaaatgtttgctacataaatgatgaaagattcaattcaccaataaatataacatttctatttgtgtgtaactattgatgtagcctgaaaatacataaagcaaaaatatgatakaactacagggaaaaatggacatctccatcaacatggtgagagacttttaacacctaataattgttcagattttttaaaaattaaggatatagaagatttaaataaaaaatggacatgtatagtatattgtgccaaaataaatgcaaaatacatatctgaagcacatatgatttgtgaaaataaaccgaatactagataataaagcaaatctcaagtttcataatattggtagcgtatttattaacatttcctggctatagtgcagtacagtagagatcattagaaaaataagtttggaaagtatgaaatattttaaaatgactcctgggtaaaagaaagcacataataatgaaatgaatggaaataataacataagttaatgaaatagaaagtgaatatacagtagagaaaaatcaataaaacccaaaattgtttttttgaaaagacataaaatcaagacttttcaaaccgacaagaaaaaagttaccaataaaatactacctggaacaaaaaaggcctaatattgctgtagatattaaaaacaagggccgggcacggtggcttacacctgtaatcctagcactttgagagtctgaggcaggtagatcacctgaggtcaggagtttgagaccagcctggccaacattgtgaaaccctgtctctactaaaaatacaaaattagccgggcgtggtggcaygttcctgtagtcgcagatactcaggaggagaatcgcttgaatccaggaggcgggggttacaatgagccgagattgcgccattgcactccagcctgggcaacaagagagaaactccatctcaaaataaataaataaataaaattaataaataaaaaaaattaggactgttcataactatagtgggcccttgaacaacaaacaacgtgtttaaactgcataggtccactcataagcagattttttttttttaatgaaagttcaattgagtgtgcccgtctctcctgccactccttccaccttcacctcttttacctctgccaacctgagacagaaagaccaacctctcttcctcacgctactcaacatgaagatgatgaggatgaagttaatatatttccctttatgattttttaaataacatgctttctctaggttactttattgcaagaatacagtatacaaactatgttattaactgtttctgttagtgataaggtcaacagtaggctattttagtagttcagtttgaggggagtcaaaagttctctatggatttttgagtgtgttggggtcagtatcccaatccctgtattgtgtaagggtcaactgttacgtcgataaatttgagaacttaggtatgggtaaacccttagaaaaatatgcatttctaaaactgacttaagaagaaatagaatacatggttagttccataactatgaaataagttaatagtgaaaatatctttttataaagaaaacttcaggcccatagaactttatagcaaattctgccagtatttaaggaacaaattaataataaccaatttatgcaaattcttctagaatataggaaacgagggaacacttccaaacctttttgtgaggctagcataactacagttctaaaacctatagtagtctgtaatttctctctctcccttctaaattggtataagaatcttaaatgtcagcaagttaaattcagcaatatagaaaaaatataatgcgaccagttggatttatcccaggagtttaagcctggcttcatttaagggatgggaaatcaatataatatgcaacattaacagattaaagaataaaacctgtatgattctcccaataaatgcagaaaaggccttaagcattcattcatggttttagaaaagcttttaataaaatgggaacagaagatagtgttctttttgttttgttttgttttttgtgttttcttttagacggagccttgctctgttgcccaggctggagtgcagtggcatgattttggctcactgcaacctctgcctcccggcttcaggcgatctttaacttgataaaatgcatttactaaaacaaatgtattttatagtgaagaattggaaacattctctttatgattaggagcaagcctgttgtctttcattacttttcattactttttttttttttttggcttttctttgtttactttgtttacttctttgtttacttttacttctgtttaacattttactgagttactagccactgcctaagtcaaaaaggtggggattggaaaagaagaaactaaatagtcattattaatggataatatgataatctacatagaaagccaaagaatgtttacaagctatcaggattcatgagagtttgatgggtttgctggatttaaaatcagtatacgaaaatcagctgtttctgtatacccatcatgttttaaaatgtcatttaaaaaaagcattatatagtagcatcaaaaatataaaacaacggacaaacataagacatacaacacattcatagagaaaattataaaactattgaaagtttagttaaattcaacatcagtacaaaaatactggcagattttcgttttgttgtattttttcctgaaattcatgtggaagaacaaaagtctataaatagggaaggcaatcctaaaacacaaagttttatttaactactttgggtcttgagttttcttatctgtaaaagaaataataatagcacttaccttgttgggttgctattgaaattaaatatataatgtaaaatataacagtgctgcataagtgtttcctattatttttataacttaaaagatttgtactgaggacatatatagaatgcatctgaatcagtaagaaaaaataatagaaaaatgggcaaagaaacttaaatagacacattaaaaaagaaaaatctccagtggtcaataaacatatgaaaagatgcacaaactgattagaaatcaaggaaatgcaaattaaagtcaaattgatataccttttcacccctgccaggttgtaaagttttaagtctgtcaataacgtgctggagagaatgtggaacagtaggaacaaaagtattgctgttgggaatataaattagtataactattttggaagatagtttggcattatctagtaaagttgaaaatgtgcatagtcagtgatccacaagtttcattctgggcatatagcgaagaaccaggagatacatacaagagtgctcatagcagccctgcttgtaatggaaaaaagcaggaaccaatctgaatatttgtataaatgttggtatatgcacatataggagaggaaaaacacttttccttctaccgttctgaattctcatttgggcctctataacaaaagatagataaacaagagaaaaacaaacaagtttattaacatgtatcaagcatgcaaccaataggagtaccagagatgagtaactcaaaagtttggttagaacttgagtgtatatagtatcttggcaaagaaacaaatttttaaagaagcgatcagacaaaagaaaaggagtctctaggggcagcaaactgtgggaaactaatggtagatgaagactagttggtaaagtttgttatgcagattcctctggctaagtgtctaaagttgtctcctttgattaactttcgtccttcctcgtaaagagaagaggagggagacctttgtgaatttattgtttttaggcaagtaggagtagggcagatagcttttcttgtatctgtttttttctaaatttccctcaactcaaaataattcttatgccagagtggcatactttggtctgcacatgccagagcataatattcgcggagaaaagtgaatgaaatacagatgctcaacaactctaagaaatagtgagatgaaaatgtcacagaagagtacatatagtgtgatcccatgtagacattctgaaacatgtaaaactaaaccttagggaatcaaacatatggttaagttaaagaaaagcaagagatgatttcaatttaggattgtgatttttttttctgggagacgagaagatctgtatttggagagggcctcaccgaaggacttgaaagataataataatgttcttgttcttaaacctggattggtattgattatattgtgtttctttatacctcatctaaacagtctaagatattattttatctacctagttattagtaaaagcactgtaagaacttaaaaaaaaaaatgaccagaggagtgagaataaaaccaagatgatgtttagggtactggtgatagtcttttctacatgaatacatctgaagtayacagagtactgcagacagtcatagtggttcactgtggcagtgattgtcaactgaaacactatgttctgcaaagaaataatcagaatttggggaagtttgtggggtggcaaatataattttttaaaacctcagagattatttggttatccctcttctcacttctttcccactgtctggggaatcacttgcataaagtcaccatagccaaagaaggagaaggttgcaaaagagaattgattttaaacgtgttatrgaatggtcaaggagaagaagaggtcatgaggaatatgatctaagaaagtgatcagtaaatttagtgaaattaagcttggagagagtaatttccatttggtggaggcagcaagtataatttgaggtaaaagaacatggtcattctagagttgggggaaaagaaaaaaaaaagggagaaggttagtggaggaggaggaggtagagaggggctgcctaaaaggatatttaatagatggaggaaggtcccagaagaatcaggaggggttggggtcagtagttatgggaacatttttagggtagagttgttttatgtttagtagcatgaaggggagagattgtgactaaaagtgagtgagtggaggaggttgggggcctatttaggtaaatatgtgatcagtatttaatgagattaaatcattgtggattttgaaatattagggcatgtttgaagaaagcatgcatttattgggaactcaattgttttgttactattctcaagcattactcagcaacttggtggcagatagagtgaatggtagtgttaaattggcattggggatggagctgactggtataacaagaagtgyaaggatttctcaggagcacatcattraagtaatgactgtgtgattcaggccatttagaaagttaagtattaccagatgggagataatttagttggagaatagaaaagaattaaggaattagaatacacattaaaggcaaggatcaggtgtgaatgtgggaggaggaaggtgtgacttttgtggtcagaatgaaagaggattgaatctaaaagcttagatgtagaacactttgagtataccagataatcagtgggccccatgtgattttaaaggcaatacggttttgagatgagaggtagaagatgacatagttgcatcaaatcagaaacagtatcctggaagtataccgttatgttggattaaacaatgtatttgtaaatttctagacttgaagccaggaaaaccttcagtttgtgaaaggcaggagatttaattggtaatgagagaggagatggtttcaacatggtgttgtacagggactgggatttttctgggcacatactgctgcttggatcatatttagatgtagtagaagagttttgataagctatgtttttgatgaaagggtgggttaagttagttgagatgtgtagtttaatagatttaaagtgcaggatgaatatgtgttaactgtcttgggaatttataaatacagtattttgtttagcatattaattagactacataggctgggcatggtggctcatacctgtaatcccagcactttgggaagctgaggcaggtggatcacctgaggtcaggaggtcaagaccagcctggtcaacatggcaaaaccccgtctctactaaaaatacaaaaattaggtggacatggtaatgggtgcctgtagtcccatctacttgggaggctaaggcaggagaatcgcttgaaccctagtggcgaaggttgcagtgagccgagatctcaccattgcattccagcctgggtgacagagtaagaccctgtctcaaaataataataattagactatataattttcttgaaattgtggtttagtagtcatcaagggccaggaaagatttcatacacgagttatacacagaaagtgacttactatgacattaattatttaacttaacgtcttcctattgttagtcctatcattacactgtagacttgaaaactatttctgttattttgagagaagtaagagctgaagttttctgtgaaggagtgtactgaaaaaaactttaaaaacttggaactctcaactgccaggaattttaagagcagctatcacagaatgccaacttggaagagctaacatttgttaaccccagaaagctgttgtgaactccattgccagtcaagtggcttttaaacccaaggtttactggagctgagtcttataagactgagaagctgaagtaaataaaattgagataggagtcagtaaggaacaagcagttagtrttgcctaggtaggtaagggagtagatacaagtgatgaggaaagaaaagcaataggagctgggaatcagaggagaaaaaactctgcagtattgttttctacacaagcatagtagaagagcaccatagtactgcgaaccgcaaatatctgagacaggtctcagttaatttacaaagtttattttgccaaggttgagaacatgcacccatgacacagcctcaggaggtcctgatgacatgtgcccagggtgttcagagcagtttggttttatacattttagggatacatgagacgtcagtcagcatatgtaaaatgaacattggttcggtccagctggaagcaaaggtgaggcaacctgaagcagggaggagacttccaggtcataagtagataagagaccaatggttgcattcttttgagtttctgattagcctctccaaaagaggcaagcagatacgcgtttatctcagcagaggggtgactttgaatagaatggaaggcagatttgccctaagcaattcccagcttgacttttccctttagtgatttggggtctccaagatttattttcctttcatatttcctccctttttaaaaatcttttggagaaagcatatttagaagaaaatgagtctctggtctcaagtttcgtctgatctctcatggctaggatggtttattccttgacggataggtcctgagttattaggaaagctcaattttagctggttgtgaagtctcatgtcttgtgaagagaaaacggggaggaagggagaaaaacaacaaaaaacaaaaaacaaatcctggaaaatttatataggccacattacctgaagtccatatgtcagtaggcaggtattaaagtggcttatgtatgtaactaagttgctgttcttttcttctgaagtttaagtgtctagcttcagttcttagggcattaagaaagcacagcttagttttcagtgactccaaattaggaaaaatgggggaaaaaagaagggaaataaattgaaaacattattttgaagacttgtagccaagaaaagtttgaattctgtctaaactatagaaaataataaaaattgaaaaatattaggcaggactagaatctaacaayaggtatactatagtttttgaaacataatttctctgtctccagtttctcattttcactaaagacaaattatggtaggactgatttgctttcttctaattggccagattgtttgtatatagtgcagcaagaataattattttgttacataggctttttttttttttcgtgacatagtcttgctctgtcacccaggctggagtgcggtggcgggatctcgggggtgatctgcctgccctggcctcccaaagtgctgggattacaggcatgagccactgcgccctgcctacataggcttttaaattggctttgatagaactttgttccatagaaataatctcaggtaagacttttttaaagccaagcccagccatggatttgtaccatcaaatacctgtgaattgggtgaattcctctcctcttgattccaagataaacttggggctcctgggcctgtcagaaagtgacattctttacttaacaacaggtcagaaaccctgtacagggactgtgtagataaggtgtgaagccagttttcccaaggggctttcattggctctgtaagtcaagtttgattccttaaaggaaagcacaccattccagtcaaagccttggtaaaataactagtttctccaattgtgtcctgttacaaatgaaaacagattcttattgcacttacgcaaataactgtattgccataagttaagaatactcacaaatagtttccaaattctagagaaatcaggtagagagaaacaaatatgctccaaattttgttcataggagtctactgaattgttagaagctgtcaatagtgcaaaagaaaagtttctttgaaaaaaacaaaacaaaggatcagcaacattttaagcaaaaagtcaaaaagataacttcagtcttctgttaattcagtccatgcagttaattcctgttctgtttgatattcatggatgttccagctctctgtgagtcctgaaagtttttcttctattttgatgtcacaatctccaatcagaaacattcattcaagagcacctgttagagttttatagctgattataaaaccaccttctaaagaggaccaaaagaaggtaacaattgtccatggatgacaaaagttttagggtagccatagtcaaagacatagttgacaagggaatttattayctctgtggcacacaataattataattattattgataatgtacattaagtcatatcagaattataggagtttctcataattttaggacacatactaataacatctctacaaatacagaccaagaaaaccaaataccatttcttatatgacaatgtttcctgtgtaattttttttactaaataagccaaattatgtcattttttgaactttatagggaacytaatgtcttaaagaattaattaggtcaaaaaaaagacataatttatcatttgattttggaaagtttgycaaatatcaaaggtttaaaaaacttcatactacaggtcattgtaaaataagtcattcatttcaccaaagtgataactcagaaaaaggtgaaaaccttcattctttgagagaggagacttaattctccaaacgataaggcctaataaaaacagcatgaarccaattcaatttatttttaaaagtttataaacagtctccaaaattttaatcttgrccataagatataacttccttaagcctttcacagcatttataacctttattaaggagtcagttaatgcttcaacaaaaccttgttaatctgacacaggggcccatatgttggttttgcattagtgtgcctttgatatgaatgattaatttatagagaagctgaacttattttctctctcaaaattgggccttccaatttcacatgcccgcctcttctatgatagtccctgggccttgaggagttgaatacctttaatttctggccttgtgttttagaaacgcagtttattttgattggcattttctacggagcctgaagatgaggctttaattgctgtcagtgtttatgatttagtaggacttggtgtcctttttagacccagaagtcaaagccatgtaactcaatggcacaggtactttgaacatatagaaagatacatgaatgttaataaccttaattaaaaatttttttttttaatttcagcttttttccccaagcaaaccaaactgaatcataatrgcatagaattgtttcaataaaccataaaatatgttagaccagttactaaaaggcaacagaaaagacctgcactgccagaatattatgttggaagaaaacatttcctttggatattcatgaaaacattgttagcatcaggccataacaaacagaactygaggaaaaaaacttaatatgagctgaaaatgagttgaaagagagtgttacaatttcacaccctttaaaaggagagagaaaactaaaaacagtgagatgcaataaaagttgaagtttgggttagaaaaaaattaaaatctcttataatttattaaacgtgaatcaataacttaagaaaatgtcattgttttaaccagtgatttagtgtgtgtgtatatatatatagacataattttttttacatcaagtccaatcatctctagaaagaccattttaatttccctttaattatataaaagtttctttgttctttttttttttaaataaatcctcttattgtgtcttagaccattcatgacatgcttggactctgtggtttgtcctgaccatcctctttcttaagcagtcattttattgtaggactaaatttaccatataagagtctttctcattatttctttttaagctttcttaccaaaacaaccctctttatttttacaactttctttacatgtctcttacttcctggttccttttaccttcttttatacatgacctaaataagcattgaattagacaaaaattgttcacctttttaaaaaggacacacttttwaaaaaaaaatatttttctacaatatattttattgaaatatttattattttagtataactttagattctaaattatgatgagtttgtctacaattatcccattgcatttacctaattactttaattgtttacctagactatttatgaaaactgtaatggtcatcatttaaagttacagaaccaccattgcaaaatcataactgagacagtgaaaaagatctgacctaactcaccccatcttgcttctaacctccaagctgtcctcattcattcctgggcataggctgaactaacttcgggaggaacttggtttatagtttagctttgaaacaaaggcaataacagccttttcccaaaacaaaccttactgactatggtctagactgcctaaagccacaagattagaagttatgataatcttactaacttcaagatgtagctattttcattaaaccaatatcaatgtcttatttattaacaattacgcaagcaaagatcattctgtttggggctggatttatggtttttaatccctatgccaaattttgacaccttaatagtattttgcagggataagtatgaaattgcttgattaataaatgcaaacaaaaatatattttggcaattcttaagatatttctaatattattttgccagtaattttaaagctagcttatttattaaagattttattaaattatgtaaacttgaaaaagcatttgacgagtcttctcttttttcctgatgaagtatttgattccaagcacttttattttcttaagccaattagttagagctcttttatatattttcagtagtgaaacattgtgtacacaacacataaatacatagacatattaggcatgctgatagaagtacatattatagattcataaaaattttattttcctaccatagacttcaaattcttaataacctttttcactaccctaggcagttgtcagctaaatagcctttaatttgcatgttaaaggaaacaactcaggtgaaaatcagatagccaaatttacaccataaagtatggaaagaaaacgtctagtgtgctaagagggaaattaaaatggatttaattgccaattaaacataaagctatggaaattataaaggcattttaaatacacacacacacacacacacacacacacacacacacacacacacacacacacacacacaccccctatagcttttactttggaactttagccatgagataaatacaaattcactggcttgcaaaaaaaaaacacaaaaaacctgttagatccaaacagtggtttttatcttagtagaaaaataacagcagattcaaagcagccagaaatgaaagacacagaaagagaacgtagcaactctgtagtttgtaggtcgaccttagggttctttttctttaatgtaaatgtgcacaaagaccatgttacttccgttttacataaactctggcaagtagtggtgccataaaacctacggagtgcttgaaaggggatcattctcctcattcttagaacgtttcccactttttcttaaaaggaggaactgagctgtggcctagggtttttatgtgtggatggatgtgtgctgcttgtgggcaggactccacagtgtgtcaccactgagttgtttctgccctcttacatgtcttggtttctctctccagaggtccatgacctctgagagggctcaaaacatgggatgatcaggacttatgtgtgtttcctggacaagcctttttaaaaattaatttttgttggggattttcttgtaaggccactgcacgtcgagggaggttaaccccctgtacactcccattaggcccccggtcacccaggggcaccttttggctggggggagcaaaacaccctttctctttggagctgagaaaactcaatctgtcatttacctgcaaaaacaacagttcagttcctcacacaaatgtgcgcagaaaagccaaacagagattaattttggtagaaaaggcgatagagaagaccctttagaatgcatctctgaagtagaatcaggatccttaacaacttcgtaggagaaaaaacagccaagaccacttcctgtaaactgtgctcagccacccctaacttgtagctctcattcaccattacacacaccaaggtcaaatcctctcgtggtacaagataatctctggtacccccaagccaaacaagtcaggtcatggaataatatggaaacagaggtttagacttaagaagactctgcccatgactcttgaaactccacaaggaaaacagaacactctaaaaggggtgagtggtgtctttgttctgaattcttttaatgggttcaagtcattagaaaccttctctagattttttggtactacagatggcaaagggggaaggaggtatagggtggaagaaaagtaaatgaaagaacatttgtttttttaagacagtaagcaaacacagaaaccaagcgcatggatttttgtttttgttttttttttctttcctcttttgcagctgcgaggaattttagccaaattagagaggttttgttacccataatttggaattctcagatttgaccaagtcaagtagagtttgtcaaatctgatgggagaaagaccagaacaaacaaacaacaaaaaacccaacaatatgatcactgactgygctaatggtaaggagaaattaagaccagctagttgttaaactttagccaagacaaaaccccaattcagctacttacccagggataggtctcaggctgaagactgctctctacatcctagaagcaggaaaaaagtcaaactcatcttccctgctaggagtgagctcaaactctgtaaaggagttaccttctgtccatcgctatgtaagcaggaaatcttgctttccttgttggaagcaagtgaaactccaaaaaaagggagttgtattgcaaaataaactttaggtctccaccaaattttgggagatcaggtgttatctggaggggatactcacagacatcagcaaatagtactatcggtttgagccataaagttagctcatgctggtgtcaagctccgataggatatttgtcaaaggtcagggtcacctccactcagaatcccttcatggtcaccaaaatgtgaaccccacatatctgagacaggtctcagttaatttagaaagtttattttgccaaggttgagtacacgggaccatgacacagctgcaggaggtcytgagacatgtgcccaaagtggtcagagaacagtttggttttatacattttagggagacacgaaacatcagtcaacatatgtaagatgaacattgggttctgtccggaactggaaacaaaggcaggacaacttgaagcagggagggggcttccaggtcataggtagataagaggcaaatgattgcattcttttgaatttcttactagcttctctaaaggaggcagtaagatatacatttatcccagtgagccagaggggtgactttgaatagaatgggaggcaggtttgccctaagcagttcccagcttcacttttccctttagcttagtgatttggggcccccaagatttattttccttttacagtacaaagccatcttacccaagaactttcagaatacataatggtaaaatgagaggaaagaggtataagtacactaaccctaaaagaggatcactgtttccacatgtgtagaagatgtttttccagagttttaatgtaagtttgtaataaatgattatatctattatataaagatacttacatactcagaatccttgttagttcccttttaaatgcatttttaaaaagctttatatcagtgattcgtctgcatacacttaaattggaacacttcagctrtgaccttggtaaaaagatcagaggttgtccttgtttctaacttaagtttaattcgttcatctctgatttttcactcttgttaatgacatgtccaactttctaaactgattcttccaaaaggacaattttatgaatctttagaacctgaatgaaatgagtgttagctcataagtattttctttgctgctgcttgtccccatttctgccttccctactccaggcaaaaatattagtttaatatttcctattccacttcttaatctttttgaaaaaataatactttgcatggagaaaaaagtgaaatagcatgaaagggtaaaaaatagtgtgaaagggtagaaaatcatttggaacagtcaaaaaaatatgggtatacagtaaaaagtaagttttcctccttcttttggcccccacacactccccatccaattcattttccctccacagaaacaacaaccacttggagagacctactttaaaaaaaaaaaaaaaaacaagcaaaccatggtgatcagaaaatataactttcattaagctgtaaacaagaaagtatgcataaacataagccatttttacagtagtccaatcataattttgtttttctgcttatctagtggctcacttaaaagtgtcaaaactaggcaattgtataacttcttcctgggacacagtttgtttggtggcagttttggtgtgttttttggtgtgttccatttatttgccagccatgttctgctctcccaaatgaagagtattagtgtttcagcaaaatatgggattcgaaattagacaaatcagtatttgagctctgttaatgtcacttcctagctgtataatcctgacatttcttttaatttctctgacctgtaaattcctcatctaaataataaggataataatagttacttctcaggttaattttaagggttgattataaattacctagcacagtgctagatatggtaggtgctcaataaaaccattagttccttttcccttttcttttaatgatatattgtgaatacaatctgaagagattgttaaagtgggactgctgttgcaggaaagagatcttaggtaaacttgaaaagataaaattttctgtctctatgtaaactaaacattattcatttgtcattttttatttaggaagttccagatagaaataaaggctattctttaaatcaagaggcaattttaaaagctttatttaggcatagagtaaaattttcagggcaactagctaatagggaataaaacagggtttctcatatcaggcattgttgacattttgggccaataatkatttgggatggggaaagggaggctgtcctgtgccttgtagaatgttcagtggcatctctacctctactgactagatgctggtatcaccctacccccaagtgtgacaaccagaagtatttccagactttgccaaatgtcccctgggaaaaccactgtcttcgagcgttgcttaaaaagaacacatgtgggagggtttcacatttactgtagcataatgaaaatgaagagtaaatgttattcagatgctaaaataggataccttttttaactgacatgtaaacgacttatggcagtaaaagagaaggtatttacaagtgacaaagggatctacaaaagattatctattgattcagtgactttacaggggcaagataaacaggagatgtatcctgtttgattatgtgatgtggttcatagcactttttaaaaattcttatgagacaagatttgtctcttgtccaggctggaatgcagtggcatgattatggctcactgcagtcttgatctccaaggctcaagtaatcctcctccctcagcctccagagtatctaggactacaggcgtgtactaccacatacagctaagttttgattttttgtagagatggcgtctgtgttgcccaggctggtctcgaactcctgggttcaagcaatcctcccaactcagccttccaaagtgctgggagcccccattcctggcccccatagtactttttttttttaaagctattaaacacatttatcctaacctcctagctattctataactaaaatgctgtgtgatgtgaatttccttttagagcagtcataaccctggatagacagcaagattctatataatcaaaagcattttaggaaaatgtaataaccaaaacttaggtaaacatgatttaccagagtcccttcatttctaaaatgttcacttaattgaaatttgaatttgttatgtatagatttttaaagactctttcatggttataaactccagtcttaaaattgaagaaatcagggcaaatatgtgtggtagtcaagtatggactctagtgttggactccttgaattcatatcttgtttcttctcttggctaacttttaaccaaaggcaaattacttaatcatgctaaacttcagtttctttttctgtgattgggaaaatattatgactatctcatagtattggctcttaggattcaataagttaatccttttactgtattttggcataatatttggcacactcagtaaatgtttttcattatctttattttaattgaaagctttgttgtattgctagaactcataggtttaatgctggttgttagagttatttttattataactctggttgcctagtcccaagaattgtcttctacctaaaagggacagcataacagagcaatttaaaatgggatatgtgtggccatctattgtagatacctggattaatttgaaggaagttggacatctgtttcagatactcagtttaaagaaacttcacttatacatttcttgccctccttaactcctctgtctttcctcttgagatttcacctttgccagtcatgatagtcctgttaggaatgagaaactaagctgtatcctagagtctcattgaaacaatgggagcccctcttggaagtgtaagatctcttcagtcacataccctattttctcatttcctgaaaggtggttaaatttccctgatttcagtggattagagcctcaaatcgttacctgagggctcacaatggagaaggctaagatcaaggggcctagaatatccttggaaatttcttgtatatctatctgttcattgctctttagacttcacatatatctatttcgaagtgccagtatctaaatatcaaatcaaagcaggttgtttgttcttttcattctaggcagaaaaactaatgaagcaaattggagtgaaaaatgtgaagctctcagaatatgaaatgagtattgctgctcatcttgtagaccctcttaatatgcatgtatgtatctttaatcttatttaagatttttttagaggtgggggtgggttctagcattttgtgtcaggggtcttaaagatcacggccgggttctttgattctctaggctgaatcataagactcggcatatrgttgtattcctgtatatgatttattacactgaaaagatacaaagcaaaatcagcaaagggaagggggcatgggatgaagtctgaaggaagccaggcgcaagattccaagtggagtcacacagtgcttaattagtgcatcaagttgtgacaacacatgtgcagtgttgtcaccaggaaagctcacgggagactcagtccccaacatatttattgggggctggttatatagctttcctcttcccttaaatgtaccaaaattctagactcccagaaggaaaatggatgtttcaccataaaccatattgtttgcacaaacagtttaggcacagtgagctgttcttgtcaagaaattgtggcactcttctgaaatctaagttcccacatgccagccaagggccaatcttgcaaatatgcctttctaaggacaacagtctcaggcctactttgttaactcttttctgtacgcatttgtttagtaaaacttttatgtatttgcctttgtggtgtataaagcgtactgctttaagtcatgtggatttttgttttatagagtttaaacctaaattttcataatatggtatgataacacaggatactaaatcccaggttttccattaatggccttggcaaatgatttcctctttgagtctcagttccctcatgtataatctagagataataatacctactttacctacttcataaggattattttgaggatgagattgatgtaatgtataagatcctatatcaatattttgtaacaataagtatacatttataaattctataaatagaaaatatttgcctaatacattaatgttatattgctataaataagtagaatgaagtagtcccatctccatatctagaaaataaaagtctgcaatgtcttaatatctgtgtatacagagacatacacacaccctagaattaagcctgcatttgaatttggtttatagatttacaatggtaccttcttggaaccctgcctatattaatttctgaataaatctgtactaacagacttagttttttgttgctgttacagtgaaagttattttttttttcagatctggctgctggtttgcaccttccctttttatcatttttttttacattttgaaggaaatgaatctattgtaaagtattgcttctgattggccccaactccagstcctttcaggacaagtgccagtcctttcaggacaagttgaatcaggtttttcttgtctattttgaaaatacgtatgccctgtttttatttataaagatacttccttaagttttaacatagttgtaatttttttttttttttttgagacagagtctcactctgtcacctaggatggagtgcagtggcatgatcttggctcmctgtaacctccgcctcccaggttctggcaattctcctgcctcagcctcccaagtagctgggactacaggcacacaccactacacctggttaatttttttttttttttttttttttgtaattttagtagagacggggttttaccatgttggccaggctggtcccgaactcctgacctcaagtgatccgctcaccttggcctcccaaagtgctggattacaggcgtgagcgaccacgcctggtccataggtttacttttgatggataaaattcagaagctatgttttgtaagaccttatttctaaaattaatttctgtgatgcttgacaacatcctgtataaaataggtacattcctgatgagctctttcccatcagccagtgctaaattatgtctcagctggttctcagtattcttgcagcagagtattttctccttacaagtggaatgaatttagcttattagacccttgcagatttttgagtacctgacttacagatttttaatagtagatagttgactattaaattcctttttccagtttcatagcagtttatttcattactgcttggaaaagtctttacttatgttaatatatgattttaacttatttatgtataatcatcagattaacatttgtaattttgggagcgttctttttactttagtgagtgtacatttgtagtaaaattcatgttgaccttaacttttgccaggttacttggagtgatatagcaggtttagatgatgtcattacggatctgaaagacacagtcatcttacctatcaaaaagaaacatttgtttgagaattccaggcttctgcagcctccaaaaggtatggtaaaggtatatattsgcctaaagcattaaaatcctagaaaacattgaaactttctgccattgtagaactagtttttgtgaaatcagattctcaagaggatgctgagatctatgtgaacagtttcttaaaataattgctcattcttcagcttctgaaattgagataaactttttcctgtatttacatgttaaaatacttgttaaaataatctccttcaatttcttttctcttacttccaagtaaattaaaatttggaaaatcaagattaaagaaagattcaaagtcataatacaagttttttgttttgttttgttttgttttcaagccaagacatttttttcttgtttcacagctccaacgatcttatttttagaatgtaatgattctttttcaggaaatatttatctgcagatgaactagaaattaaatatttaactttgatggagatgtttgcttattcaaaatcactttgaaagtcttggaactcaagaattgaatatgctcataactgcatcattaagtgtaattcttgttcattcaaatctttctttttttttcttttctctcttttcttttctttttgagatggggtctcactgtgtcacccaagttgaaatgcagtggcatgatcttggctcactgcaacttccgcctcccaggctcaagtgatcctcccacctgagcctcctgagtagctgggaccacaggcatgtgccaccacgcctggctctttttttatatttttggtaatgatggtgtttcaccatgttgctcaggctggtcttgaactcctgagttcaagttcttcacctgcgttggcctcctagagtgctgggattacaggcatgagccattgtgcccagctagtgcacatatttctgtcatgcttaaggcttgttaaaggtgattcagatggagtgtaaataatytacagtgagagatatatgtgtgtgttactatggcgttcagatccaaatttcacgagatagcttattttcatctagcagaaactcttatctaatgcattgccaaaactatatgggtttgatatgttgttagtcaagacttaaattattagtcacattgatttttcaaaaaagtggatctttaaaaatatcaaaatagcattatgtatgtttaaattataatgcttataatctttctaaatttgcagctatatcaataaagtgcattaatttacatatcaaaggtaactgaagcctgtacctgtgcatttttatgaactacataatttttgtttctggtaagtggaggatgacagttaacagcaaaaatgacatgttcttttattattaaaacaacaaagctattaggtatttctttttgttttctgaaataacaacactgcttatagtttttcctaacaaaacactcagtttattgtgatttcccccctgccgcaaaaaaaactttgaatgattatttgagcccagatcaaaaatgtatggctatagttggattagttaagtctttactaccctcttccaggttatttgtagtctgaacaaaaaatgacttttctgcatttttagttctcaattggacaatgctagtgaatttaggaaagtaaaataccttttatatgctgttggagaaagcttctttttttatcagtgttatcttagaccaggtaattgggtgatttctccagttggacttggtttaaagacccatttagcagagtggataccaaattatgcaaggaatacttcaaaagttatatgtaaatttgcttcttatttgaaagcattgtccaatttaaaagttacatgaatattttctgattatataaagttttgctatttgaactttttcacctttatgtctggacaatttttaatcaagaataacagttttgaagatcattaatttactttttgaccctcaatataaattggatattggtgtatagaagcagagtgtaaaatcagatgcatccttgtttgttccattttgggactggaactaggttacctaggttagagttattgacaattttatgttatccttagacagtttattgctatctgagctgaaagtgatcactgcttcacacagactacaaaaagataattggagagtgactgcagtatccatgcagtgcatgaggtcatatgtaactattgtgtatagatacaaagttgaagctaatgcacaccatgatgccgctaattggtgacagggaaatgggggcacacataagatattgacggttatatttaaaaagtgatttttttccctcaaacgtctaaaaatttacaacagttaaaattccaacaaaatccatctgaataccatatggcttcctctgtaaactttctgaattctgtattgttattttggtatataaattttattacatttgtgaatgttatacttcatgttttggtgcattctttaaattgtgagtaacctaaggaaaaaaataattttaaaaatagattttctgttataaagacccatattcttctcaagtactttatatttaagtagatttaatttatatagatgtgtatttttgcaccatttggacaaattttatgttaaagccaataaacagttgtccaaaaaagaaaaatagtcactaataaggtggaatatttgtcacaaatgaggattatctcaaatttagatttgtgtatcccaatactttttttgttcttatccttttttttggagacagagtcttactgtcaccaggctggagtgtgtaaccatagcccactgctgcagcctcctgggctcaaatgatcctcctgcctctgggtcctgagtagctggaactgcaaggcatgtaccaccatgcctgcctaatgttttaattttttgtagagacagggtctcactttgtggcccaggttggtcttgaattcctgggctcgttatcctcctgcctcagcatcccaaagtgttgagattacaggtgtgaaccactgtgcccatcctcttcctaaatcttttatttgcatatagcacttactaagtaaagccrttaccaaaaacatccgtcttaaaaaggagtttaaatttttaagcctctataaagcttaagataataaacacagtttttatttgttgaagttggttataaaagtatcagattaagctcaaagaactaatttaaaggttgcaaagctaataataaaagctaaatgcctcacattcattgcagtactcatttgtcacccatcgtaattattatcactgtggagaccattttaggaaagtatatagaaaaggtgccactctaaataacgttatctctagactcactgataatttgtcagacaagccaatctgaattttagtgtaacttttttttttttttgagacggagtctcgccctgttgcccacccyggagtgcaatggcgcratctcggctcactgcaacctctgcctcccgggtttaagagattcttctaactcagcctcccsagtagctgggattacaggcgtgcaccaccatgcctggctaattttttatattttggtagagtcggggtttcaccgtattagccaggatggtctcgatctcctcacctcgtgatctgcccrcctcgccctcccaaagtgctgggattacaggcgtgagccacaggaatggggataaagcagtttactgaataactataaggctaacacacttatgtaactactacccaggtcaagaagggaatattgacagcttgtgtaccttctctgttacagcctgtccccagaaagttaggatagccacaagctttctttgcatattgaatctttaggcactccagacactcataactgctcagttaataacactaattgtaatccttgaagaggaaaaacttaatcctgctaaaaagtaacaaaaccgatctactagaagggaaatattccaagtgatagatgaataatttgaatcaaacacaacactctaaaatctctgaatatgtttatgaagtggtagagtagctacaaagtcaacaaaatatggaggcttttgcataaatactttgttctaaaaaccttgaaatttagtttttaagaaagtaccaagtgtaacaatataaaaacccagagatttaagtaacatgtgtataaaagttttataatggatatgcattctatattaaattatgtgatcaaaatgatgaaattaataattccaagtatctgcaaacaggtggttttagattactattctttattgtttcatatgagccatccaaaagaaaaatgtcagtagaagattcaaattataactgacttaaccaaattttaagcacctaagtgaacttaattaaaatttgcagaatgcttgaaaatacaattaacatgtattggtaaagcttatggatttaaatttaaaagtcagctttagaaaagtttagtttcatatgattaaacttagattagttgctgttagaacttgaatcttcaagaattataaagaccagtagaaaattctatgtatgcttgaggaagagcttgaacattattttgaagtgtttgatgtgaaaaataaaattgctagagttatggaatcaggtgcagatttctttttttttttaaattgagatatttttgggaattttcatacaaaattatttttcctctcattttgaattttatttttattatatataagaaaattttggactcctccagatcccttccagttcaccctagcatgccatctatatagatggcattttaaaaaatactgtttcataggaaaagttgagctttgaattaaacaaatattttgagaggtctgcctattacagtttttgttagggctgtctgtagatggtttattttaataaccatcttagtactaagtttaggtgccagatcatgtagtactgagtttagtaatttggtaaaattataattttagtattatatatttagtattattatatatttaatattattaaatttagaaaatgctatctcattttagttgagaaacagttggtggtggttcccaaaatgttcaagatcccaacctctagatcccttgtattaaaagtgttaccttaaattgtatttagcagcaaaatgctgttaatggagaccataggttaataatatagttttattctttggaaattaaaacaggagtgactgataatttctgtttcttttaggaaaagattgtttggaaaaaggcacatgtcctttggctaaaacttaatctgtgagcaacagcaaaacagtgtttgccacaatctgttttgaagttgtttaccttctgtaggctaatatcaaagcactatggtgcattgtttgcttgtgaaggtggagggccttagatgattttgtttttcaactgttgataaagtggtatgaatttggatgtcaaggtgagcatttaaactgaaccttttcatgaagggagagggcacaggatgctgtaatccccaaatacatgctcttaactgacactgagcttagaacatggcatcttcctttcttctatcttacctactataaacaagattaaataaaagcagaattgaatattgggaaagttttttgtggaaggaattactattctattgattatcatataaattgaagcaaatatccccttaaaggtaataaataacatattcatttccaggtgttcttctctatgggcctccaggctgtggtaaaacgttgattgccaaggccacagccaaagaagcaggctgtcgatttattaaccttcagccttcgacactgaccgataagtggtatggagaatctcagaaattggctgctgctgtcttctcccttgccataaagctacaaccatccatcatctttatagatgaaataggtatgctatgttttctatatgagtatttttaaaggccatttttagagatatttagataaccagatttagtttttaacatttattaggccatgttaataaaacaaagaacataaccaacatcataatatgctatgtataatttctgtgttgtagaatgaaccatagactatatactcccctacttgatagataggtttttctgtcttttctctgttacaaacagtatgcagtagatatccatgtacatgttttctcatgtatatatgtttgcccgggaaagatacctagaagttgaatcatttggttgtgtgatatatctatcttcaacctcactaggattaccagttctttagttattatacctatttatgttttcctgcttggtagtaaacttgggcatcttttagcatgttgattagccatttgggttttcttatttgtgaattgtcaatatttctttggagttatttgtagttttcttttgttgatgtttattatgattacacctattttctagtctatcttttttctgatagttttttttttacagtttattatttggctatagtcagtatttttcctttgtggtttatacgttttgtatctggtttacaaataccttcactatccccataaatgttctctttttaaaaattatatataacatgagataggaatctaatttcattcttttccaaaaagacagcaaactagactatcctttgctgtatgtcatgacttttatattaatggactcttgctatattatggatcaatatttttgttctgttcctggtacgatgtatatataaatatatatagttatactaatacagtattattagtattggatatatatttatatagctttattactgtagttttgaattatattttattattgttaaatttagtatgataggctatgtaaatatgtagagagaaaaatagatacaaatatgtagtatagctttgttttggttacttgtttgctttatgtatcttttctcatcaatttactccagttattttggtgttttggtgtgcatcttgaacagaggaatatatagctagtttattttgtttttgtttttttttaagacagcatctcactctgttacccaggctggaatgcagtggcgtgatcatggctcactgcagcctcaacctccccaggctcaagtgaaccttccacctcagcctcctgagtagctgggaccacaggtgtgtgctaccacacaccactaatttttgtagagtcagggtttctccatgttgcccaggatggtctaaaactcttggggccaagcaatctgccctgccttggcctcccaaagcattgcgattacaggtgtgtccaccacacctggcctattagctatattgtctaaaaattttaatctaagcttctctttaactgggaagtgtgattagtttgattttgttatgatagctgagataattcagatttctttttttttttttcacgctctgtcayggctggattgcagtggcacaaccatgactcactgcaaccttgacctccccggctcaagcgatcctcctgcytcaacctttcaagtagctgagaatacaggcgtgtaccaccatgccctgctaatgttttaatttttttgtagagacgaagtctcactatgttgcctaggttggtccccaactcctggggtccaatgatcctcctgcctcagcctcctaaagtgctgggattataacgcctagctgatttacttctgctatattattttttgcttttaatttaccagtctagtagacttttttgctttattccctttttcttgctacaggtttagaagttatacgttcttttactttagtgaaacgtttagaatatcaacttaaaagtcaagggtaatctctaccttccttccaaataattcacagagaacttagaactcttaggtaataataatatctcatctcttacatgttattgttaaacattttatttttcttctaccttcgatattaattgctattttatactggcattgcttgtttagtgccacgtttgctaggttttttgctcaccattgcttgtttgatcttgtcttttctggatttaactttgtttttactgaagtctttcaaagttctttcagcaaaggttgtacaaagagtagattcttyctgtgtgtgaacatgtgttaattctactttctctcttaaatgatacagaatcacattcagcgtcttaaagctacaattccactgcattctaatctttttaatcttgttgcttttgagaattctccttattgccctatatttgtaagtaatctatcctttctctctagttgctgttagattttcatgtcattctgctatttaagtatggtttttttctaggtctgcatttattttcatttagcctgctaagccacttatctgaggatgtgtgactttcattaattctggaggatttctcagccattgtatatatttgcatgttgcaatgttcccattaaaaaaaaaacaattctcaggccaggtgtggtggctcacatctgtaatcccagcacttggagaggccaaggcaggaggtttccttgagtccagtaatttgagaccagcctggacaacatgtaagaccccatatctacaaaaaaaaatacaaaaattagccgggtgtggtaacgcatgcctctagtcccagctacttgggaggctgaggtgagaggatcacttgagcccaggagattgaggatattcagtgagcataggtcatgccactgcactgcagcctgggcaacagagcaagaccccatcttcaaaaaaaaaaattcttcatctcttccattttgagtcatttctacagtttgtcatttagttctgtacagtatttcatcaattctaagacatactgttttgttttttacattttaacatcttcgaaattaggatagcatgttacaattgagttggcagcattttaagtttcttgttggtacacaaaataatggtacaacttaaaaataattcaatttttgagtagattataaaggcaattctttccttggctatatttaatctttcaactattgggtttgttttttgttgattatatttgaactttagaagttctgtttggttctttataaaatgtttccctttttttactgtagcttgttattttagaatttcaatcccttttatatctttagaattttaaacatactatttttgtgtagtttttgaattgctcttttctgaaattctaattttactttatgttgacttttttttaatagtggtttgtttccttgtgtcatttgtaacattagatggctttaggcttgtttttatatgagaattcttttttgcctaagaagatccagagtactttttctgtcctcagcttagaacttcaggggtctgatcgttcaaaaccaattttagataatttctcagtttgtgtgttcccagactgaatggtggtacaaatttagacttcatacctgaaagagactccccatggtcctagttttttgtgtaaggaggacatttttacccctcagagcccaggcaaagatggacaagtttccttgtacagtgacgagcaaaattttttttcttgtctacactttctgtgagtgttaatccttccaagcatcttggcttcagcctgtatgtagatgttaacaacaaagcagaaccttttgatgctgtatatgtctatatgcatacctgctgtgtatacaaacacaacagacggtagcataatcacatcaaggttttccaactcttatgttcagttccacttttttctgaactctgggattttttttctttgtttcttgcaacctcatatcttcattaaccttttctaaaatacattaatagtctttatttttaataatggttttaagtttgcagaattgagcagaaatcatatagagagttcccatatgccccccagatatatagtttctcctagtattaatactagcatgagacatttaataatgaaccagtattgatacattgttattaaccaaagtccatagtttaaggttcattctttgtgttgcacagttctttgggctttgacaaagcataatgttttttatttatcattacagtctcatacacaatagtatcaaatatttgtccttcccttttcctcccaaactgctagcatccgctgatctttttttactgtctctatagttttaccttttctgtaatgttacagttggaatcatacattatgtaatcttttcagactggcttctttcccttagcaatatgcatttaagtttcctccacatcttttcatgatttgatagcttatttttattgctaaataatattctattatgtagatgtaccacagttagtttttccattcgtctattaaaatgacaccttgttttgggcaattaggagtaatgctgctgacagcatcatgtgtaggttttcctgtggacacaggttgcatctcaactgggtgaaatacctaagagtaccacagcttgatcacatggtaaaacagtgtttagttttgtaagacactagcaaactgtcttccaaagtggctgtaccattttgcatttccaccagcaataactgaggttcctattggtatacatcttctctagcatttggttttattaattttggggatttttagctattgtaatagatatataggtatctaatagtttcccatttttaaaatttgcattttcrtaatgacatgatgtggaacattgtttcatgtgcttatttgtcatctgtgtatctttgttgaggtgtctgttcaaatgttttkcccattttgaaacaattgtaatattttttattgtttgattttttaattttttattgatacataataattgtacatatgtatgaggcacctatgcaatgagcaaatcaggctaattggaatatccatcacctcaaagatttatcatttatttgtgttgggaacaacaattaggttattatcttattgttgaactttaagagttctttttatattttgggtacaagtcctttaccaggtatgtgtttgcaaatattttttgccagtctgtggcttgtcatttcatttccttagcagtatctttcacatagcacgaattttattttatttattttgttttattttattttatatattttttgagacagagtttcactcttgttgcccaggctggagtgcagtggcacgacctcagctctctgcaacctctgtctcctggattcaagtgattctcctgcctcagcctcccaagtagctgggattataggcattcgccaccatgcccagccaattttgtatttttagtagagatgaggtttcaccatgttggtcaggctggtctctcaaactcctgacctcaagtgatccacccacctcggcctcccaaagtgccaccatgcccagccaggaattttaagtccaacttacacatttatttttgatggatcatgcttttggtgttagacataaaaattaatcaagtccaaggtcacctagattttcttctatattatttcctagaagttttatagttttgtgttttacatgtatatttgtgatccattttgtgttaatttttgtgaaaattacagtctgtgttggtccgtttttttgccgatgaatgtccaattgctccagcaccatttgtcagatgtgcatttacttttataaaaaaaaagtctatccaattttttgtttgtgtttgcagatacagattgaacatctgtaatccaaaaatccaagatacaaagtactccaaaattcgaaagtttttgagcaacaacatgatgccacaagtggaaaactttcatgcctgacctcatataacagattgtggtcaaacctcagtcaaaactttgtttcatgcacaaaattatgtaaaatactgtattaaattaccttcattctatgtgtataaggtatatatcaaacatagatgaatttcatatccggacttgggttctatccccaagatatcatatcattatgtatatgcaaatattccaaaatctgaaatttgaaacacttctggtcctcagcatcttggataagggagggatactcaacctgtgtcattttctattttttgatcattccgagtccttatatttatagtatgtttcttctaagcaagcatatagttgtttaaaaaaaatttttttttgaatagaggaggggttttgccatgttgcccagcctggtctcgaacccctggcttgagtgatctgcctgccttgagttttttttttttttttttttttaatttattctaatatcttagtcatgtatttggagactttaatccactcacaatttaatgatggatgtaattatttatacatatctagcattttttcatattattttaagtaaccatcttgccaaaaccacttagtgaagattaggaagattaagtaggcagttgaattttaaaatttatctttaaaaattaggcagttttaaaatgactggtttttccaccttcagaatagatgggttagtttgaattatagtccaatgataggacagattttacagaattaaactttaaataaatctaggatatatgtttgccattgcaggactctcatrtgtcatggtaatgtgtttttgctgaaattactttttataaaaaatacttttttgaagtgtggacatagcacattacaagatatttttgtgccacttgcatgtatgatcgacaaagtttgtgttgtagtttcaatgctaaaatgtaatagttattcagaaataaaagtgatttatagggatataagacaaaacatttgaaatggggattgtactagaaaatcctagatttatttttactgtttttttttttaaattattaggatgtagcacctttcagtcttatattctaaaataaaattgttttcccctttttttaaaaaagcatttcatgttcattgtagataatttggaagacagaaaataatttaaaagagaaagttaaacttgtccttaaatccatccctgagctataatacaacgtaattagcattttggtatatttccataaaacctttttttaccttgtataacatatgtatgtacattccagcatatatgttttaaatcattttctgtcctacatttttcggcttaatagtgttttgctcatttttccatgtcgtttttatttattaacaggaaactgcatgagaaaaaagtatgcaacataactaagagcacatagggttcaggtgacctagaaagttagaggcaaaacacacaggctttcatctgagattccacataactcttccagcctctcagtactagatccttcatttttcttacatatgttgtcatgaatgtatttttagagaagaaacaaaaattatgaatgattgtgttttaatttgcctaataatttaccaagtttattgtatcagaatgtctaaaacacatagcccaatttttttgtaatctttcataaagttttcagctttaaaacactttttttcttttcatttttcttaattgacataataattgcacatatttatggggtacagagtgacatttcaatgatcactatagtatatagtgatcagaccagggtaattagaatacccatcatctaaaacgttttatcatttcagtatgttaggaacatttgaaattacataaagagtaaataaaataaggctaggcatggtggctcatgcctgtaatcccagcactttgagaggccaaggcaggagaatcacttgaggccaggagttcaagaccagccttgacaacatagtcaacctgtctctacagaaaataaaaaaaaaattagctccgcatggtggcacatacctgtggtcctagctactcgagaggctgaggcaggaggatcacttaagcctgggagttcgaggttgcaatgtgctgtaattgcgccattgcaccccagcctgggcaacagagtgagaccctgtctcaaaaaaaagggtaaataattaattcttaatttctaaggttaaggaccttttacttctagactcctttctacgaaaccgttcaagttctgaccatgaagctacagccatgatgaaagctcagtttatgagtctctgggatggattggatactgatcacagctgccaggtatttgaataaaatctgccctcaacttgtgttggtttttttgttcttaatagaaaatttgctgggctacttactatgcttttgtacaaacttttttttcataattatttacacttatgactaagtgataaggatccaaaagaatatggtttgtataaactttatccaatttgaggacttcgtgtttaccaaaacattagtagattgcctaaatgcctgaaacagacacagcagaagagaaaacaccagagtaaagcctgtccttggaattttcagaacctacagtgctaaggagaggaagtgactagtgtccgtgggtattgtgtacatttttttaaaaaactgttctttctgttttcctcggttcttacttttgactttcaccataattccttatactgtcaattcttagtcacttccctgattttcatttgacagagttcattagtagctgaaactgacaacactttctcacttcctgtcacctatgcctatctttaggatcccaattttatacgagacagacttgtatcctaggcttttcctcttcctcctgtatggctgtgaaaccatagcttgttccctgttatgtgaccaaagagaaagagagctttatttttcagttttcctcttcaggttcccagttttcatttagtttttggcctctgaatattctgtgctttcttgtcagcttagtggtttaaaagaaagttaaaaagaagttaatctggcatgtttgttttttcagccagattgctggaaataaacatcctagaaccattttcccttttttttttttttttttaatgaatcacttacttatatctcatggaaaagttaacagtgttcttttgttgttttaactttagtattttctctttttttttttttttttttttgagatggagtcttgctctgtcgcccaggctggagtacagtggtgtgatgtcggctcactgcaacctccgccttccgggttcaagcgattctcctgcttcagcctcccaagtagctggggttacagacgtgcactaccatgcccagctaatttttgtatttttagtggagactgggtttcactatgttggccaggctagtcttgaactcctgacctcaactgatccacccacctcaccctcctgaagtgctgggattataggcatgaaccactgcgcccagccaactttagtatttcctattttgtaatctgtttttgcctttttaaaaaaagtattatatttagaattatttaaaattcagttattatttcttcaattattgttctccatgttttatctccttctggaatgcaagttggatatatgtaggaccttatttctatttcatgttttgttttgttttgttgagacagggtctcactctgttgcccaggttggaatgcagtggcgtgaacatggctctcactgcaacctcaacctcctgggctcaagcgattctcctgccttagcaccccaagtctctgggactacaggtgcacgccaccacacctggctaattttggtgttttttttgtagagacagagtttcattatcttgctcaggctggtcttgaactcctgagctcaagcagtctgcccgctttggcctcccaagtttggctggcattacaggttaagccactgtgcctggcctatttcatgtcttttttaacgtctctttcatattttctgtctttctgtgctatgtcctggataatttcttttcctttcttctggttcatttgaagctcttctactatctgactctttcattgagcttattatttcaagtattatatttttcagttttagaaattcttagattgtttttcamatctaccaggtcagttttgataggctcttgcttattactcatgtttctaattggattagaaaatcagaaccctggcatcaacaagctgtgtagccttggccaaattttataatcactctgtatctgtatagagggaataatatctataaaaagggaggaatattacctacctcagaactgttatgaggaattaacctgagttaagtacataggctttacctccagccttagcttaattcgtttacttctttgcaaaattgtagattaatttatttgagtcttttaaatattttctttttgtggccagagggtttaaggatcccttaagcccaccgcattagcataagtcaaaagtctgaacaacatcattctcaagaagaaaattaagccacatgtcctccttctacattatgtttgtgaaagtgtagttttattatgaggaaaacagcctttagcttttgttgaatggttcaagaaaaaacataacatagataaatttaggtaacattaatagaaacatttttcattaataattggttttgataaatctatgcggtttatcaatgggactcatgtacaggttgccaaaaactaattattctccctgagaaataatacttaaagcacttagacaattggatagttagcccatgtaagagaaaatatcttaatattatgtaccctgtcagagcatagtgttcaactattttcagcaggggatatagaggcaattggatgaagtcttctccagagccacttcatctatagctccacagtatgattctggtacagcataacttaaaacagagttttcagaaccaaaattccttattgcactaatagcaattactgttttcattatgatgagttttgatttgagagagcaaatgctgctgcctttttattaaactgcggtcactttttaacctttattgtattttgggggcgggggttaaagttgatattattaattttgagtaatagttttagacatattctactttcatatgaaccagttagctcttctctagaattgtcttttctatgattatgaagagagcccagtaccctagctagctttcttgtaatatggtcaccaaggaaatagaaatagagaacggctcaatgaaaccggtcactgtttctggaaaccttggtgactgatgacatattcttcctcttgagagacatgagacataaaagatagtgtttttagggtattcattgatgaagttaaagttttgggatgtaaatttaggtctgattattttaaatgtgaaatgataaaaaaattatgttttgttttaaagagttttttttaaacttttattttaaattcaggggtatatgtgcaggtttgttacatagataaatttgtgtcttggggagttcgttgtacagattatttcatacccaggtattaagcctagtatccattagttatttttcctgatcctctccctcctccagatgaagctggaggccatgattcttggcaaatgaaggcaggaacagaaaataaagatttttttaaaagtttgaacaactaacacataaaaggagcattgattttgtttcttaagtagtaaaaaattactgtcacttcctgttttatattttagctcatttgtattgaattaatatatatgaaaaggttctctgcttttgctgcttaaaattactccttagaatttgcttctttatgtgaaactacacgtgatttcaatcacttttgctttttcatcatgagtatctgttatacatactcaataggccatgttttactagttttatttggattccttggttctattttttagtattccatcctctatactggcttttaaattttgttttgctttgtcctatgtttcttcaaatgctggccatttccctttttcccccccaaatattgacttaaccacagtgtcttttgtgatgttttttccttatactcattcattatcttatgcttttagttcattcacccacttttaagatttgtttgttttaaatttggaagaaattttttcttttttattaattttattgagttgtaaaaagtcaataaagaggctgggtgtggtgtttcacatctgtaatcccagcactttgggaggctgagtggggaggatcgcttgagcccagaggtttcagaccagcataggcaacatagtgagaccttgtctctactaaagacggaaaaatcagctaggcacagtggcatgtgcctgtagtcccagctactttctgtcttcaaaaaaagaaagaaagaaagaaagaaaataaagaaaaataaatatgagcattaatattttgattttaggaccacttaacacaaatacaaacttgcattatgttgtgttgtggaactaacatttttcaaatttgtgtttatattttcttcctctaggtggcaaactctcacagttaattgaaagtaattgggctctgaggctcctgaatgtcattcagtgtagagtagaagtaggatataagatttggattatttcagaaatgtaaaacctcttagggagaaataaggtaatgttagagaaatgtgtttccatggaataccaataaatttcactttggatagcagatgtgtattgttactgggttatactgaagtatcaacagtaaaggtaatattgatgtccttcagaaattaacttgttttatatatctttgtttttattcatgtttatttttaaagttctttttttttttttaatctctacatcctttataaataagtgacatagactcagaggttggcagggctgccagcatttttaaaaagagttcttcccagcattttgatgtttgcttatactctgttatctttgtttaaagttggattacttgagactttatttcgcattgagaagctatcacctgcagtgctgatagtaccatgagatgatgatgtgaaatatagagaaaaagtacacagtatctattacagttaccagaatcttcagacttattaaggggaaatgattctctccataatattattatttaaggacttgaattatccccttatactcccaaactgtatacccaagctataacataatgggttttagtcattcaacatgtattcattaagcaccatattttgcaaaatacaatagttttttaaaagcaaattttaataatttttcagtggctatttgcaactgaacattacatactttaatttctagaaagacatgaagtgaaatgcattagttttccagttttgctaatatttgatttatttaggattaacttcaatttatacctgtaaatagttgaataatagtgatttaaaatcagatttcttacaaaggatttagttaaaataccacttaatttttaaaactaagccctagtaataacattctcagaggagtataattggtagatttaataccttctgtcttctttatacacttaggtcatagtaatgggagctaccaatcgtcctcaggaccttgactcggctataatgagaagaatgcctacaagatttcatatcaaccagcctgtaggtggtcttgattgatattatgaagagttaaatactcacctttttataggtcttcacctttaattttaagaagggaatattttgtcatataggggtgcttatgacagggaaggaatggggcagaaaccctgacagtagcttctttgtcctttccactctctttatttctatcctaagattagtgttacttgcttctcttcaaagtatatatatatagttatctcaagtttgcctggctattttagtgatttactttaggatataggaagtcatctatacaggaagatacataagaaaatctaaattatagttttggtttagcatagaatagaattggagaaatttggcttgaagaattgttctattcagaaggcctgccatgaacaacaacagggatttatttgattgagtattggcagatgtagtcagtgcttccctgataggattaatgattccagtagatatcatagtttaccttaagaatgcaaacgcttagatggtgttaaaccagttctgccttctttctagcattttttgttagttaaaaagtacccctctagtagatgattatgacttaccagtacactataattttggcacagatcttcaaatcttgaattctgtctgccttcagactgcaaaggaaagaaaaaacaggttttactagtagaaaatatgttccatacaatcagcatgttacatgtgttgccatttagaggaacttactctaattccatttataatctggctaaaaatcatttgtcccatttatattctgtaatttatcagattggtttttggtagtaaacatgatctctgaaagattgatggttatggactctataaaattactctgatcaactctttactatagctacaactgtaataaagtggttaagtgtgtgcacatccttagaaaatttacccaatgaatcaatgaaaagatttttaaacttaatttaggagactataaaatttatttagtatgactgattttttttttttctttgagacagagtcttgcctgtcagccaggctggagtgcagtgacgcgatcttggctcactgcaatctctgcttcccaggttaaagcgagcccgcctcagcctcccaataagttgggattacaggcgcccaccaccatgccctgctaatttttgtattattagtagagacggggtttcaccatgttggccaggctggtctcgaactcctgacctcagatgatatgcctgcctcagcctccaaaagtgggattacaggcatgagtcactgcacccagcctagtatgactaatatttattgagcattaatatgtgtcacagacctgctaggatctggtggatgggacatgggcctggtccttgaagaattctgttttggagaggcagacacagaaataaataatgtaaaatatgctttatgaaggtatgtttaaagagctatgagagcctgagatgttgatgaaaactaatattctgtcagggaagtccatggaatttacagaatccagctggaccttgaaggatgataggaatttgacaggcaaatgagacaaggaagggctttcctgccagaatgaacaaagtcaagaatttgtggaagcactgtttaatggtgagttctgagggtagtttggtgagcgcagcaccaaggaatatagatggagaggaggctgaaaaggtagactgcttctgggtttaggtgaactttatatgctttgcacaagagttttgattttgtaagcaagacatcagaacacttttttaaaaatttgtttacctaattggttctgaagataatttatagaatctctatcactaatccaatagttagtacaatggacaattaagggttttttaaattttattctttttttaaagacagagtcttgctctgtcagccgtacaattataaattatagcccactgcagccttgactcttgggctcaaacagtctttccacctgagcctcctgagtagttaggactataggcatgcaccaccacgtttggctaatttttgaatttttttacagacgggtctcactatgttgcccaggctagtctcaactcctggcctcaagggaccctcctacctttgcctcccaaagtgttaggattactggcatgagccactgtggctggccagctatggtttttgatgtacagtacaatagaacataggatacagtagcatggaaagtagccacaattaaagttgtaaatttaatatgtygtgtgagtaatcaaaatgggttgtaacaggttttatcaagtttattataaatttgtatagtgttaacatagaaatggaaatttgtaacctccattttattccattttagtgaatacgctttataggttagttttttttcttatgtaatatgatgtaaagtgtatggttaatcttaaaacttttctccaagtgaaatgtttaacagagtatttgttggtgatcacatgacatatcaaattaaccttcctacttgacacacttaaattacagaaagagcagagtttggtttgtttttcaagtaatttgatttggtagtcattgtaaccagctctgctttgtcgatgtttgtgggaatagggataaattcagccatgatagttttaagaagcatctatattgactatatagctgagggattctataaaaggagctaaatgtagtttgtatttattgtatggtgtaaaaataggaattgtcactgggggaaaagcatacagacatgtaaacaaatatatcatcagcactaaattaaaattcactaatataaattagtggtcaaagaaggagaaggaaatggaggaactgagaagttactgttgccatctctttgaattactgataataaattttatggtgagttttcatgagtttcctgcatgaagggaaaaaaaatgaagattgctgaactatagagggaagacattatagtcatagatattcatttactcattaaagattaaaggtgtgttatttcccaaacattgtactaggcactggggatgagagtaagaagatacagttcagtaggagaaccagagataattactctagagccttgaatctagttgctttgacctcttcaaagtttctgtcatctccttataagtattgagagagactttagaagggacaaaatattaggaacactacttgatctttttaaaaaaataaaaaataaaaatgctaactggaaattatcctgcttttaggctttaaaacagagagaagcaatcctgaaactcatcttgaaaaatgaaaatgtaagtagaaaataaaaattttttccccgtcctataaatctgatgttcataaagttattttagagaaaaatgaggaaggaatctgagaatgatataccccaaggatctccagcccctgcagccacagacyggtactggtctatggcctgttaggaactgggccgcacagcaggaggtgagctgtgggctagagctccacttcctgtcacatcagcagcgkcactggattctcataggattgcaaaccctattgtgaactgtgcatgcgaggggggttgctcgcttcttatgagagtctaatgataaatgtaatgcacttgaatcatccccaaactatgcccccctcctccacttctccaggtctgtggaaaaattgtcttccacaaaattggtccctgatgccaaaaaggctgaggcactgatacacctttgaacttgacctgaatcctcttggttgcttatgtaactcagtaactatggtatatgtgagttaaagatacttttcttatgtttttagagccatgtgtttttgtatctgtgcattaaaatgctctgatatttttcagactattgtctgattttatgtaagatacatttgtttttctacagaagttttttgtcgttgttttttacttaattgcatttttttaacctttcctgtggtgctgaaaattgcaatattttttgaagttgaaatttaaatttaagaagttgtggtaatcaaaattttcaatagcttttgtgtttaaggtttttttggtcacatgtttcaaaaattaaagtatgtatatttaataatacayggagaaaaatcttctcttttttcctgtatatatttttttcttttctttcttttttttttgaagcagagtgtcactctgtagtccaggctggattgcagtggcacgatctcggctcactgcaacctctgcctcccaggttcaagtgattctcatgtctcagcctcctgagtagctgggattacaggcgtgtgccaccacactcggctaatttttgtatttttaccatgtattttttgcattttaccatatatttttaccatggtttcaccatgttggccmggctggtctcaaactcctggcctcatatgttatttctccttttatttacttattttttatataaactatcaataacacatacacactgttctgtgcattgctttttttacgtatcgttgagatctttccatattagcatctagtttccttattctgttgtctctctttgtttttacactacataggattccactgtatggacattctggaatttagtgaatcaatgccacattgaaggacatttggattgattctggtctttcactattataaaaattctacatttaataaccttgtgtgtatgtcatttcatacttatacaggaatattagtaaagtaaattatccaggagcggaattgctagatcaaaggttagagtgtttataattttggtagctattgccacattgttacggtttactcatattcctgtgataaagagtgcctcttttcctatagtcttgccaacagaatgttatggaacttcrtgccaacatgatagatagaaaatggttatctctctgtttttttgtttttgttttttttcttttttgtgacatgatctctctctgttgcctagcctgaagtgcagtggtgtgatcagggctcactgcagccttaaactcctgggcccaagtaatcttcccgcctcaccctcccaagcagattacaggcatgtaccagcaagcctggctaattctgtttatttatttagttatttattttgttgagatggtatcttgctgtgttgcccaggctggtgttgaactcctgggttcaagcaatccccccgccttggcctcccaaggctggaattataggcatgaaccaccacagctggtcaaaaatggttatctcattaaagttttaatttgcattctttagggatggaatgaatattgtatgtttaagaagcatttgaatttttttctgtgaactgtatattcatatattttgcccatttttctattgcagtgctccttttcataataaatctgtaggaactctttgtattatggagatttgccctttgtatgatttgaaaatatttttttccaagttgtcttctgattttattggagttttcttcccccccacccaccccccctatggcttctggattttgaatataaatttaaaggcctttcctactcccaagtttataaagtaattttccacactttccaaactcttgctacctgttttcccaaaactcgataactgcatataattgaataacgtggtattcctctttatcccaaacttgatatctaaactcactgttacaactcactgtataaactaataaatcaaatagattctgatagtgaatgaaccttagtagagatactacttttatcaaaatacttgtatttttatggcttccctccttccttgaactaccagaaaccccatggctaattcttctccagccatgccctacttccacacttcctattttttcccattatatctcacccataaatgttttagttgtatctctaaaagaaaaggattctttttttttaacctagcctcattgccatgttatacctattaaataattgacagtaagtcattattttcattatctagtctatgtacaagtctctgattattgttttctaaatgcctttttttaaaccatgtatttgactcaagatcgtatgaatttcctaatttgcaattctttgatactttttatgtctcttttaatttataggttataggttcttcccttatcttgcttcccccccacacacccaaccttttaaaattatttactggagaaactaggttgggtttgtcctaagttgtccacagtctgggttttgccgattgcagaggagtagttgttgctctaatattggtagttggatcaagagactggatgaggttcagggtggtggggaggagacacaggacaggacagcacagcttcataagtagaattatgttcttccatcaggagaaacataatatctcagtggcttgtacgttttacatttaaatctttatcatatttggaatttagatagatgatatgcagtatgaatccaactttggttttgtttttctagatggatacctagttgtccaacacctttttgtttgtttgtttgttttttgtgacggagtcttgctttgtcacccaagctggagtacagtggcgtgatctctgctcactgcaacctctgccttccaggttcaagtgattcttgtgcctcagcttcccgagtagctgggattacaggcacgtgccaccatgcctggccaattttttgtattttttcatagagacagggtttcatcatattgtccaggctgctctcgaagtactgagctcaagtgatccacgtgcatcggtctcccatagcagtgggatttcaggcatgagccactgygctcggcccatttttttttttatagccactacagatgccacttttaccaaattctcatatgtattgtctctgtttctggactttaaattcaggtcttggtctttcgtgtctttatgcactaggattaatactgttttaattattgaggctttgtaagttttaatatctggtagaactatatatcccttgttgtccccgaaccccaaggttattttaattctttttctctgcataaattttagaatcaatttgtcttacatrggaaaaaaacaagcattaatatttttggtggattctcatttaagataatctttttgatgttgaatctttctgcccaaaggcatatatgtctttctgggttgtttacctttgtgtctttcagttgtgtcctaatgatttatttattttttaaagagatcrgatatcttatcaagcagagttccatgtaacttacaaaaaaaaaagagaggagagatagagtctcactctgtttacccaggctgacgtgttgtttttttagggtctcactgtattacccaggctaaagtgctgtgatatgatcatagtgcactgcaaccttgatctcctgggctcaagtgatcctcccacctcagtctcccaagtagttaggactgcaggcatgcttcaccacgcacagctagttgttttttgttttttaaaaatcttcttgtagagaaagggtctcgctctgttatccaggcaggttttgaactcctgacctcgaggtatcctcctgccctggactcccaaagtgctaggattataggcatgaaccaccattcttgacctattgccttaaaacatatcaaaataacatatagtgtatgcaaaagcttaaagaacctagcaaattacaaagattaggatcagtggttatgaatcattttggggggagcatgtcatagagccctttaagaatgagataaaagtagtcttttctaagaaagctacgtatgtacatgaaatatgtacagtttcagagaaattcctaaaattctccatgttttttaggtaaggaactttggtcctagataagaaatcagtaaattatattttgcctttttttttttttttttttttttttttgacagagtctcgctctgtcgcccaggctggagtgcagtggcatgatcttggctcactgcaactttcacctcctgggttcaagcgattctcctgcctcagccacctaagtagctgggattataggcgcgcgccaccacacccggcttatatatatatatatttttttttttttagtagagacggggtttcaccatgttgatcaggctggtctcggactcctgacctcatgatccgcccgcctcagcctcctaaagtgctgggattacaggcatgagccaccgtgcccggttgacttttaattgaatttttgataactgctttcaaaaaaacattgtgtaatcctggcactttgggaggccaaggcaggcagatcacctgaggtcaggagttcgaaaccagcctggccaacatggtgaaaccctgtctctactaaaaatacaaaaaaaattagctggacatggtggctggcaaccgtaatccyggctacttgggaggctgaggcaggaaaatcacttgaaccccggaggcagaggttgcagtgagccgagatcgcgccactgtactccagcctgggtgactagagtaagactctgtctcaaaaaaaaaaaaagtgtagttgtagtattgtttagataaaacacaattggtaaacctttaacagtgatagacaccagtgaaaagtttagagaagaaaataaaggggatagttaataagttcctttgaattaggatggccatggtgtggctagaaatttaacagatactagaaggtagttacaattttggagacttcaagttaaccaatacagttatttaatttaaaccattttaatgaaggatcgttttgcatgactggaagtttataacatttttgaaatatagtgtggtctagtgtagctggagatgatgcagatgatttacatatagctgattaatatgagtacaagtgatgaaatttaagcccttgtaacagagccataatttacacaggttatttagtttcacatttaaacttaagaagttactcatgtcagtgctgggcatggtgactcatgcctgtaatcctagcacttctgaaggtcatggtgggaggatcacttgaggccaggagtttgagacaggtccgggcaacatgatgagacctcacctctacaaagaaattttaaaatttaaatgggtctgcctagttactcgggaggctgaggcaggaggatcacttgagcttagaagttcaaggctgcagtggatgcaccactgcattctagcctgggtgacagagcaagatcctgtctctaaaaaagaaataagaggaagaaattatacatgtctcttaattttagtattcagtattctgctttcttagtactgtctttggaaattcttttaggattatatttttcatggctacagggaattttttttttagacaatctctgctttgtcacccaggctagagtgcagtggcacaatctcagctcactgcagcctccctgggctcaagtgatccccccgcctcagccccctgagtagctgggactataggtgcatgcaccacacccagcgaattttttgtatttttagtagaaatggggtttcgccatgttgcccaggctggtctagaactcctgasctcaagagatccacccatctcagcctcccaaagtgctaggattacaagcatgagccatcccacccagcagatacagggaatttttagcaattctgttattcataaaaccacaaagtatagtctctaatcagttttatgttgcaaaatacgaatgctctctggataattgctgacatgagaacatctcgtcatttcccactggttggtatttatatgctgaaggattactgctacttcaataaaatctgaagaaaattmatttaattttgttaaagatgcctcaaatcagtagcacatakatttatttggtaaactgagcactgtcatacttatacattgtggagctaaataagggttttttgttgtttttttttttaattcacatgaacttycagactttgagttcrtcttctctgaataaaagattgaagcttttgaaatgatactgtgttctactcttttacaattattttattgataggtattccttaacatgattcgcttattttaaaaagatagtgtagtgattttggcttaaggttttaagtataaaaagaattagcactgataaaatttataccctataaaagtatttcgtctgactttaaggaggtagcttttttccctatacaaactgacctgaaattacttttgtatgatatagcagcaatagtttttgttttttgttttgagacagaactgacagtctcctacattctagctgaccaccagcctcatcattctagccagactggaatgcagtggtgtaatcctagctcactgcagccttgaactccttggctcaagtgatcctcctgcctcaacctcctgagtagctagacacacccagctagttaacaaaattttttttgttgagatggggtctgtgttagcccgttctcaaaccgctataaagaactacctgagactggataacttatgaagaaaagaggtttaattgactcacygttccacaagctgtacaggaagcatggctgggaggcctcaggaaacttaacartcatggtcaaaggcgaaggggaagcaagcatgtcttaccatggcagagcwggagtgggagagagtgaagggggaagtgccacacatttttaaaccatcagatcttgagagaactcactcactatcatgagaacaagggggaagtctgtccccataatccaatcacttcccaccaggtccctccccctaacactgggaattaaattcaacatgagacttcggtggggacacagagccagaccatatcagggtctcatcatttgccccagctggtcttgaaataaaattataagtgtaaaatgcttagattacatagatgttatttacaagtatactattaatggtggatataataataaacaactgcataagtaagtatcattctttcaagctattttagaagtctgttaacttattctgctgttgctgcctatactcaaaagctttttaacttgggaattgccttcagagttgcctaatgaaaagagttctcattatttcatggtttatctaaaagctattatcttagaacaaaatgagctacttttagagtgcttgctatgtgccaagcattttggtgagctatacattgttttatttaatcctcatttatctaaggagtacatattagtcctattttacagctgaggaaactgaaacccagagaagttttgtaataacttgcccaggattacacaaagaagtgatggagcctactcttaaccattagggtatggtacctcttaattaaatcttgctcccccagtgactggaatcttcttttctttgttttcttatacttggttggttcatctttctaactgtatcatcttatcaggcacaagatttgtgagtggttagaacatagggtggcccaacaacggagtggtcaaaagacaggaggaagtgttggatgtttaatttttaacatctcagagtatagtttggaaagctctttaaagtagtttgttaaatgtatgaaatatttcaaacatataaacaaatagccccattatcttccacccatatttaacaggcaattttaatatatttccacatttgcttcattttttttttaattaagtacagccttaagcaaccactggccacttcccattatcaccgtcattggtaacctgctgtccaggagttgatagagtttatcaatcccgtgaatatatgtgaacagatacctaatgcatgtgtataggtatatgttatttttattctttttacaaacagtagaaaaattagatccttgtatgtgtctgtttcttaaggacacatgagaagagtttctcaattcacaaaaaattaaaaactacaaaggaaagagaatagagaagtctgactataatcagacttaaagcttctgtgtcacggggtaacatgaacaaagtgaaaaaacaagccacaatgaaaatatttgcaaccctataaccatcaaaggactaagatctaaattatatacatgtatgtacatgagatcacaggtgctgtcaccggtcctaagaactcactgatgtggcagtacatgagacataagttaaaaatcttccagtattgtgaatttgcccatttttatatgtaattatataaatttctgctgtatatgttttgaggccatgttacatgtatgtctacaggggcagaattgttgtatttttctggtgaatttttttttatcattatataatgacttctcaattatgcattttgagtaaaaatctgatgtaactagaactacattagctttctttttattaatcgttgatgtctttcagtcttttacttcctgcttttctttgtttttatttcaaatgtaacacaaagactgtttttttccctttagcataagtattgtctattataaacctcaaatagctacattttgggttcttttgtataaaatcttttaccagccaagtttagtctatttgcatttatggtaattactcataaatttggattcattcattattattttaatgctttccatttattatgctttttctttgcttatttgtcccaaccctctagtcctgagtttgttaatactgctcttgtattctttattctgtttttctcccttcctctattggtttggaaattacacattctctttcttcctttagtgtaccctttctatcctttagtggtacctatgtattttgacatacatacataaagtctaagttaataatatctgtaccctctttttaatgctttaattgtaacactttagagtactttaatgtagatgtctcctctgtcttacatgtccttattgtacagcattttagctccactttgtttttgtaccccaaatgattatgactactataataactattattactactatttatatagctaaagtttatttagatttatccatgtatttaccatttgctttgcttatcattgctgcttgcactcctgccctctgggttcagtttctttttatcaaaaaacatgatttatcttcatgtaaccctcatgtttaggaatgagagcactgtcatgtgaggtcacagttgcagagctggcagtgttgtctcaccttcaagtctcttgtccttgtgtagagttgctgttcttcctaaaacactgtgtcttccacgtatacaaatgggaatttagtaaatataatacaaatacaaatgggaatttagtaactataaggtgtcatttcacatcagtgggggaaagtaaatgttgctgtaacaagtgatgagctgaacaggggaaaaatacagctggacctcactatattgtgttcaaatcctggctctgaccgtgtttacctgtccaggtctcatgattcttatctgaaaatgaaattgatagtttctgagaagattaaatgagaataatacatgcaaagtgcttaccccagtgaatgagacataagaatcatttactagatggtagttatagatttttttcttgcttattttctcttcttaatctgtacataagtttagtatgattagactatctcaagtctattatgtggctaggacagtcacttaattggcttgactataagcttagcttgaggagcaaaagtataggtgctaaattcatgttgagataatagaataccaagcattacaattaaaaggaatgttgagtgttttktttttttttttttgtaatggactcttgatgtaggttatttgccaagtactgtatgttgaatgtattacagaaaaatgtcaccttggtaccttcttgagagatatcaaagaaagtccaatatccgttcttccccatcactctacagtgtatctagtaataattatttgtcttaatcataaggacaaataatgaaaattatatttcaaatttctaagcttttgtggttaaaaaaagcttctagaaactattgtttctcctcccatgcagttataatatgcttaactttctttaagatgggtgtttggtagtatcatttacaatatatttatttttgttttttaagcatgtttttatatttgtttaaggtggataggcatgtagacctgctagaagttgcccaggaaactgatgggttttcaggaagtgacctaaaagagatgtgtcgagatgctgccctcctctgtgttagagaatatgttaattctacatcagaagaaaggtatgttattttgacttgatttttaayacttgtcaaaatcttttagagcttttaggttagtttcttttattttgctttatattagaaacaccgcttatgaaataaaaggtaaatttggattatcaccccctgcaactttatttattgccatttttccaaagcagaattctgaaaatgaaggagggcagaattgtgggaagggtctagaatgaaggaraaaaaaggtgaatttcttctgatgatccgtggaaatttcacatgtaaatgtgaggggaaatttcccatgtaaattggagatattgaagactagacctcaatttgttaacgaaaatgtatttactgaacaaagaaaccatttatcactgcagcaattttacttggaaccagttccaaagtatagtgaagttgagaatccaatttttttaacagccttatttcagcaaagatactaatgaactggaatagttcagccctggtgaaccatgtcctaaaggaagtttcctaaaatgccacttgcctggaaccagtattatactgcatttcttttcagaatatcagccttctaacaatttctgtgattcttggtgaactccagtgtacttttaggggttgtgttaaaggaattctccaactcttgtccctttgtctcttggtctcccttcctcaccttcctagggatttcactccttgcctgtggtattcatatatttaattgcagtgtgttgccatagcaaacttcagcaaaaaaatgttttgcgagctttgatatagaaaggtctgcatgaaagctactctgtcaactggtagctgtatatgcagtggctctggtctcatcatcgttagtgcaccctcagaatctaccttccaaaggttttattcttttttttgagacggagtttcgctcttttgcccaggctggagtgaagtggtgtgatctcggctcactgcaacctctctccccaggttcaagcgattctcctgtctcagtctcagctgggattataggcgcccatcaccatgcccggctaatttttgtatttttagtagagacgggatttcgacatgttggccaggctggtctcgaactcctgacctcaggtgatccacccgccttggcctcccaaagtgctagggttacaggtgtgagccaccgctactggccaggtttttattcttatatataagattaagaggagaaataaccaaccagttcgtaaattttgcttaggtaaattacactaataatgaaagatctatttttttgctgcctcaaagccctgaaaactgtatttcagtatgaaaagtctggctagttttatatttcctgaatttcatattttataattttatatttcagtatgaaaaatctggatggacttgggttataactttttcctgaatgtttttccctgaatatctgtaaattacaagggagccataatattctggactttgtttctcattgaagtagggaggatttggattagttgatttttactratagtgaagaattttactctcaatttgtaaaaagcaaaacatgcatgtaagtatatacctagaaatgctactttttaattacagttttcatgggaataacgtgattttttaaattggaattatattcccatttcaataaaccatataacattttttaccttatggtaatattgtgtacttatagatgtgaagtctttgtagctattttagcttcctacttcttagcactcagtgcttttaaaaaattccttatgatttctctatgtgtagataattcctggaagcatttacatgaagctgttcattgtggttgtctttggggtcttgaatggtaaagagatttcatttttatacccttttctacagttgaaaacaaaattttttttttaccacatgcatctcttttaaatcttggtaaaatattttagggaggcatattctaaagttatttgagtatttgatggttttgtttgcattttagccatgacgaagatgaaattcggcctgttcaacagcaggacctgcatcgggcaattgaaaagatgaagaaatcaaaggatgcagcatttcagaatgttttaacacatgtttgtttagattaagagtaaagatcatttgtacagttcagtgatctagtttggtgtgtcctcttatcagttagtggaaatagaacggaaagagtgctctttaaacaatgagggagctcagtgtttatggttttatactctgaattctaagttattgagatatagttgttacataggtggtattactgttggtcaaaaatcatgaggaggaacagttgaatccagcctgaacgtgggtgcttgtgtttgaccttttcagccatatattgtacagccttatagaatctaagctggtcttaaagtcataaatgattcattgggtcattagtgagaaacggggatgtggttaggtgctggttcctagacatgtgagtatgcgtttgtgtgtgtgcgtgtatgtatgtgtatattaaatgtatatatccacacattttatattgacattctgtagatatgtttgaatatagaaactttttttaccccaactactgaatccaggagtaccaaataatatatagtaaaactaagatttaaggttgtgtcaaaaaggtacagtgattcagccatttccatttgtcatttgtttcaaccttttttaagttgagtgtttttatttctgcagttattagttggatcctccacatcttgcatatatacatgggctcaattattatgtttgtcaggataatcaaatgaaaatactagttcagtgatcagcattgaatggttgttaggcagccatgtgctcaacactgatttcacctcttgagtataaactttttaaatttaaattggtttacatgaaagtggattaaaaggcctttcaaaagaatgggtttgaaaaacctcagtaccctttaatacatgtacatttctttccttttttcatttaatgtaacatgtctgttgtaactatgtttcttaaatattattttaaggttatgtgttctttaattatggtcaaatataatttggtcaccaaaaatgaaataatagtttaaaacaartagctgttactaagtgtgctaaaaatactcattttataattaattttagttttcttagtatattattataaattgtgccctaagtcaggtacaaatgtacacatcaaaatgcccatattgtatctatctgtagtcgtttaatgtgaattatatgtgaatttttttcaaaattttactaaccagaattctgttataggcacctaaccacgcagcatgaggaaaacggcacaacacaatcttgaggtgccttctgaatcatcagattaaattatgcttcatatgtttttgcttttactgtatttctttaaaaactctaaatctttattcatgtgtyactggattaatttatctgataatgtgtctcacaagaatctgttagatcgtttattcttcagttgtactttgaatggtggggtggaagtttcaggtgaacaatggataacaaaaagcaagttatggaagattgtgaagaggatggaaaaactgaatacaagataccaaaaatgaaaaaaagtgtcccatttttaataactatattctattattttataaatgtgtaataaaggggtccctctttattggttgttctccacttaatctttggtctttttcggtaattttaagttttctgggattttttttggtttataaaacttgtgtttagactttatcttgctatggagttttcacacttctatagcacatatcctagtatctagtcatttctgttttaatatgaatttcagtaatttaattttaatctggtgacatattaatcgaaaataaggagtaatgtatacctccacatgtcctttctttttgtcttctcttaaattcacaatatccagtaggagtggttattcaatttcttcgtggttttaatcatcaaatgaagttagagaagtatactaatcccagcaactatgactcatctaggcatgttaagaccataaagtaattcaggaaactattttcctgatttttaaataacttttagtgttatgtaacatctatccttctgttttagacatgcatttcacatatagttgaattctagattctaagataattcattttgggtaatacttcagagtactggatctagaatcaggcttcctgaatttaaactcaggctccccattaactgtgtgtctgtgagcccagtttctcatctgtaaaatggggcaacagtggcactcatcttaaagggttggataataaaataatgcatgtaaggccctcagcatagtgcctggcacagaattactgctcaaatgttagctgtcgtattaatattgtcacttttgcacactgatgtacatttcctgttgaccaggctcattctttaagcattctccatgcttaaaccagttccataatccctaggcctgtactccagggattgagactgaaaggatcatttatgccatgtttctctaaaagcatcattgctggaagacttttgataagtctgatgtgtctcaagctattctcaggcctttttatgtagagtttagaaatgaagtatttgaatcaatttagtatctcctttactatgtttctccttttaatctcagccaaccccctacctgcaggtaaacccagcattcattaagagctgggttggggtactctattctgtatgcatcataatagcttaacattatttagtagctgtaacttacaggtttaatgctagatgaggatgtctcaagccgtgagtgtgcttgtgtaaaaatggtggcaacatcatctcgttggtaggaattttttacttgaattgttattttgggaaaatgttaacagatttcttctggataaagaaaataaattggatgatgtatattttatgtttctttttagcttctcttaaaatcagaatattgaacagaattctgatatgctgaatatatatagtgcatggctgaaactccagcaccaactgggtgcttcaaatgaagtcatagaataattccatctagagctgacagaaatctttcagagccttcattattaaatttgttatagatttagttatcaaagatagagttctctaatcttttttttaaagctaaagttctctttatttacatgtataggaaaacattctgcctaaatcatgatgttaatgaaaatcatattgaggagaacttgaaccttattaaatatgagcttctaacataattgactaaaatgtgattgtcatatatgacacagatgctgtgtgcagatgatatcaaacctaaaaccacttagcaatgtgagaagaaacagaaaacatcccagttaccctggtgtaaaatttatactatttattaatggccgataagggtctcattactaaaacactgaagtgggattatatttttgtaatcgtctaatatttacagtcataaacctgcatgagaatactttcaaatactagcttttgtgcttttaaaataggtaacagtgaatgttagtattgggtgtgggatgcatcagggacacaggtttgtaaaccatgacaattcagttgtaaaactaaagccaagtgcacctgtagtcccagctgctggggaggatcacttgagcctaggaggtgaaaattgcagtgaactgatattgtgccattgcactccagactgggtgacatagtgagaccctgtctctacaaaaaaaaaaaaaaaaaaccctaaagccaaaacattgaaataagttactgacatgcaaatttggaactgaaactagaacacagtggtgtatatctcactgttctgaaaatacacagtttccagaaattcaaagaatggccaagataactcaaataggggattggctatatccagtaaaacaaaatcacttgcagtcatgtctaagggagatgagggtcatctgttaggccatagtcatagacttacaaagaataccagttaggattctgtttgtagcaaccaactctagctaacctaagcaataaagaatttatttgaaggatataagatcaaacggaagctaaagaaccagactcaggatagaaacttagctcccgaagatttttttaagcagaaattgctcaataatcttgcttttattcatcatggattaaattaactccagctgcttaaaatgcccattcaagatttaaatgcctggacgtgagtgtgcaaacctaggtcagaaatcacccctggcagtcttggagctttgagaggactctacaggaactacttcggcttaaatgatttgaggcaaagcagctgggtttactgattcatcaagactaaatgtgaaaggagaggtaatttattcaaaggaaattgtgggaaagactgttagacaaacaaaatctgacaaatgaccaggtggttacttgaagccctgacattgaaatatgttgggtgttgggtatatactaaatgaagggcaatattataacaagtggacatgctggaagtatgagcaacttacgtatgtagtttgtgtggacgggcctttagggactgctgcttcagatcccataagctccacttccacttgatgaatgctgcttggcttgccccactctgcctagatggatggtgagcaactttgcatggtaagcaaaggctgtcttgtgcaaatgaaatctcttaggcaacagctatcagaagaataggtgactgcctgtggtagtctctgttttagggaggtgtcagagctttatctttctttaggcagataaaggggcttcagagagaaacctctgcttgcatcctctgtttagtaaggtggatagatgtaaatttcctttagaaatggacagcttttcagagctattcctgcctgcagttctcagaataatcaacttgaaatatgccaaagaagtatattctgaggtggcatattgtggcttcccctcattccatcaaacctttagacataagaacaattgactgacctggtgcctacccagtttgctggtttcctgcctataaggaaagttatgttgcagatcagtggtagacctgaaagtcacataatagaaaaaaaggaggataaggagaaaatgaattgctgttcccaagtaatcgagatttgtttcttcttgcagggaagatgattgggaaaatattgtgacctgataaaagtgttgatacatttaataagggtttgccaccatctgactaaatgataacatatgcctttcagagtcttttctgaaaaatatcctgaaacagtttggcatactccttcagcaacactgacatcttcatgtgtttacgtagacatatcccgccactttgccgtactaattggcactaggagccaccaagtaacatggggagaaaaaaggggactacaaatggcagctttgaattggctatttacatcagttgtatttggggtgaggatcagcagcaaaaaaatgcatgaagccttcaggatagaagggaaggagggactcacggaaaaaagctgcaggcctgaaggctgctgaaagttttggtgggaacaggtaaccctttctgcattagaggtacaggggttgctgagagaaaaacccaactgcttccagccctactggtgaaactccttaggggcacttagagaataagatctgtgcctttgaagtaaagggaacaaagtagcttcatctcaaaaaaaaaaaaaaaaacaaaaaacaaacacctgcgatgaagttctgggctaaggaggccgctggacaacccagcaactaccaaaaatgtcattaagtgcttggctgagaccatgtatcttacacatctagagcacaatttagaatatgacaagaataggctgggcatggtggctcacatctgtaatcccagcactttgggaggctgaggcgggcagattgcttgagctcaggagttcaagaccagactagaccacatggcgaaaccccgtctctgccgaaagaaaaaaacaacaaaaattagccaggtgtggtggcgcacacctgtaatcccagctactcttaaaaaaaaattcttctaaaaaaaaaatggatacatgtgcaggacatgcaggtttgtttcataggtatatgtgtgccattgtggtttgctgtacctattgatctgtcctctatgttccctcccctcaccaccccgcaacaggccccggtgtgtgatgttcttctctgtgtgtccatgtgttcttattgttcacctcccacttacgagtgagaatatgcagtgtttggttttctgttcctatgttagttttttgaaggtgatggcttccagcttcatccacgtccctggaaaggacatgatctcattcctttttgtggctgcatagtattccatggtgcatatgtactacattttctttatccagtctatcattgatgggcatttgggttggttccatgtctttgctattgtaaacagtgctgcaataaacgtgtacatgtgtcattatagcagaatgatttatatttctttgggtatgtacccagtaatgaatcccagctactcttgcttgaacccaggaggcagaggttgcagtgagccaagattgcaccactgcaggcaaaaaaaaaaaaaaaagaaaaacaagaaaaaaggcagggtgcagtgagcttgtaatcctagcactttgggaggccgaggcaggtggatcacaaggtcaggagttcaagaacagcctggccaacatggtgaaaccccatctctactaaaaatacaaaaattagccttgcgtgctggtgcatgcctgtaatcccagccactcaggaggctgaggcaggcgaatcacttgaatccaggaggtggaggttgcagtgagccgagatcgtgccacagcgctccagcctgggtgacagagcaagacttcgtctttaaaaaaataaaaaataaaaaagacatgaataagggtaaataatctcagttatgatgttcaagagagttgctgctgtctcactccaattatacaaagtcacaaagcccttaagttgtgtggtcaacccacacccaatggtacaggcagaaaaaactcagccttcactctgataaatttattaaaataagaacaagcatcagttgtacatagaaataatcatttgcactaagcatggtactagagcagaagagcagttttaaatgtattttttaagtcacaaaatatatcggttaaggcactataatcctgtctcatgttttcaataaatatgctgttttttttttttaaaggcagtagtgagtaaccgattacatgagtataggcactatactattaaagacaaactgctgtggccattgtgtgtaacttattctcaaaagaacttttgttagttaagattagtgttttttaagaatgagaatatgaaaattgtcacagttttctctttctaatttaggtctcttccagagagacctatatattaaaaggtgctgtttcttcactttattccttggcaacaatgaattatgcataaagtaaaaacattgcctctcaggaagtaaagccatcagaagatgtctcagaacagcttgaaatctttggaatagctttttttttttttcaactgcaataaaatcagtgcagttcagaaaactcgacctttcagtatccgagaaggcagctttgta

SEQ ID NO: 94814 - DNA, 57061 bp, Homo sapiens
atttaaaaaatctcttgcctgggccaggcatggtggcttacacctgtaatcccaacactttgggaggccgaggcaggcagatcacttgaggtcaggagttcaagaccagcctggccaacatggtgaaaccccatctctattaaaaatacaaaaattagcctggcgtggtggcatacacctgtagtcccagctactctggaggttgaggcaggagaatcacttgaacccaggaggtggaggttgcagtgagctgagatcgtgccactgcactccagcctgggcaagagagtgaaaatccatctcaaaaaaaaaaaaaagaatctcttgccagaagaattgccgttaggtaaatttgatgttagattaaaaaacaaaaaagtcatgtcttcttatcaaaggtatgtgacttttttgtttgattgtgggcacagaaaatgtttttatttgttgtgggcacagaaaatgggctctggctaaattaatgagaaagacaggaaagagtagaggaaaggatatatttggaaagaaaatggggatataaaaagaaacaaaagaaaagaaaaaagccagacttcttaagggaaaggtaaaaaggacagttcagagaaccaaaaggccagcattaattatcattctcttttcttctatcatgcatcaacaccaacaattttctgtctctgtgtcactttcctcaagattcagattcctggggaacagggtccagttgctcacatttggtcactatcctatctggcctagggccgacagaataccttcatttacagtcctagtttggactgtagaagtgggacagtttacatgaaaattcaagaaaccatcacaaaaagaaggaatgatggctcctgaacaaacacacaacagatgtccatttcactcctctaatctattcattttagatgtggaaacggagtccctgagttaaaatgctcttatttacagccgtggaattagtcaatgatgaggctgtaactaaaacatcactttctcatccttcagaagcttctcatttcagtgtttttcctacttcacacatctgcatattcagttatgttaagtttcttccatttagaaaaatgcaataaaatcttacattgtccccttaaagtgtggtggagtgggctgatatctgagaaatatgtaactaatttaaatatatttttatgaccttaaagataaatgtcatgcaaatacccaaagggcaaatagttgccaggaaacagaaaagcagtttgcatttggctatgggcacacaaatccaatatagagaaaaacgacttctttcttacctgagaagtctgacactttaaataatagtgtcaaatgcattttcaggcatattttttccaggttatttgtgctatgaagtactctgtctcgcaaaatgtcagagggctgctttttcagtgggtgccatttttcattcgaatgcactgaaacaggatttccattgaaaatgttcaagttctgtgaggcacattatattgtttttaatgtcactattataatgtagggctgcaactagcatacatgaagcaacattcaatataaaagttttgcacttggcttcaatgtgaatttatgtggtaaagatgggatgaaacatattttttagttttggagtgttctctagtagcctctgtgctgtaaatggtttgaatgtcaactcctctcatggacttccttgactacctttctttttctttttattattattgttattattattttattatactttaagttctggggtacatgtgcagaacatgcagttttattacataggtatacatgtgccatggtggtttgctgcacccatcaacccgtcacctacattagctatttctcctaatgttatcccacccctagcccctcacccccgataggccccggtgtgtgatattcccctccctatgtcgatgtgttctcattgttcaattcccacttatgagtgagaacatgcacagtgtttggttttctgttcttgtgatagtttgctgagaatgatggttttcagcttcatccatgtccctgcaaaggacatgaacttatccttttttatgactgcatagtactccatggtgtaaatgttccacattttctttactgatggacatttgggttggttccaagtctttgctattgtgaatagtgccacaaccaccattcttaagaagtttctcattgtgattacaactgcaccttaattgtttgtttagtagtctatatcacaagatataattatatgtttgtaaagagaggcagtaggtgtagcccttaagatcacatagcctgcagcaacctactgagttcaacagtctcagccctactaattatatctgtggtccttccataaaatcatagtttaccccctgagtctcagttttttaactataaaatgtgataataatgatactaatttcataaggatcttgtgagtacgtgaggtaagatgcaaagtattgttaatgatgcttattccatagtgagcttcatggaggtgttttctattactattactaatttattgtctgtgtctgtcttctcttcacctacattagcctgtgaattctatgaaggcaacaagcatatatactcttttctccagtgggtgtcttgtgagaaatatgcctctcacatagccggggatcaataaatacttgtaggttgaatggatggactgatgaatggatgagtcagttttacatttcaccaagtgctttcacatatatcgtcacaattaagctaccaggcattgttgtcagatagtaccagtactcttctcattttacataatagaaaactaaagcttggagatactaagtgatttgcttatgagcagagttcaaacattacaaatcctgagctcaagttcatgtcttctgactccaaattttattctgttttggttcaaatttttctatttatttattctatctctgagttctgtctactgattttttttataaaatagggaaatcatttgccctgttcacttcattgcattgttttgagtaccaaaagtgaaagtaggtaatatatatcaaactgttaccccaatgtaagacattactatggtgtttagtatttaagggaatctttagcttgattgttttatgaaatgctatatattagaaaaataaaattcaaaagaagagagacagaaggaaggagaatctgacctaatgaaagataaaggatttacaataagtattggctttgaattctgaaacatttcctgatccttgacaatgtgagcaggtcaatctgggcagaccagctagggaggaaaaaaagagtacctttctgatgttttgacaatttgttgaattgttgatgtatggtcagcatacatctctgatattttatcacataccttcaggtttttttgctattgaaattaggtgggtataggtttagtcttatatttcacctcttctcaaataaaaacactgagtttccaggatgataacatctctcttaagtttaatatgttctagcttattttttacctcaccaaaaattgtaaattttcttgaggtaccaagaaggttgaaaaaagaaagggctccagtacccaccccctccacaagacaaagtaacattggtagtaatgaaaagtataactactgattaatgtaatagttaaacagaatcaacaagcacttaatgaacatatactatgtgaaaaactatgctatacggttatataagcatcacttaattttattgttccatttatttcttcactatgtactgacaacctactctttgccaggcacacttgtagttaccagaaaacataataatgaaaatgtgcttgactttacagagttcactagtgggtgaggcagacaagataaaaaaggacacagaaatacttgatatactatcaaatggtgacaaattctatgaaggaaaataaaatagtataaaagaataaagagtaacagaggtctgagattatgaatctactcggtgcatcaaacacaacttccctgaggagttaaaatttgtgcagagatatgaattaaatgaggggttaagccatgcaattttggcggaacagagttcttggacaaaggaacagtaagtacaaagctcctgaggcagtgaaaggctaggctggaacggccagaccattgaggtgcaaagtgatgtgaatgaggtcctagaaccaggcaaggtggccaggcagggctttaaggaagagacgggaagtttggactttccattgaagtggaagagagctcttggagggtttgggtaggggaataaaacaattgggtttactttccaaaggacctttctggctgctgcgtagggaatggtttgtaggttgtgggaatggcaaatgcaaaagctggtagaacagttagaaggccgttaggttattccagtctaggcaagagatggcggtcgctgtgtgtggtggggggtgagggcaagcactgagtttaggaagaagatgtagttctcttctgattacttctattttctaagtgaaataagagttaatgtcatgaactgagaatgaggagatttgagaagtgagaagttgtgaatgggaaaatggctggacagaaaaaattatagaatcgtgggggcaactccaggacctacttggagtttgtggtcatgagttggatgtgagacagcatcatgcggttgtgtgtttttctccagccactttcagttgctctggtaagggcagagaattgggttcaactaagccgggatattatcaggtgagtatggcaaattgggaggcggaaacaagcaattatattgctagactttggaacccaagcctggcagaggaaagtgggggcaagaggtggtgttggcagtgaaatgagtatattattagataggatggtcccatactgccaaagacctattggaggagcaactaaaaaagggaaatggataaatgagttgggaattggccatcacatgcttgaaatggagacttggagatattggaaatggcctgggacatgtgatcacaaaattaggtcatctttattagtataatatcatgtctcgtgtttgctgggtctttctctcttctatatcaacttgatacttctggttgccaaagtaatcacaaaattgagactagccatgtatactgccaacaagatgaaggactttagattattaatatctgaagacatacttctttttactgttatgattgcaatactgacactgttctgggggtgtgacagtgagattagaacatacagtagcctctgggctcaatgaggatgcccattacctgtgcattcacacatctgcctctctggatgcaaggaacccacatcattcccacacaaccggtagtgtttgttagtgggtgcttcgatatggaagggagataaggagtctcctaggcagagaatcccccgtaggagctgtcattcctgggtagcaacaagctgtcagttaatgcctacctcagcctacttttcagtatgggatccaagatctcatttcgtggaggtaggggttggttttcttgctatgggtcagcgcgctggagcagggcttctgatccttagcattctttaatagcattcctagagtgacctaggaggctccccaggaggagactaggtggcttagctcctcagcctaactactgcagaaaccaggagtgcgtcctccttttcggattcttgacgtcaagctccgacagccttggagcgtcgcaagggcggtagagagctgagggagggtgacagggaggggaagccattgcagcaacagcttggaggagggagctggacgtcgtctctcgccagaaaaacggggagcaggagccagactaggggaggaagaggactggcccgctcagggaatagctgggttgctgcaaaaaggggcggggagaaggcgggggcgctgcatgcagcgcgctggctccagcggtggccgcggggaatgtgacatcagcggcgccgggcgcttggggctggaggaggcagctcgcctcagctgcgytgtgcacacctcgcccgggggaggacgcagacccgggcaggcggcagggatgtcggcgaaggagaggccaaagggcaaagtgatcaaggacagcgtcaccctcctgccctgcttttatttcgtcgaggtgagttggcccagtgccttggcataatgcagatcctctgggcatctcctgagcgaattcaggtcctggacagtgttggaggcgcagagatcctgccgggcgcgcgcggctgtccccaaatgcccgaccctcccctcttcccctagatttcacagcagctccccgaatgtgcctgtgaatacctgtcagcccggggtgattaccattagaggtgtcgctgctgggtggcctgcagggaacggatacctgtgtgagtgagtgtggttttagttccttggccctcctgtagtgcctgtgtgcacaacgtccgctagtgccccagaggggccatgatgcccatatttcgggatttgtgtcttcaacctgccgagtacgtgtcgggaactccgtgtgcacacagctatgcctagggcatatgagggttgaaggtgtttacatagtacaaatattgttaattgcttttattgctcctgcccccccccccaaatccttctcctattatattattttggtgctcacatacgcttctgaaattggatctgcatctctaaacatcaatcatcaatgtactggcctctttccacagtaaaaaatacatattatatatgtgtgtatacataactatatataatattttaaatctatgacatcatctgattttacatgatttgtatctgagtatttactgtgctgagcagtattatagataaacaattaaatgcagatgtatccgtaatgaccctctaacttaccaaaatgcagtatttgagggagaaacaattcataggagtgttataaagattggcagatacagtgattccgtgtactgtgctccattgcattaggaagacatttttaagcaagaggtttattaaattacagatactgaagggttgtattgcatagatttagggaaatcagatggttttaggcacaaaactatattctgtttagttagagtctgggttgcatagagaattataagactgttgctgaatcataaatatccttctctggccatcttttcagccaaatatggaggtttagcccttcgaagtgcaaacagtagattctgtattcaatgattgtaaggcttatctgtcctgaggaatagtcactgccttgaaacttgggagaagagacattgtcggactgttcttataggtaacaatatatttggaagttttgtagaagtgtcatagatttttgaaataatttcagtttcaagaaagatgtatgtgacttgcataactttcagagaaatgatgggtgacccctgcattcatgaaccatagaaaagaagaaaaaaaaatctatgtatttaaaataatgaatccatttattatcctttctcttttcacaagagatttttgggaacatggtttaggtaatttttgttgaaagataataaagagctttctcaagaaaaatgtaggtagcagaagattccatgatgaaaatggtgaaggaatagaaagatgagatacctgccttcaagttcaatccatcagaccacttgtcgcatggctaatccgtgtagttttgtattatagtgatttcatttgtgtctgaatcaatgacatttgtctaggagaaatcagttaatggctgagttccatctccaggaaggaacacacctgaggtcagctagaagctgactacatgtgggttgcagctatatggcttcaaggaaaatgccctcatgaaagaggaggcaaaccagagaattaaggatgtgcctttacagaatgtacgtgggcgcttttgaggcatctttaaccggagtacatgtcccttaagcaagaattttaaaagtacaagtgcctcataatgcaattgaattgtgtgtttaggaacagacatctcacaattgttacttcttttccatgagtggaaatagcccagattcattacttttactttggcctattcagataccctctatgaattccttagcagggcaagctgtagaayaattacttgaacacaattcatggagtttaaatgagcattgatgacactgtatcttggggttaacagacttcaaagacagagccacacaattggattgcaaattatcttcctaaaaattaaatgcatgatgaaccactaaagagcctccagaaaatgggagactgcattagtataaaaattatttaagggtttgaccacatgcactatcacgctcctttgaaatgactcattttgaagctggtgagaatgcactaaatttacatctccttcgtaggatgaataaacatagctggaatttgcatgttagtaaaatgctctagagtaatgacactttgctttacagcatagtttcccaagaccttagaaattaagatggaaaagtgaaacatgagtgaatctccttccatcacatatcagtctaaagcatatatttttagccttctctgttactcaaaccataatttaagtaacaagaagaggctaacaaaacagatctcaggagaaaacagtccctggttctcaagtcagtgacaccatgagcaacttacactttgccttttttcaaggagtttagaagttttaaattactaattcatgataggtatgagatgtgaagaaactttaattgggaaaatgagggaagggaaacttacactcgagccagagggggctgaaatcaagatggactgagttgtgtcaggaaaatggcagcatgctctaggaaaatcctgggccttgcagacagattgacttggttcaaacaccgcctttgccagatactacatgaataattctggccaagttacttctctcatccttagtttcttcacatataatagaatttacataatataaatataaatacacctgtattcatacataagagaaattattatacctacatcttagaatattgaatatattatgaggttaaaggatcatgactgagatatggtaggcaatcaagatatgttagttcctttcctttcttataactgttcttgacctgaaataaattattttacttatagtttggacttaagggatcaagtcctgacaaggtctagcttaagagttcccattgttgagaagaagtcatcttctccccaatttctagaaatagtttgggctccacaggcttcttgaaatggacttgtattaattgacacaaatggggagagtgaagtactatttacagtttgtacaagaataatgacaaccatttataaagtacttagtatgtactaacaataaagctaaatgctttacatccaccatgttgttcaatcttcaaagtttctctttaagaaagaggccattattatctgtgttttgaagaagaaactgaaactcataaaagttaaacaacttgcccaattttataaagcaaagttagaggcagggctgggtattaactcaaaggtcacgctcttcaccactgcaataacaatctctctcaacttgttgaaagaacattcacataggcaaagttactttctattgtttctcactggtaaaaaaggaagatgtagtaaggcaagggcacactgacaaacagggtgatacagttttctctggcaacagatcagcttcctcagctcagttcctcctccactgggagtgtccaagcacaaagagttggaggacagtgcatactccccacattggctcatcagttagtggctagtgcccctcaacaagaactctggatagatgcaaggaaggagtaaagatgttggcagcccatttgcagagtgtcaakgtatctctaattataccccaatgggcattaggctgaggtgttggtgttcagccactaaaaccaagtaatcttgtccttgttcaccacgatacctgatgttaaagcacacattagttgaagggatagaatttagggatagaattatttttttcttacatttttggtttatgctgctgcttgctaatgaaatggcttatggttgacagtaatattagatggtgacttgaaaaatacgatgatttttagttttgcacctcattttatgagcaagtttcttaactcagttttacactgtacagcctgggaaaacaaaggtcaagttgtgaaaagaactctcagacaagcatacccacaccttattaggataaagagaaaagcaggtaaaaagcaatgttccactagagaaaaggtttatcatgcccttaaagttcccaagtacactgcaagtgatggctgtatcacttacagtggcaattgcagccagcagtatacctagagttaacaaaagagtattcaaactttttgtttattattatactttaagttctggggtacatgtgcagaacatgcagttttgttacataggtatacacgtgccatggtggtttgctgcacccatcaacctgccacctatattaggtatttctcctaatactatccatcccctagccccccaacccccacaggccctggtgtgtgatgttcccctccctgtgtccatgtgttctcattgttcagctcccacttatgagtgagaacatctggtgtttggttttctgttcttgtgttagtttgctgagaatgatggtttccagcttcatccatatccctgcaaaggacatgaagtcatccttttttatggctgcatagtattccatggtgaatgtgtgccacattttctttatccagaatatcactgatgggcatttaggttggttccaagtctttgctactgtgaacagtgttgcaataaacatatgtgtatatgtgtctttatagtagaatgatttataattatttgggcatagcccaatattatatgtgataaggctggttgtctggggctagtgcacttcctttatgcaaagaattacagtggtccctctggggctcaggctcacaattttattctcattagtcatcctgctcaaagatcaattcactatataatgtaaacaaatgacaaattacctttttaagcctaaaaaaatataaattcctaacatgaaataaatgggaaagggattctttttacttaaacattctgctatatgatataacatttttatgacaaacctgatgctaattttatgaaggcagaagagttatgcttgacctatatgcaaatatattttgacagggctacagatagagaaaagagtttgaaattgcctgttattcatacgagaaaacacacaaagacacatatgtatgcacacacttctgtgcataggtatgtacaaatacacatggagtaagaatatcatctctctctccactcagcataaaattacagtatctgaagcattccaattcagaatattttaatctcaaaaaattaagattactcagaaagttttcattccttttgtgtgtgtgtgtgtgtgtgtgtgtgtgtgtgtgtgtgtgtgtgtgtggcagggtcttgctctgtcacccaggctggattgcagtggcatgatcacagctcactgcaacctctgcctcccaggttcaaatgattctcccacttcagcctcctgagtacgtgggactacaggcatgcaccaccacacccagctagtatttataatttttagtagagacaggatttcaccatgttgcccaagctggtctcgaactcctgggctcragcaatcctcccgcctcagcctcccaaagtgctgggatcacaggcatgagccactgcacctggcctactcagaaagttttcattactttgaatgtgtacttagcagtagatacgttgcaggattttgttaatggagcttaattactataaggtcagtaactaaacagtttgttcagaagaagaagccattgctgctactctgttgccatcctacctggggaagttcaacaagcctttgagcaaagacacacattttgaaattgtggcttcttgacaaaaccttaatacaatttttattttctttccattggaaagtgtccacaggtttttaattgtagcaaacattaattcacaagatttctcttctatctcatgatctatgtacaaattatataactcatttgattttcttgctgagaaatattgctagtctattcccttttacataaactttagcatcagtaggaaatacaaaatcacatttctgcattgcatataccaaaatagtagctgtagatttttttctcttctctagattgtatagaagtagagtctgcttaaagaagtacttcaaaccctgccaaatgagatgagttggcaagtctcttctctttcaaagtcacaatgcataaagtctgatgcaaaataaagtaaatagagaacagagtcctaagttttagagatagagttaaatgaggacatttctacaaatctaagcatcgaacatagcacttgctattagggaattattttctattcctaaacaccaccactatcttactgtttcttcatggccaagttactcaaaatgtgatttttttctacttttctctatcaggaaataaaaaatacttggtttctgccaatttcaaggagattttaataatgatgataataatcatagtaataacaaagaatagttcatttcaagtcttctttatatggcagactctctagatacattacttttagtcctgagaactaccctactgagaaggcattgttatctttattttttgaatcagaaattgtagctcagagagctactgtttttaccagggacacatagcaatgaagtgagggagtcaggatttcagagcttgtccatcttgctcttgcattatgactacaccatactgtctcacacatgcttccaacaacaatgctaaacctagtgatgaagtgcaatggagagccctgtctgtgctgtgacttggctagcttcatggyatctggatgcatgcatttgaaacatgtctgtttgtggctctgtcagagttctggaacagagtttttctctacattcagctactaaacttggctgtattagtggtatttcctacttaatagtaactggtttaatttttgacatgtctagaaggcacagtgtcccctaaaaagaagcgtcctctgggcaagcacaaatggcacccatgagtctctgatgaagattaatgaggatcagtgggtgggggtgagagggaagacttggaacttaaatagagtttaggagagtagaatatgtaggtgtgtccaaatgatagaaagaaagaaactcaacaaggtaatagaaacagagagaggtcaagtcaagcaggattagaagaaaaagcattagaaaattgaaggtaggagtgaagtgtgtgtgtgtgtgtgtgtgtgtgtgtgtgtgtgtgtgtgtgwwatggagatccaatctgtgagcaaaccatggagacccctttaaacattttggttttctaagctggcttattaaataaagattatttgagacacaattattgctgtttatgttggaaatgtattacaaatattactcaaagcaaacacattttctctcagcatatgtatacagcataggctatttctcaagcaacttttgtatttaaaaggtgaggaaatgtctcacagagtttaaaagtcttattacagagataaggctaataaaattatgcgatccaagaacatatggcctcactgtttcttctaccacctaagaaaattttgctttgaaaaggttaactgagttaacctttggacacatcaagtatgccagcgttacctaaggacacactggttaatatcagatcaggaatagaacctaggtctcctgactcctgttctagtgctctttcctaattattactatttctagaattccttttattagaaagtttccctctggattataacatttaaaatacaggtcattctaattctacatgtgaacaaattgcgctggctgtttgtgctaacttccaaacacatttcatgaccaccttacattaaacaagtcaaagcaattatgaatggatcttccactgttccaaattgttaggctctttgaaaagcacggtaatagctaaagattagaaaattaggagggatttttctcattgcctaagtgcccacctgtaatttcacaattaactcccttgacatgaggtctctaacagagagtacagggaagtataaacatgggaagcagtaagaatataatttatgtcatcagttatggaatagctttgaattttcccttatacttcaatgtaaatttttcatacattatctcatctgatcctctaaatgcaactgagaagtaaatataaactctattttaaaacttaagtaacgaagactcagggaagtccaaaaacttgcctaaaactcaagtagtgctatttttcatcttggtcagaagaaaaaaaaaggtgatatttaaactgtgaaatgtctaattatgagcatcatggtagccttttatggtatgaattagctgagaaatgtatttacagataactatcgaatggagtaatcttttcatggtcaagtggattttgtaatatggatgccaaggatagaaatactaattttggcagaactaacattgaggtgtttttcttaccaataattagactgaaccaattgcacttaggtccataactatctggttggctgtcaagcaacatagaggaggwtaatggctttcttatttgctgtaacaagatggtttctgcctgtgtaaaactggtatttagatcacttaagaataaattaaagaaaaggggaaagacragtaattaaaatcaatgtatttgtgggaaaaggtaaacatggaatcatacatttaacagaagaatgatgtttgggagtgagagcaatggaagtagatgtgactatatcgttaacaatttaatgctcttaccaaaagtctgcgctatgggtttgcttagagrtaaactgccatttaatgaaatcctaggcatgcttcagaaattaagtcctcatggatrgagtccaaaagagactgatcttttattaaatgttcttcaataaggaatgctaaaatgaaattccagggtataacctgttttgtactcttacaacaatttatttatgtgttgaataaatatcaattgcttatgatgtgacttttggtaaaagtaatagaaacaaaatggaatcatcactggcatactttccggtctatagtagaatttcaataaattttaactggatgtaataaaataggactaatcatatgaacataaatttttctttaactgtcttttatcagctggtggagacatttttatttgtaaagtgatcataaattgcctatcagagatattgctcggccttgtggattattgaacagttgaagattagatcaatatccaaggtctatatgagtcctcatctcttaattgtacttacgttcattttataatctaggacttacctatggattgtttgagatttgaaatttcaaataaaggcatcactgaagcaaagaactttgcaattttaattttcatagaaagttattttagttacataaggtgcatataccagcaaacaattttctgtgcctatggtaaaacaaactattagatatattttttttttacttttttaaaagaatatagttttcttttttacttgatctaccaattagctttagaatcttgggcagttaacttattttctctaagcctcatttttctcatttgaaaatgatggaactattgtggtcaggttagagtaattatgaccctttaatcatatgcaaattataaaatatggccaagaattctaaagcaaagacaggcctagtaaatgaattttctctgtcccatttaccaacaccccctctcccatcttgtctaaagtaaactttgtggtagctttagatgctacctgattccctggaaaggggctggttctcctgattgttttttattggtatcacacatttatgtatgttttatacagtgtgcatacaatggtggagcagtttattacaatgtataatacaacaacaacaaatatttactggaattcctgctcatttttatagatagagggacatatgcacacactcacaaaatagagaccactttttttcagtacccttaccttgacctagtcagtggaggggaattctcatttactgtgtgtcttctatacacagtgcccaggtaacactctactgaaagtctctactccaaggttgttggtaggcccataatctgtaagccactgccattcttatctttccagagttctaaaatatcatatataaactcgtcagcagcagtgtctgttcaatgcaaattaaatatcttcccatgcctcaactgagccatctgtgaaataaagaatattatgctttctaaaaatgatgaataaattagatttagtctttgggaatgagtcatctcatttaggctattgtatgattcattggaatctttttttttaaggcagttggatacaccctgaagaattaacaggttacttatcccttgggtgatgatctgaaaatgcctgtattgtagcaactgagatttgagttattaaaacatgaagaacatccaactgtgaagatttggacataaataatgtcttcttcatggcaaaacctgataaaaaggatggtcagcaatctgttataaacaatatactatagggagatgaatttttgaaaactcttctsctttaagacctcatttggtttctagcttccagttgaattttatgtacatgaagaaaaattatttgatggtgttacatctttcaatatttcagtctcagactaatggttattccatagataatattggttctggtaatttttagacggttggcccaggacataattaaggaaaaattctttttattatttatttttaaactccagcctgtagaacaatgcaaatagctgagagcagacagtctctcaataaatctgtgatggattcgtcgttgcgtaggtcaataaatctagcagcttaattaatgaatatagggagacagagcctggactgaacctcagctttggctttggccttggccacattattctttggctgaccttaaaggctagtggttctttcagtcctgttcagaaatagaggaagagattgctaagacttcactgctcaaatgtatgttccaacatgactgacaagggccaagtgtagcacatcctagaaaatgcctactttatgggactacaaaaaactttaagaactgctcattccaaatcccccagcccaccaaactcaggaggctgtttcttcctccaccactacccttcaccttcctaagattccagaggtcaatgcagcacagtagggagagggagaggggtatgaggtacctcatatgagatgaccctaagaatcacaaggactgacgttttccagtaaaacacataacacaatcctacttactttaattaacttaatcacagcattaaaatgttagaaaataaaatagaagttattaatgtcccacattaagtgctcaacttcaatatctcttttacatacaccaagccttttcaaaaatgaaacttaaataactaaggccttcagcagcattggaaacttaactttgaagaagggctcataatgggcatctaagtgtgcatctaagtgtgtataaagatgtgtatgtaggagacaagcttagagggaagagaagcttgtgatatgctagagcgttctaatctctgaaattagatgagaaattccttttctggataattaataggtcaaataaaatgtatcaggcacatggaaaatactaaaaagtatttgttaagcattgaatgtaatagaaaatatgaactttcataatatttaagtaaaatggtttaataataaaattgatactttattttaataaacatcatgaaaacataattaatttagaaacactgatggtctttaattcagtcattcctgtgtatataatgttaagattatatgtcaatttaaatctcaaaatcagaaatttgcttctcttatgctataactcaaatacaaggggacttctaaaagttcatggaaaaaatggaattaaaagataaacacaaaaaatataaactttatttctcaagataagctctatcaagttcaagatagtttagtaagcaatgataaaaaccattagtccattcctaaagtactgatgctaatgggaatttaaccatatcattgcaatcttttttacattatcagctaaagaaaaatgggtgcctttgraagatttcttaagaatagaaaacaagaagaagttagaacaagccaaattaggactgtgaaatggatgcctaatgatttctcattgacactctcacaaaattgcccatgtttggtgagagggatgagcattgttatgatggagaaggattctctagcaaagctttcttgggcttttttctgctaaagctttggctaactttctcaaaacactctcataataagcagatattactgttctttggccctccagaaagtgaacaagcaaaatgccttgagcatcccaaaacgatgttgtcatgaactttgctcttaaccagtccacttttgctttgccaggaccactttcccatcttggtagccattgttttgattgtgctttgttttcaggatcatactgataaaaccatgtttcatcacttgttacagttctttgaggaaatgcttcaggactttgatcctacttgtttatttttgtccattgaaagctctactcttgtctgcagccaatctggccacagttgctttggcaccaattgaatggaaagtttgctaaactttaatgtttcagtcagaattgtgtaagctgaaccaagtgagaggtctatgttkttggctattgtttgtgttgttaatagtcagtcctcttcaattagggtatggacaagacaaatgttttccttgcaaattgatgtggatggtctgatgttgtgggctttatcttcaacatcatcttttcccttcttaaaatgaattatccatttgtaaactgctgatttcttgtatttataaactttctgcaaattatcaatgattttgccattcttctactaaagcttcatcataaattcaatgcatgttcttgcttcaattttagcagaactcatgytgctctgacaggggttcttttcaaactgatatcttatccttctcggtgcttcaaactagatctttttcagatatgttatgagtgagtatgagcttattttggtgcaaaaaattgaaatccattcacagttttttsataatatacatgttccatgacttttgaagatcgctcatgtagaagttttagttatgtcacatttgcctgacattattacaaggtgaacatctgtgtgctttctatgtgtgaataaaacaatcccactaatagtgaaaacactaatctaagtatattaagatcttacctttttagaggatatgaagaatatatacaatatcacacactatagaaattgtagggtagcattaactatctataaaaagaaatattctcttttttattttgttatttctcaatgtctttggaaacccattgatccattgtataagcttctaggaagaggtagaatacagtaattctgtacaataatcacaaacatgaattgggaagccagatttcttgagtttgtaatccagctaacaagctgtataaccttatacaaatcatggaatcttactgtataacctcatacaaatcatgtaatctcatgtaatctcagtttcctcatctgtaagatggcagtaataatagtatcytcatcaaaaaggtgttgtgaagattgcatgaattcaaacatataaagtactttaaatggtacctgtcaaacattagtagcattaaattactattattacccaaatttttaaatgtcagctgtatgttgtaagggaagagaaattacagctggaagaaaggatttaaaagcaattacttttaataattgaaatacagattctcagcctcaggtcttagtctctaacggtttaaagaataaaatgctttccaagacaatgcacattcttcagtgtctaattatgtaagaagaacaaattttcactacctgaggttaagtctggtgagtgcaaaaccaactaccccaagcctagtgctagatcaatattcaggtaataaaacaaccayttatcattatttttgactttactgttacatcagtgtgattgcaytggtccttttagagctgtaaagatgtagtttcatattcaggtataaaaacatagaacagatttttttcccattcaacctaatacatctattaggtgaggtagctcttctctattaattatcattgctatggaggatccaatttaagtttcttgatttgttaatgctaatgaaatcattagagttctagaaattcaaaatagaaagcattttcttgtggtagaataaatgaagatctttttaaatggtggatattttcttaacaatactgcaagaatgtctcaacatttggtatctctcttcaaattgtccatgtatgtattagtttactgtatattggggacacctagtatgtcagggataaagagatggataagactatttctctgctctcaaggatcttgtcgctgaataagagagaatgtaaaggaacaactgccatcccatatgacaattgctatgatctagacattcatcaggatatctctgtatggtcagagaaagtgatccgaaggaagcactaaaagcaggaaaacatgtggaaccttaagtttgcctaatttctgatactttatattagaaatcattcactagggaagacaaaagtgaaaataaaagcagaccatatccaaaatataattaaatgctcttaagatattcccaaaaccaaaataatacaaataacttcaaagaaactgcacaaggaataacgttcaggacctgagggcaccacatcagtgagagtgtgatttgaaagtgcctgccacccctttcctgttgtwgccgttgaaaccccttgacacatggccatctctcgccttgtgtcctttaaactggcaatctcattgaagcctggggctgtcctttcctgaaaagcaccagactagtgccagatggtgacatgtggcagaatgacagcaggatacacggcggtgcatgcttccaggaatttagcagaccaggtttcaattactggcctttgaagccaggcatgctattttacttatctggggcatggtccttatcttaaatttatcttagggatcccaaggaggttaagaattaaagtagataattaggatgaaatgtctaaataaaaactcagtaaatgtcctttgctttttaggtctaagtacatacctaataaattctactgaaactgagaggagctctagaaaagacagatctcagattggaacaaacaaagcaattttcatgtttgggtgataaagaataagtgagtagagaatgtgtttaagagtaataagaattaagagaaacagagtggcgtttttcaaactgcacctttcccctaggaccccctctccccacatgggcaccccacatgcagttatcttagcggtgtggaggaggaaagccagttgagttccatgagcaaagaattttgagcatgtttcccaacttagacacctgggtaggagtctgggtgttcccaatttgggggctttgtggctgttgcacaatttatataacctatttctgcctcagttttctcatttgtaatctggggatactaatagatactttatacagtgtagattgaatatagcgatcttttaaacttaactagtatctggcacctaagtcctcaacacatgctgtgtacttttcagaaattgcctatgttttttgttcctttaatcataatttcttgatttctttcaattaaattcagtgaacatttattggacacctaaaacattaaaagcactgggtgaattgcaaaggtttcactcttgagtacttgatcttagggcaagggttggtaatatgtaaataactataatcaaaggcagactaacagatccttcgataaagttatatatgaagtatgtgagacggagtcttcaattctgagtggagagcctggagaaggtttcagggagaaaaaaattacatgatctcaacctgaaagaataagtacaatttttatgagaaataaatgtggaaccataatgtgaagcagagactagaacatgtctttttgaaatataaatataatgggaacatgkgctgtctttctggtttaggagagtggagagtaggtggaaagcaaaatcaaccaagacaggcagatcaaggccatattttaaaaagtcataaatatcattctaaaaaatttgcactttattttgttattaatggggcaccattaaatgcatgatgaggtgtgaattctaggaaaattagtttggaaacattgtggaggatgaaacaaattatgaagagaatagagatttttttaaaggccctaatgctttatataaggcagtgacagtgtgaaagaaatgagagaaatgattcttaattcatgacagtatatgaagcatttcagtattagatggcaatgtaaaaaaacccctcatttcactgataacaaatgaagcccagaaaggttaagtgactttcccaaatcccaaaagctggcagaataaatgaggggagaaactggattctcctgcttctgaggccagcactggtttccctcaatcacactgccctgtttcaatttgtatctattcatgtcatacaagccacatctgttttatgtataaaaaccagtttagatttctagaccttaagtaatgttgcagactcattctgaccaattatttcccttaatgacacttcaagtgttagtctgtgtttataatctatatttttgaagttctttgcagccaatctgaatatgctatacttagagtgaggatagttttatataccataaagcctaatattatgttattattattatcaatatttgaagaaaatattaatctgtattagctacaaggcaaaaaatactacaggataccactaaagatcatactgtaggaagtagaaaattccctcaccacgtgtgtgttgacctgtgacaatcttcttcatggctacaggctttaatacaattgctttgatctgctagtatttttcccagttttaattgaatttcaatgtattctgttattgtttcaaatttcacattatatatgattttgggatatttataaagttggttccaagcctctcattttaaatgtgttattaatattaaaatcttccttaatctcttagaatagctcttgcatatgtttggcatgaatatacacaactattttctttgacttcttgtgacattacttatatcaaaactaaaataatttaaccttgaaatctcttatgatagtgttgttccccaaaagtgaggattttgctgcttaaatcatcttgtaccaataattttcagctttatgcctccagccttggactctcctgttagctccaaattgacctcttactttagtaactaagagatgtaacagttttaatattttcaaaacagaatcttctattctttccatccaaacttctccctatcccaaggaatgacactactggcctaattcctcaaaccccatctttgaaatcaacctttattgttttatcttcttcattgatcaagccataaacaaggtttgtcatatctatgtccaaaaccatatcaacaatctgccgatttctttgtatctccagtactaaactctagtacatgctgtctcatctctcctggatttccgccattgccatgcatccactagaatgtaaactctgtgaatgcatggagttttctctgtttggtttactgctacattccttacacttagagaagtacccgatgcctactaggtatttaataaatatttgttgagttttgaacagccttctaaatttttaccctattcctacttttgacccaccatgatcatcctcaatctaacagccagtgatctttgtaaaatacatttcaaatcatactacacctctgcttgaactctccagaatgtttctgatcctactttaaataaaattctaacttcctccttggacgtcrggtctctgcaacgtctggtcccaaatctacctctctgacttcattttgtatcacttcctccktttgattatggtytttacctggttttcatatggctagttctttcttgcccattcaagtctctgcttaaatggcacctactcaaataggtcttcctagatctaaaatgggaattcaggcacttaattacacagccctcttctttatagtatgtgttctttctgatatatatatctttctgatatatatttaatatatattatatattatatrtgtgcaatatatagttaatatataatatatattatatatatgaaatatatattgtttacctggcttcctcaactagaatgaaatattcatgggaacagatattttgttttatcataactgtattcccaggacctagaacgaggcttgggactagcaggctatcaaagatatttgttgaatgaataaatggatgaggcaccaataccatgcatataaattggccctttgtgactatggtttccaccagttcaaaaggatgttataggactctgaattcacaatggctatgagagaggcaaagaatggaactgatctgtattgccctaggctcagagcaaagtgaactctccccagtgaaaagtagtttgtctttattataatcaggctaaaaacaagtaagctgtctgatctagataaaatatcatgatagttttgataaaatgtttcactaaaatggatatataatctagatttgtctttttaaagttggcatcagaaaaatcaatgttatctagcaaatgtggtattttaaaacacctttcttttgtttgccctgttctctaaaacagttataatttttcttctggttcctcagcagatggtaattataagaatcagtcttttccttttgaaaataaaccgctttcctaatcctcaggtaatttccctccgctctattgctgcataaaaatagctcggtttggctgggcgcggtggctcacgcctgtaatcccagcacttcgagaggccaaggcgggcggatcaccgaggtcaggagatcaagaccatcctggctaacacggtgaaaccgcgtctctactaaaaatacaaaaaaattagccgggtgtggtggcacgctcctgtagtcccagctactcaggagactgaggcaggagaatcgcttgaactcgggaggtggaggttgtagggggccgaaatggcacccctgcactccagcttgggcgacagagcgagactctgtctcagaaaacaaaaaaacaaaacaaaaaaagcttggttcacacttttttgggggctgtatcatgactagagaataaaatttgtagttcttggctatgtagacttttaaaaaatctctttaaatctcattttcaaaatctcattttaaatgcaatcgaaacaagtctgtgtaattttattatgtgcatatcaattctatatgtatgccgaaaccggcacataccgtctgttaaattccttacactcaaaaaaaatctgttgttgagcatttcaaaagataaaaaggtaactctgaagacaattatgttagaaataaacattgtcatttaattcattacattgggtagtaaactacagtatgggaacaccatgtataaaattatttatttccaaaatataatgaatataatgaagattttatacaaataactattacaaacaaaatgatgtaaggagcagagtaaatatgctttttaaaaaataagataaataaacatcaaaaagaaaaaaaggttctttttagtagagatggggtttcaccatgatggtctggctggtctcaaactcctgaccttgtgatccgcctctctcccaaagtgctgggattacaggtgtgagccactgcgcccagagaaaaaaagattcttattaggaaaacaaatgaaggttttaaaacatgcttctatagaaatatagaagatattaatatatatatggaaaattatataattagaaaaatgatataattggaaaaattgtcagtttcaggaaggctactggctgaaaagactaatgcataatattaatgacaaattactttaattcatatgttaatgtggcatatatgtatatatagagatacatgcgtatatatttggaagtcactataacgtgtatcagtggcaacatagaaatcagtacgattaggcccctgccttaaggagattttagtttgggaagcaaagcaaaagactaaacctagtttatagcagataaaaaagagcagtgggtaaatatttcctaaaaagaagtactaggggattaaaactgaagaaattactctcaaaaggtattatcaagtaaagcttcatgagaaaggtgatgtttagtgaatatattattgttactggttataacaataacaacaatacttaataatatttataaactatttattccagatattgttgactgtggaactagaattcatggattcaaaatccacckctgtcacttacgatatgtaactgcttatccacctgcaaaatgaggatactgatagcaactatcttatgtcacaatagaaagttttaggttaaatgagtttaaaatatgtcaaattaattaaaatttctaaaacataatattggcacgtagtaagcactttatgaagtatttgttaaattaatacttaaatatatttatatggatttaagtggaaatttcaataatgtgcatgcaccacgaagcgctgatttattggtcaagactgaaagctactattcgtgcactataggagagggaagtagtgaggcaaaatgatcagatatttgaagtgatcgaataatagccgataagaaaaactaaatgtttttgatatactttttgttctctgcaaagcatccatctgaaaaacagaaagattatgcaagtttactcactatgtatttcttttttttccrgtaaacctaattatttcctaactacaaaaaaaaagacctcttgggaatagaagacataatgctgtcttctaaaaataaaaattaaaaaactgttttttcaaaccaaacaatcagaaatcatgggtagctaatattgtctttatcaaaaacatttcctgtttgcttaaataaatattatatcctccaaaggaacaaagccttaaactaagcagttctttgagtgttatgtaagtccacatttttgggttctggaaggtctggcactaggttaagcatgtgtgatattttctctttagctgagagcaggtctctcactaagctattgctccttgrtgaccaagtctatctcttattcactatattatatctacctacattagtgcctagcacattcacacatgaatgaataaacaattaaacacaaaaatggtacacaaagcctagaaagtacactgtgcctagtttagggagaccaaatagatgagacccagtgaagtcaggattttcagataaacaatgaataacttttagtgtgagtatctctcaaatattgcatggggtatacttacactaaaaattattcattgctatctgaaaatctgatttcactgggtgacttgtatttttattagctaactctgttaactctagtctagttattgtaattaaattaaggtttacacatttattcaattatctagttatcaacaagtattgattgcttccttaaattattaaatgatgtattccctgcctaccaagtgccaggacttataaataacactggcagattctcacttcatagagcacttatttcagtgggagactgggagagatgaaaaataaataagtgaagtattaaattggcaaggtaatttcagttaatgataagtgtcatgaaaaaaatcaagcaagatgataaagtagagagtgaaggatggatcaagatctaccttgggtaaagcgtgcagaaaggcatcattaaatgatgtaaagaagcagtagtataaagagccagaaaaagagcacaaaaggaagaagaaacagcaagcacaaaggaccctgggcagaaatgaattcgaatattacaggaaaagaatgaaaaccaattagattgcagtgagcagagggctgagaagtggtgaaaacgtagtacaagaagaatcaagagccaaagcatgaagcaacttgcattgcatgggatggcatttggattttattcaagttgagtgggaaccactagactgatgcgatctgaaatactttgttgttgttgtttgtttgttttctttatttcttctaaaataaaagggatacatgtgcagaatgtgcagrtttgttacataagcatatgtgtgccatagtggtttgctgcacctattgacctgtcttctaagttccctcccctcaaccctcaacccccaacatgccctggtgtgtgttgttcccctgtctgtgtccacgtgttctcaatgttaaactcccagttatgaatgagaatatgtgtgtttggttttctgttctagtgttagtttgctgagaatgatggcttccagcttcatccatgtgcctgtaaaggacatgatctcattcctctttatgggtgcatagtattccatggtgtatatatatataccacattttctctatccagtctatcattgataggcatttgtgttggttccatgtctttgctattgtaaacagtgctgcaataaacatgcatgcacatgtgtctttatactagaatgatttctattcctttgggtatatacccagtaatgggattgctgggtcaaatggtatttctggttctagatccttgaggaattgccatactgtcttccacaatggttaaactaatttacattcccaccaacagtgtaaaagcgtttctakctctccacagcctcactagcatctattgtttcctgactttttaataattgccattctgactggcatgaggtggtacctcattgtggttttgatttgcatttttctgattatctgtgatgttgacctgtctgatctgaaatatttctacaagaccctttggaatgctgtgtggaaaatgaatgggtatggtgggagggtaggagtggaggtgtagcaccaattagaaggttggggtcaacatagatgcgtaacaggctgtgactaaggggggtgaattggaatccatgttgaaggtagaagtaatagaacttatgaatgatttttaactctggaatcggagaagagtagcgagagaaggagagaaagccacttgttttctatgtatgccctgtatatcaggtagaataaattgatcttctttgtccttcattcttagttgcctatattggcatcatcggtggttagcctctatttcctcgaactcacagatgtcttcaaacctgtgcactctggatttagctgctatgaccggagtcttagcatgccrtacattgaaccaacccaggaggcaattccattcctcatgttgcttagcttggcttttgctggacctgcaattacggtaagaattacccccaaaattgtgtttatctgtcctggaaaactaaaaatcaccacatttgtataataaatgggttcaaagcaaacaaaacgtgaactctaaatcctaaatcaaagtcatgtctttgagatatattgacagtatcwtgtggaagttaatagcttaacattaytkgcattaaaatttaaacattttatgattggagaaatgattgattcctagtgtttatttttattaatcattatgaaaagttttgtaactttataattcactttgaatggctaataggacatttctgatatacttcctaattaacttactttacatgtgtttatttagtatctgaagcctgaaaaaatggggragaaattacatagccaaaagtgcatttgctatcactcacagttttatttcttactagattatcactgtttattgattatggatactgagcataaataattataaagatataaaaactcattccagccatgcatgcatgcacacatacacatacatacagacatactcaaataataaactgttttatattcagaaaaggcattttcattttaaaatatgttcatgaattcaaaatagctagaagagaataatttaaatgttcctagcataaagaaaagataaatatataagatgacgaatatcctaattactttgatatgatctttacatgttatatgaatgtatcaaattatcagctataccctgaaaagatgtacatctatcatgtatcaataaaaaatctaaaataaataactaaataaataaaatatgtacataaagaaatgctctaatgtactggaactgaattcaaaacatagttgtttttaatgtgttaatatacattgtgagtaacacacttttagataaatctattaataaataagactggccaacccttttcaccacctcttttgccccaaaaatactacctaagaggacaagaaacacttttcaagggaaatggtatttacttctacagtgaaaaactcttgttttgcttttagcatgttcatgaatgtcaaaggaaatggctattaaattaaaagctttatttgaaagctccacattctaatgaattcgcctattcaggttcagtacagcagagtttaagaagagtctctgcacagatgttctaaactctatatttttatgtagctatggattttttaattccccaatattaaataattataatatgctgtttacaatttaaatacatagtgtataaaatattctcagaagataaaattgaaacttaattttcatagaactttatcatatttgaaaggtctctaaacactttaaaaattaatgagttattctatagtgactgtcacattactagaactattaataatgtacttggaagaagctgagactttgagactaataaaacattcttggagtgcgatattgctcagaataacattattttcctattatttactgaagttttaacaaaaaattcatattatacagtcattttaccagggcagaaaaacagaactaaagacaaaagccacatgattatctcaatagatgcggaaaaggttttcaataaaatttgacataccttcatgttaaaaactctcaataaactaggtattgagggaacatacctcaaaataataacagccatgtatgacaaacccaaacatcatactgaatgggcaaaagcttgaagcattccccattgaaaaacagcacaagacaaggatgaactctctcaccactcctattcaacctagtattaaattctggccagagcaatcagacaagaaaaagaaataaagtggattcaaataggaagagaagtaagactattgctgactagtcaccagatggcatgatccaatgtctagaaaaccccattgtctcagtccaaaagcttcttaagctgataagcagcttcagcaaaggctcaggatacaaaactattgtgcaaaaatcactagcaatcctataccccaacaacmgttaagctgagagccaaatcaaaaaagaactcccattcacaactgccacagaaagaatgaaatatctaggaatacagctaacaagagaagtgaaagagctctgcaaggagaactacaaactactgctcaaataaatcagagatgacataaacaaatggaaaaatattccatactcatggatagaaagaatcaatatcatgaaaatggccataccatccaaagcaatttatatattcaatgctattcccattgaactaccaatgatgttcttcatagaactagaaaaatctatttcaaaattcatatggaaccaaaaaagaccccaaagagccaaggtaatcctaagaaaaaagaacaaagctggaggcatcacattacccaagttcaaattatactacagggctacagtaaccaaaacagcatggtactggtacaagaacagagacatagatcaatggaacagaataggaaayctagaaataagactgcacacctacaactatctgatctttgacaatcctgacaaaaacaagcaatagggaaaggattccctattcaataaatgatgctgggataactggctagccatatgcagaaaattgaaactggaccccttccttacaccatatacaaaaatcaactcaagatgaattaaagacttacatgtaaaacccaacactataaaaaccctggaagaaaacttaggcagtaccattcaagtcataggcacaggcaaagatttcatgatgaagacatcaaaagcaattgcaacaaaagcaaaaattgaaaaatgggatccaattaaactagagagcttctgaacatcaaaataaacttccaacagagtaaaaagacaacctacagaatgggagaaaatttttgcaaattatgcatctaaaaaaggtctaatatctagcatttgtaagaaacttaaacaaatttaccaaaaaaaaaaacaattaaaaagtgggcaaaggacatgaacagacacttctcaaaagagggcatacatgcagccaactagcatatgataaaaaagctcaacatcactgatcattagagaaatgcaaatcaaaacgaaaatgacatactatctcacaccagtcaaaatggctattattaaaaagtcaaaaaatattagatggtggtgaggttgtggagaaaaaggaacgcttatacactgttgtgggttcaaccattgtgaaagacagagtggtgattcctcaaagacctaaagtcagaactaccattcaacccaccaatcccattactgggtatatacccaaaggaacataaatcattctattataaagacacatgtacacgtatattcattgcagcactattcacaatagcaaagacatggaatcagcctaaatgccaatcaattatagactggataaagaaaatgtggtacatatacaccatggaatactatgcagccataaaaaaatgaaatcatgtcgtttgcagggacatggatggagctggaggccattatctttagcaaactaacacaggaacagaaaaccaaacaccacgtgttctcattcataactgggagttgaacattgagaccacataggcacatagaggggaaagacacatactggggcctacctgagggtggagactgggaggaggaagaggatcagaagaagtaactaatggatatggggtgtaatacctgggtacaacaaatccccatgacatgtgttcacctatataacaaacctgcacatcctgcacatgtacccctgaacttgaaataaaagtttagatagatagatagagtttataatatatataaattttatatatatagatgctttaaatgtatcatactgtcacaccagaaagygcttatcctaaaagtgctcaaaattattataattgatatatttgaatttgagataaattacttaacatactacacaaatgatcatgcctctgttataaaaactgtattgatatgtaatcattgaaacaatttcctttgtatatatctagaagtctttctcctccagggtattttatcaagttgctaggaaagcaaatttagttgtggcactccctgccagcactatttatttcatgttgcttcctttgctgacactggtacatgtcctggggacaataaccttggtgtcatcactgtgtgcctgcttgtgttgactccttctcgtcctataataaattctcaatatacaagtttgagatgctttctgagagatttggcattaaaactttctttcttgaggcctgagaaataaaagggaaaatacaccatggctcccttccaccaggctgacgtaggaagtccagtgccaactccttccagaaaggtgccactcaattcctgcatctccacagaacctccatagctgctgcatgcctcttcgtggaaggaaaggcaaactacgggactatttacacttcaggatccctgatttccctatatcacttcaggatactccaagatgacagcaattctttcctaccacactggttttataggttttaggtaaccaactggatggtgagacagatttgactttgctgacatcaaacwctttgtcacagctttctctccaaamatatactatacttctagatttcactctactttcatttttttttcttggttttgaaggccttctccccaaacatacattttctcagcagtgatcctccagtgtctgcagtcatcttgttctagaaccataattctatctcgaatcttcctacatatacagctatgctaactcctttccctctctcttcctgaaagtaaaaataacaggctctaatttctgacttcaaggatgccagtttcttttctatctttagggtggcataagcctgttccaaaaatggggtcatgagagggggtagggaggtaagcagaactctccgtttgggaatgagtgtccaaaaggacttgtgtgaggagagctgacacccgccacgtggagtgggggtaaggcaaagcaaaacaaaaggcctcgcttcagccagattctccaaaaggaccttcatatgaataaaaagatcggctgatttgtatgcaggaatttaaatatgaatcattcagtatttgcttcccagatttttttaatgctttgagagatgtttaaaaataacttgtctttgtgatgttatacatggaagtggaaaaatgtatttcatttatgtgaaatgtatatttttatttttctgaaattgcccttaaattgaaaaatttattccttaatattcaattttcatttactttagagtgataaaacaagcattctgttttaggttctttggagattatttctcagagaaaacaagaaagactatttgggtttatcacaaatcttcatgaagtctatgtgaacagaaaaaaaagggcgctttttcttcctggaaatacaattttattacacattgttaaagaattaatatatctaattttatagaagaattccatcagaatttaattctagctcctggaatagccttagctttaggaggctacacaatcaatatgcagaatattagacatgttagggcttccaaaaaacattcattgaaaattgaaacattgaagatactatgatgaatactataataatttttsttgttttgttttacaagaaagactttttggactgtgagttctccctatgatgactgttccatggctagggtccttatagtactaagaaatatakttcctctcaaaatctcccctgaagtagtcattataatatctcctcccaaaacctgtccacaacaacaacaaattgcgtccttttcagggttgggtacrgcacaaaacagagattgtgaaaagatacttgttgtaaactgttttctgtttacaaatgcaacagcaacaaataattttcttatcagaacctaaattctgacaccatacctcagtacaacactgtgccattcaaaaaaaaaaaaggagaaataagctgggcatttggaaacgcactgggaaacatctccctataccctgaggagacctatctttatgccaaattgaattattttgaaaactcgtgaatgacattagctgaggttaagtgacagaagtgagtgtgaggagaaaattaatgtcctgtttaatgagagggatggttgggtgatgtcagaatactgacaagaaacctctatccatattacatggtctagacaaataagtattgatgcattttctttgcatatgagttttgaacatattcaaacaactaaaataaaactcttggccgggcgcgatggctcatgcctgtaatcccagcactttaggaggcagaggcaggtggatcacttgaggtcaggagtttgagaccagcctggacaacgaggtgaaaccctgtctctactaaaaatacaaaaatcagccaaccttggtggtgcatgcctatattcccagctacttgggaggctgaggcgggagaatggcttgaacccaggaggcggaggttgcagtgagccaagaycacaccattgcactccagcctggcctgcagagcaagactcagtctcaaaaaaaaaaaaaaaaaactcctgaaatctcaaggtctcaagctcatttgagataatgactattgtattgtatgacaaaacacacttttctatacagataaattcttatgtaattcaacactcatggacaagatgtaatcattacaaatataattatacagagagaaaaaaaattattcacagaatttttattgaagaagtgaaggtgaaattaacctcttttagctgaatacaatacatttcaagaataagtggttaattttctggaaatgatgaatttgaggtagcagttayattattctgtgtaattgttgtactatgttgtatctgtctacacagagtatagaacctattgaatttctatgtctaacttgaagtgctaatgtaggactatatttttcaaaaagtataaatkgttaactcagcatccaatggtttgaaatgaattacttttgattatttctataatgattgatcttaaaatagtttattatgccacatgattttcacacatatggttataggtagagttctactatgataattactctttaaatttttaatacaaagtaagattctctataattaaacatgtaccatattccctacagaagtaaatatagcaatttaagcattcaaagcagaaggccataggcttgctgtcattagattttttaaaaaaaactataattttgaacacttcataaaataaatgttaagctagtaatgacaactgagaggttttctatggaaaacctgtttcagtccaaatcaggkttatagtatttacagtgacatgattagttgtatttaacagactgttagtatctcatttaagagactgcttgtatctcattaattgtactttcctcagctccacgcatttatagcaaatcaatatttaatttcacaacaatcttttaggcacaattatctcaaatatttgaaagactttttcatgaataaaatggataattttaaatcttgcttctgttgtacagaataattgacaacccaacggcctaaggtagttagcaaatgtgagtcccacagtaaaagccaaaaatgcaattctcaccgtgccaggcactgtgcttgacaagtgaaggtgaaaggtaaataagaaatggttcttccctcagagggccctagtctagtgagagacagccaaatgaacaatttcataaagctatgctagagggaaggataagatgctaagggagccacatagacggagatgtgattcaatttagggtacagtaagaggtttcaaagaaaacttactgagggaaatcatgcctaaatcatactgagttccttcattgatctcacaggtcctaaaatcctgcagcaaagtgccatgttccttatcttaagagagtcctcttgatactactgtatgacattgtgaatacattgtttagatgtctatatctaggaaatactacccttctgacctagattctcttgtaatcttcattctctgataagatagccactagccacctgtggccacttcattttatatttaagtgtatttaatttttaaataattaatacaatggcataagattaaaaattcagctactcatttgcagtagctatatttcaagtgatcaatacctacatatgggtagtggctactgtactggacagtgcaaagtatagttccatcattgcagaaatatttatgggacagctatgctatagaaagcacctttctacactcacatactttccatggattgatccttctgctcaatcccaaattggtttatggacctaatctgctggtaaaatgttccagtayatgagagtccagaagaccctacaaaatctcattagagtggcctgattacttacttctcactgcttgatcaaattctcagaagaaattgctgtgcctctacagcttttaagaaaatttacatctttactttattgaattgatatgttaaaaagtgatatataattcctttatacctgttggcttaataggtattccaacatgcctcttcctgaatacccttctatctttgcagattatggtaggagaaggaattctctactgttgcctctccaaaagaagaaatggggtcggactagagcccaacattaatgctggaggctgcaacttcaattccttcctcagacgagctgtcagattcgttggtgggtgtggggaaccacaaagaaaagaaatgcttttttttttatattgaaatgttatatttaattatagatattaagtctcgtacgctataatttagatgtataattycagtacatgatgagttttatattgtacaagaaactgttaaaacaccaaaatttgggttttgtatctgaaatgtgttatttacagttgtagcccttgttttgagagctaatatgccatgtgtttcaayttatttttgccttagctctggttgaagtatgaatttattttaaaatggtttcactggatctgtggtcagtttttcaaaatggagaacaaacgtcagcaggccagaatgaatagacaactcttcagraattactttagccacattaatgattccatttcaattgtcctggagtgtttccatccagaagttactacactttgaaatgtcactattgagtactgcatcatggccatttttccttggttgtagcccctaatgttacctttcatcttttatgagacctatagaaaatctatagacctggctaccagcatctgaatcaaaccagttttcaaaccttcatctcttctgcttagcattggaccatcctaatgttgttccagtcataggtcttttatttttttaatatagttgaatagtcacacacaatacatcacactaacctgaatgttttctrttcattcccaataagtccgcataaagttatttttacctgtaacatgtaagctcaaaataattgatggctttgcttaatccctagtagataattatacacaaatttctttcccacaagaggaaaaatcaggtctaactcatgccccagactctgctccactaagcattttcttaccatcacattgagatgataagaaaacaatagacagcttaacagcatcgcaaactcaggcaaggaaataaaactccaggacatgtagctgcacacagagaaaatattccctaatgtaacaaaatactctggacaaagggccacataccctctctcgactggaaggatgatccattctaccctagagaacaatgttccagagcctgcatcagcgacaggtctagaaagtccattatccaaaggaaaaagtaagtctttgcatgcttctaggaattagaatgtagaaataaagtttctgtgtcatgaatcccaggtgtgtgggtggagaagcaattggaggaatggtggttaggtgacagtaagcagtgaagaaaaatgtaaaacagggtaatgtgcaagccagcactcttggtctggaggcggtgactgaagaattaccctggtcctctcataatgatttctatgagcaactcatgaatcagaatgcaagctgtcaagtcagaatgaatctagggtgacaagaaaacctagagtgagaaagttccagatcatgtgcctgtgagcagagagctggactcccaaagataaggccaagcaaacaacttcaagcaggcatggagtttgcatgtacaagtgcaaggatttttttatttcatggtttaaaattggtcctaggagaaacagaaaaaataatttggaccaagatatgtaagaacatcgtgtccaaattccaaacacacacgtgggctccccacattcgtgtacctaggatacgattgtcatttccacgttagggcctgtctgacttcttctctgttttaattagcattcctagtatgatcacagcttgaagagaattagaatggattctgtagggtgtgataactgtggctagtgttagagaccatcagggagaaataaccctggcaacttaaaaaygctaagcaaattaaaactactttaaatttttcttcattccacacatgtcgtcgctctcaaataataccttagcatgytccaagtgtcttgacaagtgacttacagttaatgttaagaattggcactttatcaccaaattaacaaaagtgcctaaagttactactttggagatactcattgcctttattttggacttaagtatctgtttagaagtttaggaattttctatactgtcttcttgaaatcaacttagagaaaatgaacacaatagattttaagatcttaattcacyaatgtttaatgaatatgtttgatgctgacacaaccaccaacttggtaacaatttctttcattttgcctataggtgttcatgtatttggattatgctctacagctctcattacagatatcatacagctgtccacaggatatcaagcaccttactttctgactgtgtgcaaaccaaactatacctctctgaatgtatcttgcaaagaaaattcctacattgtggaagatatttgctcaggatctgacctcacagttatcaacagtggcaggttagaaacagatctaaaaacactctgcatcattgttttcattattcaattgctgcttggagtatcactttaagcatgcctctttcagtcataatgattttgtttttatttttcttttcaattcaatgatctcttcaattactaaaccatagaaactcattgggggcttattccaaattcttctctatgtctccaaatttcagcctcacatttttgctactagtccstatttcaccaaactccaccatgttttgtgatcaatcctatactcattatggttttaggttactataaatggtttatttcagaatatttacagtcagtcatggctggcagtcaatataactcttgtactggtttaaaaactaaacacatatgaaagttatatctccattatatgttccataaaaaaaatgtgaattttcctttttgtaaagtttgaggaggggtaacatctaagattgcatatgttttctttgaatcagatctaactcatgccccagactctgtgacataatttcattcattctttgaatgaacccgggtgtgcatagcttctggccttacaygtcagaaaataaaggaaactcaagaaattaccaatgcattacatttcttaataaataaagcaaaaataaacttacatgacaagagatagtagtttacagtctcaaaagaaataaattgcagagggataagggccaatcaattattgaaagaattgaattttccattcaataagttgccaaatattgactaaagagtcaaaaataagttaataggtacacctgaataattaaagcctgatgttatgtgattatacacattaaggttctcatgtatcattcaataattttggatctacagtcaagacctatgtcctctatttttttctcagtcctattacattaacttatctctgttgaatggggatcttgtttatcatggtaccaaataattaggaaggcactaatttaagtgaattttattttttctaattttttaattcattgaaacaaatctctattcttcttttgcctgcccttttcagagtctcttcactatctttgcctgctctttaaactrtttaaataagatgatctataattcttgagatgaaattattgtaaagtgtactacattttgttaattttgtagagaaacattttgttaaaattagacttttcttatgctttctagagtattaacaaaacacatttagatccaatgccatgagaaaataasttcatttttwaaaatttttatgtaaataaaacaatgtgtttaggagcatagaaaaagtttaaagctttaaacccctaggttttatgagctgttacttagaactggtataattcttacaccaaagaacaatgatgttttccaatccatttttacttcaaccatccttctagtgatgtaatgaagtggccccttgccaagctagcagttttttatactggaaastacatcactactatttgttaatattaatggtgattagcagcatttattttatcactaaggtctttcaccagaaagctggacagaaggtaaaattattgcttattgccttgtgacttttaagttgaacattttaaccactcagtgtctttgagatgaytgctagcagtgtatctgaactacaaggcataatttgactatcttcttttggcagaaagtccttcccttctcaacatgcaacccttgctgcctttgcagctgtgtatgtttcggtaagtaactggttcttttttgttaagttgtgttctacagaaaatctgaggaatgaatgttgtctccaggtgactaattggatgatataaccatgtaataacagaatggtaaatttagcactgcagcctttcaatacaatggcatccaaagcagaaatcaaacactactataaaaaatagtacagtaaaagaatttttctacacagttataatagtatttatttattctggtatccctttaatattatacttcataggaggatattgtgaattataggaatgttacaaaacttgaaagaatcacaataagtacccacaaagacatacaacgtgcacacacacacacacacacrtacgctactttagtatttctgtaacaataagttttaggtcagtgtaaatttagaaatgttgtacaatgaatagtcattttatctaatttgtacaatagtccgtgaagtctttcctgagaaaaatgagcgaaattatacgacaagtaacatggagactaaacagttaaatggttaactctactgttttggtatttttccaactttcatgtaattaatttgttatttatttgataaatttcatcatgcatatcccttcttggcaggcacagaacatagccataggaagagggggtgaaacagtaaaactgaagtcaattgtatcagacttttaacttttatttgattataatttactaataaaatggcctttctaacatacttaacccatttcttccatttttaagatgtacttcaattccacattaacggattcctctaagcttctgaaacctctcttggtcttcacatttatcatctgtggaataatctgcgggctaacacggataactcagtataagaaccacccagttgatgtctattgtggctttttaataggaggaggaattgcactgtacttggtaaataagttactattatcttataagccaaagtttaaaatggaaaacatgcatagaatattttgcactataatagcttccttgcgatatattttatataaatgagaaaatctctggccgcatctccattctatgccaaaacacatatctcactttcaacaaaatcatttattgaactcttactatgagccagaaattgtaattttagaaagatttctgaattttgtctttatgccaaccaaacaggaggtgggcagggactactattactrctataattataatgctacagatgaggaaagtgattattgccaaaagtaaggttagtgaaagcaaaaatttagttaaaggttatataacttgccccacaccacaaatttagcacctgaatgtaactgtgatccaactaatactgacttctttaacactactcttttttcaagcctggtccccctctaagggaaatatcctcagcataaggaaactgagattgtccatttcattttgtcatgcatgcatgcattcatgcattttacatttattcaatatctattccgtgccagggattatactgaacattgtaacactgagaaatgagatgtattcttttttttattattattattattattatactttaagttttagggtacatgtgcacaatgtgcaagttagttacatatgtatacatgtgtcatgctggtgtgctgcacccattaactcgtcatttagcattaggtatatctcctaaagctatccctcccccctccccccaccccacaacagtctccagagtgtgatgttccccttcctgtgtccatgtgttctcattgttcaattcccatctatgagtgagaacatgcggtgtttggttttttrtctttgtgatagtttactgagaatgatgatttccaatttcatccatgtccctacaaaggacatgarctcatcattttttatggctgcatagtattccatggtgtatatgtgccacattttcttaatccagtctatcattgttggacatttgggttggttccaagtctttgctattgagatgtattcttcagaagtttacaatgtaaagactaacataaatataaatggttacaacatgttaaacgatataacagggtatgaacaaagtattttaggaatagcaaactgcctgaggaagttagaaaagacgtcacaaaagtgatgtgtatgtgtgtagctgttgttgttgttgttgtttttaatgggagttccatggggtaaagaaagaagggagggcattcaagaagaagaaactacatatgcaaagagacaggtatctgaaagagcaagtggaagtggaaggtgggggaacaggaggaatgagacataatggccaggtttccagcatggaacactggacagatgatgacttcattagcagaccaggtaaatgacagatgaagcagatttgtggggtaaagggagttgaggggatcaattgaatcaataagcagttaagtagttgcttctggaattcaaaagagcaatcagtattggagaaggatatttaatggaagtaccattgtagttactacggktatataaaactgccrggtcataaaaataaaaggtagccagggaataccaataaacaagtgacatgcggaggaaaaggcaataatgaaagaaactgagaagagctgacagaagtaaaaataaattatctgtagctacagttctcaatcatgtggtcttagtgcccttggaaaggcattacaagaaaattattaccaaaatacaggtaaagtactgaagtgtgctataattttataagtttttttattttcataaacaggcacagtcaagattgtcactttaaaagttattctcactcgcatgcattcttcactgcaggagaaagggatcaaattaaaattggtgtgccaggaattgtgcataagcctgggttgcccatgggagtgttagytggcaatgtgcattgcagaagaaataaaggagactggaaatgccactctctagtttatgtattgcttttgcatgtgtgtcatttcatgatgtcctggaattagcatgggatttatagtgcaaaggatttggttatgaatccaaattttcctccacttagccaagttacacagcttttcagaagcctgtttcttcacctacaaaataaagatactaactctctgtcccatgtcataacaagaattaaacaactacagacatgtgtcacataatgatattttggtcaaccatggaccccatatataataccatggtgatcccataagattagagtactgaattttttctatatgttttctatatttagatatgcaagtgcttaccattgtgttacaattccctggagtattcagtatagtaacacactgtaggattttgtagcctaggagcaataggctgtaccatagagcctaggtgtgtgggaagctataccatctagatttgtgtaagtgaactttatgatgttcacacaatgacaaaatcacctgtcaatgcatttcttagaatgtatccctgtcattaaatgacacatggctgtacttgtatggagagcttatagtttagtggaggatcttccccaacttacaaatttaagtrcaattattaatagaacatgagttagggattgctcattctggtgagagcatagacagatatttagaagatggtttcaaccaggaattaaaatacttgaagaggcaggagcttggctttatttcatttctgtctgtactcttgccctgaaattggaaaattttcagttctaagccaatgctttgttcattgttaagcattctataaaatgttaaatcaatatttttttgttttgaacttgaatagtagacagtggttaccgccttttgaaattagcacacaaacaggtgtctgctgcttgattttttatctctaataccaagtatctcaaaaactgaaagtccagcagggattagatcttctatgtgccaaaagggtaatgattttgagtctgaactttagcctttttccaaatttttgcttcccaaatctaaaacaaacaaaaaaagatacactgtgtatgaagacaaaattaaataaaatctggctcacatttagtgcaatggtactaaattgatcaaatagtatttcccaatttatgaccaagtttaaatcaggaaagaatctaggtgccccaatctggcgatggtttttgccctgtcttccaagaacaccctgtacaatgctgaacacacaaggctgtagtcagtgcgagtcgtaataacatatgtctccgaccttctttcaaaaccagatatcattttttataaatgatatattgttctatattttgtacacttcttctactttccatcatatgattgaaaatggaaggtaaaataaatcatttaagccatttgagatgtcackcaacaagaagttcctaaatccagaaaaatgaattgctttgaaaagcagaaaaaaagtccttatttctctcttgtctgctttttcttctgaaaatatacacaggataagatagacaaaaacatccagtaggatggagaaaagaatggggttcacattgctgagcaattcatgcagcgatttatgatataacttacaaagtatttccctgcaaaaatatagttttcrtgtttcattatttgtactagtcaatggtgtataggaagcatatacctatgtatgtacttcagtgggtactctaaggaaaccctagtgactgtcttctagtgcatgatatttattgctttctctcaaacactagggcttgtatgctgtggggaatttcctgcccagtgatgagagtatgtttcagcacagagacgccctcaggtctctgacagacctcaatcaagatcccaaccgacttttatctgctaaaaatggtagcagcagtgatggaattgctcatacagaaggcatcctcaaccgaaaccacagagatgctagctctctgacaaatctcaaaagagcaaatgctgatgtggaaatcattactccacggagccccatggggaaggagaacatggttaccttcagcaataccttgccgcgagccaataccccatctgtagaagaccctgtcagaagaaatgcgagcattcatgcctctatggattccgctcgatcaaagcagctcctcacccagtggaagaataagaatgaaagtcgaaagttgtccttgcaagttatagagcctgagcctgggcagtcaccacccagatccatagaaatgaggtcaagctcagagccatcgagggtaggggtgaatggagaccaccatggtcctggcaatcagtacctcaaaatccagcctggcgctgtccccggatgtaacaacagcatgcctggagggccaagagtgtccattcagtcccgtcctgggtcctcacagttggtgcacatccctgaggagactcaggaaaacataagcacctcccccaaaagcagctctgctcgggccaagtggttaaaagctgctgaaaagactgtggcctgtaacagaagcaacagccagccccgaatcatgcaagtcatagccatgtccaagcagcagggtgtcctccaaagcagccccaagaacactgaaggcagcacggtctcctgcactggctccatccgctataaaaccttgacagaccatgagcccagtgggatagtgagggttgaggctcacccagagaacaacaggcccatcatacagatcccgtccactgaaggtgaaggcagtggctcctggaagtggaaagcccctgaaaagggcagccttcgccaaacttacgagctcaacgatctcaacagggactcagaaagctgtgagtctctgaaagacagctttggttctggagatcgcaagagaagcaacattgatagcaatgagcatcaccaccacggaattaccaccatccgcgtcaccccagtagagggcagcgaaattggctcagagacgctgtccatttcttcttcccgcgactccaccctgcggagaaagggcaatatcattctaatccctgaaagaagcaacagccccgaaaacactagaaatatcttctacaaaggaacctcccccacacgggcttataaggattgagtgatgtccattccatcattagggctactcgcaaaagaccatatgttgattctacctgtgttctgttccagcgaattgggaagtctcaccaagctagattgtctaccatcagcccagaactctgtaacttttcagaactgctatactcaaacttgcagatctcacatcaaggagagggaaaagcacaatgcaagaacctaactaacgtgatgatatgaagagttttcttaagacctgtcgtcaaacttaaaaggttttgcagagggcagtatcaaaagaaagtggttttcttcaaatgtatactattttacttcctgaatgtgccaactttggggatttttctttatagtgagctgtgggaacccagaacacacacgttttccctacagcagaggccatgcagtattatatattcattttgcagaatctgcacctacagctcaatacgggtggtgctgattattatagtacatataccatgtaaactctcaaactctatttagctgtgaaatagtggtgtgcaattccttgttaaagaaatgctactttattaagaagatgctggctgctttgtgttagaataggacaccccgcagcttctctgtagtggctctgtcacagtcaaaaaatgaaaaggtttttgtgcgtttcttcaaaattctgctttcttcaacatcaaaaattgtgtagaaatattttcagtgaaagggaataactagtacttttctgcatagtttttcttctgcttactttttatttaagtataggtactgctaatgaatctgttttcttagtgagtaaatttgcataattttataaatattattttagagaatcttttgaaattgttgtgatcatattttgctttctatggcttctccttaacttattgattaattttttgaagttatagatatgttctcctattttaaaagcaaaaataacaattgacattccttgagcaaaatatactgctgtgaatttgcaaacaagaaatctgagccaaaacttgacattgtgggttacattgccagaaatgttggtcaagtttgcccttagatgtctacaactagctggcataggttgccatcttaacaagtaatctaaaagtcccattcggttctacattattaactttttttttctatatcctgatgaccagtaaattagagccacactggttaagtttgactcgtctctaaaacgtttttgttaattggacaccaagaggaagaatctgaaaaaaaaatgcatgttggtaagtaaaagtatctcacggtacaaattaagaatgactttcttcaaaatatctgaataggtgcagttttagtttaacatgcaaacaaccattgttgctacctatcctgaatcaagccttgagcctaaatcaaagcaaaccaataccattgataagaagaagataaaaacaaaatattttggagtgttttccaacttaaagtatgaagacatactcagttcttggaacttagtattaaaccttttttatgccatttcataagaattccgatatatacttgatgattgccaaggggatgaaaggaaacaacagagatggttgatctgatcttagctcactttccaataacagaaggagttgtttacagatgaatagtatcacatcattatcaatttccacatgaaaaaggtggagctttctagaaaaaccaacctctaaggcattaggaatttagctgaaaccagcagaattgaaaactctggcaataaaacatggactcaaccatatcccttctggcaatttccttctcagagaggggagtgggaataaaatgttgccttccccacttctcaccaccaccgccatcatgacgctcatactggcttttgcctgtttgtagaggaaaaggtgggctggttttagtactctgaaggacaaaaacaagcaaacaaaaacccctgctgcagcatttcaggtgcagtatgatatttcctaatctttcctatttcttaacaaaagattttaaagtacttctctagtcattgaagtttttttttctttacataaatattgatatattctttttctactcaaagtgccaaaggctacagtttttaatgacttaacaaattgtaccacattgttaaggacatataatgatagacactagaactcagacctctgcatgtatatttgataacatgtcttttgtaaaacaaaaattacaaaaaaatttgtttacattccactggtaccttaatttaaaataaatcagactaaaaggtggtatctcttcttagtgttctatttatcttatttgctaatgggagcacttcttcctttgttaggctgtgctttactgataaamccaagtattgaataaagagagttaattatctttttaaagtaaataaaattatgaaaatatatatagtatatataaagtactgtgtttaaaaaaatgttatgcaatgttttccaaactgataaagtttgtaaagtgctataaatgtattttgttaagtacagataaaagctattgtgtgagtatattgtgctaaaatcatagaaataaagattagatttcttcatcaaaattggaatagtttggtttttacttcagagtctgaatagataatagcttggcttgtaggaaaataactgaggaaataagaaaaaatcagaattgattaaattcataattgtttaggaatgggttacaactaagaaagaaaagtttctcaatctatgacatgttttcttattgttagaattttcttttatgcttattaaaggagctcttttatactttacacatatttttgcatatcaatgttacagtgtatgaaaaagaaaatatgaaggacttgactaagagtagttgatgtacttattttcccaaacagtagagacctttatgtcatcatggccattggcgttgcagcttttcttaaaagaatgcttcaccattaactccacgatattctttcaagccattaaggctcattatattaattttactgctgatgatttgtacatctcactggaaggtattagcacaagtttttagaccacaaccagaacttaggatttactcaaatggtcctaaggagtttgttgaatgatatgtgaagttacaaacatccagtaatgccaccaagttcatgtagctgtccaattgcaacaaagttcatacataccaggcaacaacatcacaatcactacctggccaacagccaatgtaagatactattgattgtaggaaacaccctggttttagagaagttaacatgtgaaaaaacaatgtgtatcttatataatgggtgaaatacagtttctctaggtctttaaattaaacttctctaggtcttgattttttcatttctaaaatggagacattcagccatatttcccttctaaaggatgtcctaaagttctcaatttctatggattatcattatgtattttatccaatgagcaaaaactggtaagaaaataggaaataacttgatgatctaaaataactaactaattagtattgccatctttgactacaaggttaatagaagcaagccaactggggctgctgaaagcctacatcaactatttcaccacataacatatcaaaacaggtgacctgtatacgtatacccctagtcctagtacctttctcatgaggcaacagttgagtagattcttggttattatacacctaggaagctatcattaagggccctgctatttctgtcttttataggtcaagtctttacttgatctctatgggtaatttcatattacaggtcaaagggaaaatgaatatgtatgcatgattcagagagtaatgtaattaatataaatgaaaaaatcaaaatgaattaagatgatttaatctaaaaaaacaacaaccatgacttggaaaattgtcaaaggcctgtctgtgattggatatttcatttcctctgcttaaatatgtttctgcctttattctgtaagaagattctaaaatgccctaggatcaaatattcccatttgaagaaagcatatatttcagtaatagtatatagattgcaagtaagatctatttatagaagatccccattgacgatgctttcaagttgaaagaacatttagataagccatttgatatagaagtgacttttatttcacggtcaaaacaattgtcagccaaagaaagttcctaattttgtgtatttgtgcaccacagtaaatgacaagtgaaactatagttctgccaccaattctacttcacgaacttgaatgcccttttcatctcctttactcccctaccttaagattctgtcattgcctatgagaaaaatgtatctaaattctaaagttacattttcaaaatggtacaactgaccattagataaatgagtttgaagaagagaaaatatgaaaattgcatttgtataaaatctcattttctatttatcactttgtatgcctggctacttccttataagaatgagagaaaggaagtcaaggataagcctctttgtctttaaaaagatgacataaggccaggcatggtggctcacgcctgcaatcccagcactttgggaggccaaggcaggcggatcacctgaggtcaggagttcaagaccagtctggccaatgtggtgaaaccccgtctctactaaaaatgcaaacattagcggggcatggtgccaggcacctgtaatcccagctactcaggaggctgaggtaggagaatcccttgaacctgggaggcagaggttgcagtgagcagaaatcacgccactgcactccagcctgggcgacagaatgtgactctgtcaaaaaaaaaaaaggaagaagaagaagaaaagaaaaaaaagatgatatagaagtgaccgtcatttataatccacttgattgacccaaactagatccagtgaaacttttccttttatgagtaatgcttttaaggtcaaatctagaatattaacataattctcaaaactcaacagtagaaaaaaacagagtaaattaaaaaagtaaaaatgtaaaataaaaatggacaaaaatatgtacagaagtttcaccaaaaaagcatatacagatggcaaataaacacgtgaatagatattctgcattgttagccatttggaaaatgcgaatcacaaccacaatgaaatatcagtagtcatctatcagaatgattaacattaaaaatagtaataatatcaaaaatagcaataatgtggagaaactgaatcactcatatactgctggtggggatgtaaaaggtacaaccactctgaaaaacagatttataatttattttaaaaactgagcatacacttaaccacacaacccagcaattgcactcttgggcatttatcccacagaaatgaaaacttatctgcccacaacaaaaatggtacatatatattcatagcttctttattactaatagctaaaaactaggaataactccggtgtccttcaatgggtgaatgattaaacaaactattatataatcatatcacagaatattattcagcaataaaaagaaatgaactattgacacccccactaacttgattgaatctccagagaattatatggaatgaaaaagccaacaccaaacagttatacaatgcatgaatttatctcatgtaataaacagtatagatacaagcaatctgtatttggagaggtggattttcatctttaatacatggctttcaaggttgttctaattgccacaatttccaagcagaagtaggagtaggagggaggaagtcaaggataagtagctttacctttaagaagatgacataactggcatccgttatttatgatctacccaactggcccaaactattagtctggggcaaaagtaattattatgttggtcccattgaaagtaatggcaaaaaccgcgatgacttttgcaccaacctaatagattaccttgctgcaagacaggctgaagaatgtactctctagctgggaggccctgggcccagctaaaattgtgtgtgcatcttttctaagtaggtagaagaggatgagaataattcctggggactaatgatcagtctctgtcataccagcttcaaaactcttcacaatctaacctgcaaattcctatagtctactacttctccaggaaaacctgtttgatagacatatagatagatgatagataggtaattaaacatttttaaataatcaaataattaatcttctgacatcactagagttagtacattttttaaaagggctaacctcatctctcctttttgaaactacttaaagatccttgatctgtatgaccaatgcatttacttaatcatacaatttgtatgattaatcaatttgataaatgagacattgaatatttactacacactgaactgtaagttctttataagcagttctagcacaacaggtgtttaatagatacagaataattgaatgagtacagtgtgttctatctactgtgaataaaaaataaataaaataagtaaatgagacttatttggaagagaaaggaatggttgtccatttgattgtgccctgaagttccagtttctcaaaaatccactctgagaccctgaagccaaacttatgctatttatgcttttcccttttttcttatttgaagcatgtttaaaaagtgttgacatagtataagccagatttcttggaacaagctgtcttctcacaatacatatgatttagcaacagttgttttttcagatgttcccacctccacagtaatctttgtggaggcaagtgacaataaagtatacctacttattccaacatttaaaaaaaaaaacaaacaaacaaaaaaaaaacagaaaaccctttgtatagtcaagcatgcaaggtttttttcttaattcaaaatcaaataatagaccaggacctacagtgatttctttgtacctggcatatccactgcactcttcttgctactcaatgtgccactcgaatatcacaatatttttcagaattctagagtagtgagagtctttgtggtcagactgacaagtattcaaatttcagcaccacctactgtgtgcctcagttttcttatctgtacaataagtataataatttagggttgttatggggattaaatgaataaatataggtacaatatttaaaatactatgtgacatttagtaagcagcacataaatgttctttcttagttttattatttggaagtgttctgtggcttctttatctccagtcctcacttctccctagaattctagactcaaatatgtaactccctacttcattgatatctttacttaaatatctataactatctcatatttaacatttgcaaaatacacttcctgattcctactcccaaacttgtttatttctcttagtaatatctaactctccaccctcccaccacagctgctaaagaaaaattctaaactctgtccttaatccattcttttctctcaccattcactctcaaactaagtcttatcagctcttcctccaaaatataggatcgcttttcctatcatcactgcctttacccttagctatctcaccatcaactcttgatactcttatccaggcttgggggctccccttatagtcttcaggtggcagtcaaggtgaacttcttaaaaaaaaatcagatcagatctcctccaaatattctccaaatggcttatggaaattcagattctaaaaagattgaaacttcagatatggctatccagtttccttcactggcagataggtttcctcatgaacaaatttcaatattcagtgatgttatctatgagatgcagaaagtagaatgaattcaatctgagcagaggacccagtgagaaaagactgccactgtcacttttacttcagtgacattactcatagggtctaagactatctagtgacctcaattaatcaaaagttacctctattattaataccccaaaacaattattttaattatacaattggtaaataattatgattcacattcaacatgtctatgtttcaggcactccgttagatttaaatctttcaacgtttcatcatagtgatagaaaatgggttttcaaagatcccaaaagttctttagtttgtttatttggtaagaataagaagtgtgtgtgtgtgtgtgtgtgtgtgtgtgcatgcatgatttaaaatcacagccttccagagcataattgtattaactgccgtctacttaaaaaaaattaaacatcgtttaacatatgcccaagtcaccagattattaatattaaactcttcaacatacatatagcaaggtcaaaatttgtgccctgcatacaaatatacaaaacaagacagaatggcttttttaccattactgttctcaggctgctttgaagcacccatcttggtggtagtctggagattacgtaccaaaattatcagttaaatgtatatcagccacttttcctacaaaagtctctcttggataaaggcttcagggaatagggcaaaaaggctaatgtgtccagatgtcagtaggattagtcataactagcccatgtgcaaaccttgaattttattatgagccctcactagcttaacttccatgtctttt

SEQ ID NO: 94815 - DNA, 395310 bp, Homo sapiens
  misc_feature (1)...(395310): n = A,T,C or G
gactattatttctccctgcctacatgcccttcattgaaattgccacctccctccagataagtatacatacataaccccccagcccctacgacctgggcagtcataattccgctaagtaaatctgtttccttggctcaactgattggatccagtgggcccctaatccatatactccatggatggtcaatttacagtcctgtttttttgagatggagtctcgctccgtcacccaggctgaagtgcagtggcgcaatcttggctcaccacaacctctgcctccaggctcaagcgatcctcctacctcaagtgatcctcccacctcagcctctcaagtagctgggtctacaggtgtgcaccaccacgcccacttaatttttgtatttttttggtagcgacaggttttcgacatgttgtccaggctggtctcaaactcctgggctcaagcaattcacccatcttggcctcccaaagtgctggcattataggagtgagccactgtgcctggccacgtagtcatttttcactcctaagagtgacctcttcttattaaatgacaatgttagtaaatatatattcacaatgtgctcaggcactgttctaagtactttacatgcattgactcatttaaatctcatatcaacctcatgaggtgatatgactatcattatctacatttcacaggcaaggaaaacagagaggcagagaggttgagtaacttgtccaaggtcacacacagtgagtaactggttgagttggatttgaacccagcagtttggctccctctgtcctaagtgctatgctgaattgctgctgtattggatttgcaacacaagaaatccctttttgttataccagcttcatatgaggctggtctctggcaggcagtaaggtacagaagaaagtaaaatcttgtacctccctcttcagtgaattccccaacaaaacaaaggtacaagcattctgggttttgtgaattgaatgccattctttttttctcttttaaagcgtaaaaattattagatgccacttgtagctggtgagatgtgtctgtgattaaaagagaaatttcaaaaccagaaaaaaatatgcaagatagaagacaggagaaagaaaagataaaataggatgatgacagaatataaaaattaagacagatttaaagctaaaaacgtgggaataaaaatgtagaaagaatagggcaacactgtaaatcagggaattttctaaaatccactttaatttcttattttttttttagagtcttgctctgtctcccaggctgaagtgcaatggcacaatctcagctcactgcaatctctgcctcccgggttcaagcataaaatccacttttaaagtagcatttatgaaattaaaaaagaaaataggaaagcactagaaaacaaaacaaaaaaattaaacctaaaaagttaagcataatatgttgataacatcccaataaaataaaattaacaggtaaaatatttaaaaagatgacattttaaataggaaccagaaggtaaaagagaaattaagctaagacctcagagtccaaagaaaaagaaatattctcatagaatttagattttcaaagttaaggctgggcgtggtggcttatgcctgtagtcccagtactttgggaggctgaggcaggcagatcactagatcaagagatccagactatcctggccaacatggtgaaaccctgtctctactaaaaatacaaaaattagctgtgcatggtggtgtgcacctgtagtcccagctacttgggaggctgaagcaggagaatcgcttgaacccagaagtcagaggttgcagtgagctgagatcacgccactgcactccagcctggagacagagcaagactccgtatcaaaaaaaaaaaaaaaaaattttaagagaaaaaagaatactatatatagaaaaaagaaaatgtattttttaaaaacattaagtttaaattgagagaagagcaaaaatagactttaatcagaccaaaattgtatgttggaattagtggtctggatgggtgtagtcgttgcagttgaggacgccaaaaacagtagatatgggaatggtgagacaccttttctattcaccatggcgctctcagccttggtgaaggccaggctcctggcactttaacatatccctcaacagaactggggcctcgaaaaggccagcaaatcctgcttcactttggttcttggaatgtgtttgattcttagtttttctttaccctttttaatagtcctttcattatcttttactgcctttatgataaaattatcatgtgaaaggcaactaaaatatgttgaatgaatgtattccatcttatctccttggagttttggtgtttgatttggttattacactttcacacacacacaccccacctttatcaccttgactcatctctgaggttgcaacacttgttattgaccctgagttgcttggttgtttgcttctttcactgtccttggtggcagtggaattgggtggggaggagacaatcctcagaacctgctcagggactggattgttagggtgtgggcgtggtgatgagggaaagtggagtcagggatgaccccatggtgtctgcttttgtgactgagtagatgttagtccagaaggctgggttaggggtggtggttgctaagaattcaggtcaggctgggactgagaggttctggggcaaccacagctgtgtacaagccctaaacttccagaaaggcttggacttcataacagactgttatggactaaatgtctgtgttctttcaaagttcatatgttgaaaccctaatcccagtgtgatggtatttggaggtgggggctttgggaagtacttgggtcatgagagtggagttcttactaatgggattagtgttcttctaagaagaggcctgtgagaggccagctagctagccttcttcctatcacgtcacaacaggacaagaaggccatctatgaaccaggaaatggttcgccagagatggaatctgctagtgccttgatcttggacttcacagcttttagaaccacgataaacaaatttctgttgttcataagccactcaatctatggtattgtgttatagcactcctaaaggaccaagatagcccacttgacccatattttggtgtttctaaattcttcagccatacattttgaatttattggttttctgacacagataacctgtcacatctgttatggagagatctgttgtctttcagagaatattacttctatctcttttcagggagcttattgtaatacttgtttcaataggaacatactgaagtaatggactgaacgaacatatgctagtgggataagcctcttgccgcaagtctactccagagtgtgttgtgatcttcctttagcccacgtgaggaagccagggctcacatcacttaagagggcacagtgcgctgggcgctgtggctcacgcctgtaaccccagcactttgggaggccgaggtgggcggatcacgaggccaagagatcgagaccatcctggccaacatggtgaaaccccgtctctactaaaaatgcaaaaattagctgggtgtggtgggatgtgcctcgtgagccgagattgcaccactccactccagcctggcgacagagtgagacttcatcccccgacccccacaaaaaaaaaagagggcacagtgatatgtccaccctagccctgtagcctatacaaaggcaggcagcacactttgacaaacgaccaatcaaaatgagatttgtccgttgaacttaaggaaaataatggtctcagccctacttcctctgctcttgtccttgattctctattcctacttttaattatttttggtttccttggcttcacctcctatttctagtcctgaaatctcaggttttctttttatttttttattttttgagacggagtcttgctctgtctcccaggctggagtgcagtagcccgatctaggctcactgcaacctccacctcccaggttcaagcagttctcctgcctcagcctcccgagtagctgaggctacaggcccccaccaccatgcctggctaattttttgtatttttagtagagacaggttttcaccatgttggccaggctggtctcgaactcctgacctcaagtgatcagcccgccttggcctcccaaagtgctgggattatagtcatgagccactgcatccggccacagattttatttcaatcctttgttctcttcctcttctaggtcttccccttcctgtccccactggcccctctcctatccactgaatccctggatgcctgacaccctctgcctcctgtccttgctgggtttcctctaccctctacatttcaaagacaagttttgctgaaatcacagttttcctgagggttctagaaaggtctgtgtgaacattaaaaaacaaaggttccttgggttcatttagtctttaagcaaacatcgattgaggcctgtgtgtgtggcaggtactgcagatgcaaagttttccaccttcatggagctcatagttactaagggaaaccctgaattttcttagactactgcaacgcactggccgggtgcggtgactcacacctgtaatcccagcactttgggacaagatgggcggaagagtgagaccatcctggctaacacggtgaaaccccgtctctactaaaaatacaaaaattagccgagagtggtggcacgcgcctgtagtcccagctactcgggactgaggcaggagaactgcttgaacccaggaggcggaggttgcagtgagccgagatcgcaccattgcactccagcctgggcgacagagcgatagtccgtctcaaaaaaaaaaaaaaaaaaaaaaagagaaatataggcacaatttaatgcatctcttttcctttttcaatatggagcatacggtggttcaagcatctgtccacattgtattcccgaagtttgatccctaccctgccctgccctcccgtctttccttccctctctctttttttttttctggagtgcaatggtgcgatctcggctcactgcaacctccgcctccggggttaaagcgattcaccagcctcagcctcctgagtagctgggattacaggcatgtgccaccacgtctggctaatttattatttttaatagggacggggtttctccatgttgatcaggctggtctcgaactcccgacctcaggtgatccgcccgcctcggcctcccaaagggaagtttgatttttctatggtcaccaatggacacttgatctccatagcttgagaatggcggccatcccctcactggcattctttcctcttgtgctctcccgaacgttctggctgctctttggatttccttttcctttgctcacatctacaatattggtgtttcctaggtcccgtacttaacgattgtttcctctcaacacgcttccctgggcgggctgaactgtcgggggctttctcggctgcgcttcctctctcacctgaaaccctcttcccaaccctttatactaggtcgacgtctccaacatcagctgctccccacccgtgtctgggtgggccccttgggcaggctcccctagtctcctttccttcgatcatccccacgtgcaggacgtcatctgcttgctctgccatcagcctcacatcctgagggcagggaccatgcgggggttgtccatctctgtatccccagtgccagcactgcacctcgccccaagcagttgtccaataaatgagcagtgagtaaatgaaagaatgagcaaagccttgtaacaggaaaggggccggcggcgtctgccgtgcaagacctggcccagtggagcagagcctggaggttcaggagccgggtctggaaggctccttccggtggaagaggggcccggagccagccggcgcctggcacaaggcgtctcagaggccgcccactgggagccaaccgttgcagccagttgtccccgcgagcgaggccggagaaggcgcggcggcccctggcctggccatttcgcccttgtcgcagctgaaccgccgactacgagctcctgcaccgcgcacacaccccgcgcgcttcgctctcggcctcgcccggccaccgtcgctctctagaacgccgcgcccgtgacccggaagagcattctccttagcaactgcgggactgcggcggcgccggcctccggggagaaacggtgaggccctcactcgcctgccccctgcaccgcctagtgctgcacgaccccctcgggaccgacccggggtctggcctctggggggctccgcggcgcttcgcccggcacctgtggtggcggcccgggacgagcgtcttccgcctctggcgttgctccccggcccacgcgtcttccctgtcccgcatctccctcaatgtccccagctccccactctccgctcctgaccgacccggcctcccaggccgcgcttatagcgccggggcccttgtagcctaggatggcgtgaggggagcgagaccagaattagagcctgttgctgtagagaggacgcctcccgaggctcgggtcacctgtggacgcgttctctagggtcttgatcgagatrttcaggactggcagggatggggagcctcgggaatcttgaagggcagccgcttaattataacatgtccttgacgtttgcgctttccacagtgatacactttatctcctttattgatcatagagagtttttttttttaataaacttttagatatgggggatacgcatgcaggttagtcacatgggtatattgcacccaggtattgagcatagaacccagtaggtagtttttcaacccacatcccccatctctcccctccttccagtagtctacagtgtctaccgttaccttttttttttttttttgagacggagtctcattctgtcgcccaggctggagtgcagtggcgcgattcggctcactgcaagctccgcctcctgggttcatgccattcttctgcctcagcctcccgagtagctgggactacaggcgcccgccaccccgcccggctaatttttttgtatttttagtagagacggggtttcaccatgttagtcaggatggtctcgatctcttgacctcgtgatccgcccgccttggcctcccaaagtgctaggattacaggcgtgagccaccgcacccggccgactgttcccatgtttatgtccatgtgcgctcaatgtttctactcccacttgtaagtgtgctcaatgtttagctcccacttataagtgagaacgtgtggtgtttagttttctgttcttgtgctaattcgtttaggattatggcctccagctccatctgtgctgctgtaaaggacatgatatcttccttttttgtggctgcatagtattccatcctgtacatccacattttttttttccagtccaccattgatggtcacctaggttgattccgtgtgtttgctattgtgaatagctcagccgtgaacatacaactgcatatgtctttttggtataatggtctgttttcctttggttatatacccaacagtgggattgctgggtgaaatggtggctctttaagttctttgagaaatctccaaactgctttccacagtggctgaactaatttacattcccaccaacagtagtttaaatgttccctttccaagggagcctaatgaggatctgttgttttttgactttttgataatagccattctgactggtgtgagatggtatttcattgtggttttgattggcatttctctgataattagtcatgatcatgttttccatatatttgttggctgcttgtatgtcgtggttttttctttttgtatttcttctgagaagtgttcatgtcctttggccatttttaaaaatgggcttatttgttttttgcttgttgatttaagttccatagggattctggatattggacctttgtcagatgcatagtttgtgaatattctcgcccattttgtaggttgtctgtttaatctgttgataatttcttttgctgtgcagaagctctagtttaattagttccaacttgtcaatttttgtttttgctgcagttgcttatggggacttakccaaaaatttgccaaggtcagtgtcaagaagtgtatttcctgggttttcttctaggatttttatagcttgaggtcttttattttattttgagacagggtctcactgtcacccaggctggagtgcagtagcgtgactgcagctcactgcagcctcgatttcccaggctcaagtgatcctcccacctcagcctcccgartagctgagactacaggtgcgcactaccacgttcggctaatttttgtattttttatggagatgtggtttttaccatgttgtcaggctggtctctgactcctaggctcaaaagatctgcctgcctcagttgcccaaagtgctggaattacaggcatgagctactgtgcctgactgaggtctttgcatttaaatctttaacccattatgtatatcatgaaatatatacagttttatatcttctgcatgtggctagttagttatcccagcaccatttattgaatagggagtcccttctccatttgttttttgtcagtttgttgaagatcatatggttgtaggtgtgtggctttatttctgagttttctgttctgttccattgttctataggtgtgagactcatttaattgtacatcttgaactgatccttttctggggaatttgcttcccagttgtgagtgaggtgtggttagtatattctgtagcttagatttttgtgcttacaagttttctgcagaaggaaatcttcccgggactgactaggtttgaggtttgagaaatatttcaagtgaaatttgctacattgaagaaagtaggagcaggtgttgttaatagcatggacttacacttcagaagacactatggcactggaaaacctcccctgatttgagtttgaatgagctgtactaagaaaactgtaagccttatttgaacatggttggataacgactttatttttaatctgatgatgatggagctaaaactgaggcgtgtgaaccgtttttggaaatgacattatttgggaataaaatgtgggagtttctatatcaaaattcatttaaaactataatttcattccaatttaataactttattaagcatctacagcattatacactttaaaggatataaaagaaaagtgcacacatgaaattattaggaaagcaatgaaatggacatttgtttaaatgcaaaatatgtggtacggatattaagtgctgtagtaggtcagagggtggagaaatcatttctggattaaatgggacttgatttgtctctaaagtacagatataatttgtatttgtattggagaggacaggaagtcctaattcctttccttatattcttaagagtttgggaaatagttccatgtggcatttcgaagttcttatttaatgctttcaggtcacttgatttgtgacctatttctttcaaatagtcttagtacaaatctatatgacatttttcctgtttgacatctaaaatagtgaagttactagctgagggctttgccacttagagtttctttgcttctgcatttggtrttaggtttatatgaaacaccacagtttaagtagttactgtttcattcatgctcaagagtcttgtgaaatgttgctcttttttatttgactggtatttctgaagtgcttcctatgtagcagcggtagtatcaggaattaccaaaaacaactgttacttrgcaaccagtaggtatgctttacataaggagagtgtgtgtgtttagcctatcagcctttgatgctcagcatttgccttgagacattgaaggccagagcaatttatgtagacatctgaattgactttttttttttttttgagtttaatgtttaataaggggactcagttgctttgggcatccaccaaagatacatttgtgaagatgatcaaacttttaagtcctcttaaaagatgttttgttgctttcttatagacttagtgttcatttattcacttaatcatcaaatataatatttgagtgcttacttggtaccaggcactatgcttggccttggagatgggggagagtgaatgcacatatgatctctgtcctcagcagatgatactcaaataatcacacaaatgcaaaactatggctgtgacaagtgttttagagaaatcactgaaatgacattttaactgatgtctacaagatgcacaggaagagaacagtgctctaatcaaagcagaccctctgatgccacgtccatgttgccctggctggagtgcagtggtgagatcacggcttactgtggcctcgaccttctgggctcaggcgatcctcctgcttcaacctcccgaagttctgggattatagatgtaagccaccatgcccagcctgtccttttattttatccttcaaaaagtttttgttttacagaaggagtttcatgaaatgctattgagcatgagtaaaagtaaaactgggcctggaatgagtggatagatccctctgaggtctggccatcgataccatttttgctgatgtcagggagtggagacttgaccagaattcttcttcttcttcttyttttttttttttgagacagagacttactctgttgcccaggctggagtgcagtggcacgatctcagcttactgcaacctccgccttgtgggctgaagtgattctccagcctcagcctcgtgagtagctgggactacaagctcaygccaccacgcctggctaattttttgtattttaagtagagacggggtttcaccatgttggccaggctggtctcaaactcctgacctcaagcaatccacccgccttgccctcccaaagtgctgggattacagacgtgagccactgagccactgtgcctggcctttttgagacagaatctcactctgctgcccaggctggagtgcagtagtgtgatcatagctcactgtaaccttgaactcccaggctcgagtgatcttcccacctgagcctcttgagtagctgggtctacaggcatgagccaccatgcccagctagttaaaaaacattttttttttttttttttttttttttttttttttgtggagacagggtcttgctatgttgctcaggcttgtctgaaactcttggcctcaagtgatcctcctgcctcagcctctcaaatattggagttacaggcatgaatcactgtgcccatcccagaaatcttgtctttattaaactgagagtggtggtagaatggcagaagatgctcctttttgtcatgtaacatgaagtagaaggatttgaagggtttttcgtatagaaggtattttatttggaaccatagcaagaacttgatgccttagagtagttattacgtgaccagttatgttgaggcaagacttgatgaagtttagtcaactgttagtccacctacttttgatttctttcttgccctaataacaggctgcctctgggatgtactaatgatgacagatgagacactggtcacactggtaggaagggacttcatgtggtgcaaagtaccttgaaattatctctgatgaaatcatgaggggagaagggctgatgaagtaccctgccctcagtaaagtattggtggagtgtctggtagacacggagaggttgtgtgacccaaaccggatgaggcaggaagttatrtaatgctaattgaagaattctgcattataagttcctttttggtcctcctctaatgaaattggattgtttctatttcccattargctttggtgaggagaagtttgtggtgattatctagatgctgagggattcagagagaagccccaaacatttctgtttaacttcatttttttagggaccagctttccacatgggaaatagttgcctttttctctgatgtctgccactgttagctttaatcacttttaaaaggttgaatgcaaaactctagcaacagttataccaagaaggagctattattatttttgtttaatccttttacttatggcacagtattaaacaaggtcagaaatttacatgtttctttttaattttagttaagttttgtaaatgaaaaaaagaattgttctgagatttttttgttgaaataatgcatttattttctttatgtttcactgaatttttgccagttcaaatcagtcttttataatagtttgcaagtaaggatgccttataagttttatgactgaaatatgtcttattaacaaaaaacaatttttaataaatgaattagggcccaatttgtgttgtgtaggattattattggttaagaccatatttttttgatttatttaaaaaatttatttgattgatttaagactgatttattgaggtatagttgacaggttataaactctaaagtgtacagtttgttaagttttgacatatgtgtgtacttgtaagactatcatcacaaacaggacattgatcatatctattatgcccaaagctgttttcatacccctggctccctgatccctatcccagataactgattttttttttttttttttgagacagagtcttgctctgtcacccaggctggagtgcagtggcatgatcttggctcactgcaagcttcgcctcccaggttcataccattctcctgcctcagtctccccagtagctgggactacaggcacctgccaccatgcccagctaatttttgtatttttaatagagacggggtttcattgtgttagctaggatggtcttgatctcctgacctcgtgatccgcccgcctcggtctcccaagtgctgggattacaggcgtgagccactgcgcttggcctaactgatgtttttatcactgtacattaactttcatttcctagaatttcctcttattttatataaatggaaccacacaatatgtagttatccttctttcactcagcataattgagagtcatccctgttgttaagtgtattagtagctgattcctctttattgctgagtaatattgcattgtatggatgtacctcagtttattaatacatttacctaccaatggacatgttggttgtttccaattttagttattaacaaataaggcttctataaaaattttgtttacaaggctttgtatggacatatgtttttattcctcttggttaaatacctaggagtagaatggctggatcatataataggtatatgcttaacctttaagaaaactgtcaatgtttagttatccgtaagtatttcatagtttttggtgctatttgatatggtttggttttaggtccccacccaaatttcatgttgaattgtaatccctacgtgtcgagggagggaagtaactggattatggggctggtttcccccatgctgttcttgtaatagtgaattctcacaagatctgatggtttcataaatggtagtttttcctttgttctcacatgctctctcacttgcctgccgccgccgtgtaagacatgcctatttcctctttcaccatgattatagtttcctgagtctttcccagccgtgtggaactgagtcaattaaccctctttcctttataaattacccagtcttgggtatttctatcagtgtgagaatggactaatacactattaaaattatatttttaaaatttatatttctgattgacactagtatatagaaatatgattgatttttttacattaatcttctccatcaatctggctaagctcacttagttcttattagtcctagacctttttttttttttttttttgagttggagtctcgttctattgcccaggtaggagtgcagtggcgcaatcttggctcactgcaacctctacctcccaggttcaagcaattcttctgcctcagcctcctgagtagctgggattacaggtgtgtgccaccacgcccggctaatttttgtattttcagtcgagacggggtttcaccatgttggccaggccagcgtcaaactcctgatctcaaatgatctgtccgcctcagcctcccaaagtgctgggattacaggcgtgaaccactgcgcctggcgtcctagagctttttaatagattccattggattttctatgtaaagattatgtcatctgtgaatacagttttaattcttcctttccaggcttttatttctttttcttattgcactggctgcaatccccaagtaacaatgttaaatagagatggtgagagcagattacttgtcttgtttcttctcttagggagaaagcatttagtctttcaccatttgtatatgcattttatcactggagaagttttcttctatttctagtttactgagatttttttttttttcgagagtgaacattgggttttgttaagtgctttttctgaatctactgtgatgatcatatgatttttttttttcgagacagggtcttgctctgttttccaggctggactgcagtggcatgactgtggttcacagtagccttgacctctggggctcaagcagtcctcctaccttagcctcccaagtagctgggaccacatactacacctggctgatttttttttgtttgtttgttttttagtagagatgaggtcttgttatgtggtcgaggctggccttgaactcctgagcacaagcagtcctcccactgtcacctcttaaagtgttgggattacaggtgtgagccactgcacccagccacttttcatttgttaatatggtgaaatatcgcatcgattttcaaatacagccatttgttgcctaacaatggagatgcattctgagaaatgcattgttaggtaattttgttgtgcaaacctcatagagtgtactttcacaaatctagatgttgtagcctactacacacctaggctatatggtaaagcctgtggcgcttaggctacaaaactgtacagcatgtgactgcatttaataccataggcaattgtaatagaatgctaagtatttatgtatctagatgtatctatacatagaaaaggtacagtaaaaatacaatataaaagataaaaaaatggtacacctgtatagggcattgaccatgaatggaagttgcaggcttggaagttgctcgggtgagtcagtgagtgagtggtgaatgagtgtgaaggccgaggacattactgtgcactactgtcgactttacaaacacagtacacttaagctatactgaatttatagaaaacattttttctttcttcaataataaattaaccttagcttactgtgactttttttactttataaactttaattttttatwttttgattcttataataatacttagcttaaaacacaaacacattgtacagctgtacaaaaatactctatgtccttattctataaacttttttctatttattactttttaaaattttttgttaaaaactaagacacaaacacacacgttagcctaggcctacatagagtcaggktcatcagtatcactctcttccaccttgacatcttgtcctgctgaaaagtcttcaggggcagtacatgcatggagctgtcatctccagtaacagtgccttcttctggatacctcctgagggacctgcttgaggctgttttatagttaacattttacagttaaattacttatttgatttccaaattgtactttaggtttggaggtgcgtgtacaggtttgttacatgggtaaattgtgtgttgtcggggtttggtgtacagtttattttgtcattttttttttttttgagacagagtctcagtctttcgccaggctggagtgcagtggcgcgatctggctcactgcaacttctgcctgcaacctytgcctcccgggttcaagtgattctcctgctttagcctcccgagtagctgggactacaggtgtgtgccaccacgcccagctcattgtttgtttgtttgttttttgaacggagtctcgcactctcgcccaggcttgggagtgcagtggcgccatctcggctcactgcaagctccgcctcccaggttcacgccattctcctgcctcagcctcctgagtagctgggactacaggcgcccgccaccacccctggctaattttgtgtatttttagtagagacgggtttcaccgtgttagccaggatggtctcgatctcnnnnnnnnnnnnnnnnnnnnnnnnnnnnnnnnnnnnnnnnnnnnnnnnnnnnnnnnnnnnnnnnnnnnnnnnnnnnnnnnnnnnnnnnnnnnnnnnnnnnnnnnnnnnnnnnnnnnnnnnnnnnnnnnnnnnnnnnnnnnnnnnnnnnnnnnnnnnnnnnnnnnnnnnnnnnnnnnnnnnnnnnnnnnnnnnnnnnnnnnnnnnnnnnnnnnnnnnnnnnnnnnnnnnnnnnnnnnnnnnnnnnnnnnnnnnnnnnnnnnnnnnnnnnnnnnnnnnnnnnnnnnnnnnnnnnnnnnnnnnnnnnnnnnnnnnnnnnnnnnnnnnnnnnnnnnnnnnnnnnnnnnnnnnnnnnnntctctactaggaatacaaaaattagcagggcgtggtggtgtgcacctgtaatcccagctactcaggaggctgtggcaggagaattgcttgaacctgggaggcggaggttgcagtgagccgagatcgcgccactgcaccccagcttggctacagagcgagactcggtctcaaaaaataaaaaaataaaaaataaataaaaataaaaaataggagtatactctaaaataatgataaaagtatggtaaatacataaagcagtaacatagccacttattatcaagtattgcatactgtatgtaattgtatctgccatacttttatatgagactggcaccacagtagactcgtttacaccagcatcaacacaaacacatgactagtgggttgtgctacactgttgggatggctgtactgtcaccaggtgttaggaatttttcagcttccctataatcttatgggactgccatagcatatatgtctgtcattgactgaaatgtcgttatggaatgcatgactgtattaaaagtaacctttcttttttctttttgagatggaatcttgctctgtcacccaggctggagtgcagtggtgcaatctcagctcactgcaacctttgcctcctgggttcaagcgattctcctgcctcagcctcccgagtagctggaactacaggtgtgtgccaccaggcctggctaatttttctgtttttagtagagatgaggttttaccatgttgcccaagctggtctcaaactcctgagctcaggtgatctgcccacctcggcctctcaaagtgctgggattacaggtgtgcaccaccatgcctggtcctaaaagtaacctttcattcctgggataaaccccacttgattctgccatattcttattctatttatatattgttgcaattgatttcctaaaatctggtttaaaaaatttgcatttctgtttatgaatgatactggtttgaactgtgttttgtaatatctttgtttttgatatcagggtaacgctggaaaccttgaatgaattggaaaatgttccttttcttcggttttctggaacagtttgcatagaactggtatagtttccttaaatgttcagtggaatttaccagtgaatccatctggtctcaagttttctttgtagaaaagtttttaactgcaaattcaattcctttttgccatataaggctattaaagttatctattacttgaacgaacttaacacacttttcagaagatccgtatgtatatatttacatgtttatmcacacacacacacacgtatatatttttgtagaagccttgaaagaaagagagaatcaaacaaaatacatagaaacaaatgagctggacatacagataaagctgtgattcacccagaacttaaacaaatcacaaatttcatagtttaatattggkacagaagcaaaacaacaaacaaataatacattttcccacttcagtaataaaatatgggaagacctgactatgagggtagagatcaaggctaaataaagctttatttatttacattaaaatataattttatttttatagagacagggtctcactgtgttgcccaggctggttttgaactccttcagctcaagggatcctcctgcgtagacctcccaaagtgttgggattacaggtgtgagccaccacacccagccaaaagctttaaatcaytggtgattattacaagctgcaactcgggctacatatgttactgggagctgattactcctatatctcactgcagcatagagtttagttatggcttttccccacaatattgtgagtttaatgtggagaactgtgaagaaaaacaaaagaaaccccaactaataattacaacaactataacaacaaccacaataataataattaataataaacccctaagggatgtatgagctggttttaattaagtagactaagagatactggttctgacttgcattcatctctacagtaaataaaaccttgtttttaaaaarcttcccatgttcctaatacagttaaaaaaatatatatatatactttaacctttttcctttcatatgcaaagatgttacttttcattatctcaagaatatcttcctttgaagtctgtgagggtggatttcagccaccagaaattggtgaagtgggggacaagrgggtgtgcttgtctctgtgtgcacaagtctaagtaaaagaggagcacataggggccaaaaagggacaggggagggaagctggagcagaaggacacctccctaggggaaggcaggaggctctaagtagtggagcaaaaacatgggtccctggcagcagactggctggaatagcctcaaggtctcagctgtcaatttttttttcagtcttttttccttctttgtttcattttggataatttctcttgctacatcttgaagttcctaattttttttttctgtggtgtctaatctgttgtcccattcagtgtatttttcatctcagttgacatggtttttatctctagaagtttaatttggatctttttttttttttttttaatatcccaggtctcttaacatagccagtctttagcttcttgaacatatggaatacaattcttttttaaaaaaatttttttacatagctgtctcctcaaacatgtaaggtatatgtatttatttacttagaaatgctgggatttggagatgttagaatcaataatgcttatatttcttgattgtaaatgctatcagaacataaagctattcaaattataagtgataaaaggatgtattataatcttctgatctcttaggctaatagaataaacaaatcatctcttaaaaatacagtaaagtgatatagtattcagagaagtaattactaatgttatttatttagaaaacatatatgcccttcagactattgtatccgtttggttgctttccttttataaaggaaagtcttcaatacaatacaataattattgaaaaatgagtagttttatcgtttgtctcaccataatttaacaaatacttgggtatagagttgaactggtttatctactgtttacacttttgaacggcattcaattaaggttagttttagtaaagatcttagaatctcagatgggacttttcagctttaggaaattggaatgtgtccctggactatgcccatgccagagtgccaagctaaaagaatgtaggaaacctctgaccaggcccttcaggggactctgtgcaaaataatgaggtcactagcatgaagagctctggactctgaggcagttggaacaggattctataatttctttccaatattattattatatattatatctctttgaggctaagaatccagggaagggaaagcagaaatggggttgctcaactgagaggttaaaaaaaagatgagggatgggccgggcrccatggctcacgcctgtaatcccagcactttgggaggctgagacaggcggatcacgaggtccggagattgagaccatcctggctaacatggtgaaactccatctctactaaaaaaatgcaaaaaagttagccaggcgtggtggcaggcacctgtagtcccagctacttgggaggctgagacaggagaatggcgtgaacccaggacgcagagcttgcagtgagctgagattgcgccactgcactgcagcctgggcgacagagcgagactccgcctcaaaaaaaaaaaaaaaaaaaaaaaaagatgagggatgaaggaccagaagttagaagaaggaagagcagtcttgcaagcttgagggagtgaggagagggatgtggttagagaaagaaagctcccttagaggccctggaggtaatgcttttctggaatacaattctaataactattactttcctgttctttattctcacttatttctatgttctcattcccagtcctccttcttcttctctctctctcttactctctttttctctcctctttctctcttagacatacacacacatacacacacacacacccctgtttaagaagtaaatgtgaatatggaaagcagatgagaagggaggttggattgaattgtggagtatttatttcagtttttatttcaatagttttaggggtacaagaggctttctttacatggatgaattgcatagtggcgaagtgttggcttttagtgtacccatcacccctatagtgtacattacaactcttttctatttaactactgtatgcttctgatccagggaaggtatcttttaaaatttcctttaattccctaatacagatccttcttgacttctgatggcgttgcattccaataaacccatcataagttgaaaatgtcatagattgggccrggcacggtagctcacgcctgtaatcctaacactttgggaggctgaggcgggcagattgcttgagctcaggagttcgagaccaacctcggtaacgtgaaacctgtttctaccaaaaatacaaaaaattagctgggtatatggtggtgcgtgcctatagtcccagctacttggggggctgtggtgggaggatcactggagcctgggaggtggaggttgtagtgagctgaaatctcacccctgtactccagcctgggtaacaaagcgagaccctctctcaaaaaaaaaaaaaaattacaaattgaaaatgattgtaatacacctactgaacatcatagcttagcttagcttaccttaaatgtgttcagaacacttatgttagcctaaagtttggcaaaatcatttaacacgaagccttttttttttttttttttttgagacagagtctcgctctgttgcccaggctggagtacagtggcgcgatcttggctcactgcaggctccgcctcccgggttgatgccattctcccgcctcagcctcccgagtagctgggacagcaggtgcccgccaccacgcccagctaattttttgtatttttagtagagaggggtttcaccatgttagnnnnnnnnnnnnnnnnnnnnnnnnnnnnnnnnnnnnnnnnnnnnnnnnnnnnnnnctgggattacgggtgtgagccaccgcgcccggccacacaaagtcttttttataataaagtgttgaatacctcatgtaacttattaaatactgcactgaaagtgaaaaactggtcatggggtccttgaagtacaattttactgaatgaatatagcttttgcaccattgtaaagttgaaaaattgtaagttgaaccatcataagttgaggaccgtctgtctgtacaatcttatatataattaattcagaggtttattgattgattgataacattttcatgctgtagcacccttagttctactttattagcacttgtgattgtattgtttattgtataagaagtcttaaatcctgtgttcataaaattccttccaaagaagtcagcatacttcatgctaattaatttattgattgtctcagcctttggcttttaccatacccaaagagtatcccacttcctcaggcatccaggatcctgcctcagcttaagggtcattgtgtgatcttgtactgtgctaatgaaaggaacactcagattatagtattgtgggcagagcccaggcctgattytcggggacttcgaaacttytggccagtaggaaggaatacatgtgacactgtccttgaactcaaaactacccaccacatgtagaatttgctctgacactgcaaatactcaattggactcagtgtaatatttgtatctcaaaggaattgaaagctgagatttcaaatgggtttcatggaattttgatcagttagaaaataattaatggaaaactatctagctgttaaaattgtctcattcttcttgcagtgcttttaattgtgttacacatgttttttgtttttattcttgagttctggtctgaagtgattgtcagtggtttgtgtttgatcagaagatccattgccctttcttgtatccctgccctacctccatgagtctccttgtgatacaacttcagaagaaaagatgaaaatcgaggtttttgttaactcctagaaggtgatagaaggacatgatagaacctggcagattttcagtggaaaagattgagtctagaattaaaagactatgtatgtttttatatgcattctatagtcttatttgttggtaattgaaaagttacaaagtaatgtatgcaaaatatgtgtaaggtatatagaatagcaggacaatgaatacccaatgtacacaaccaccagattaagaaaacaaaattatcgttgccattgaagatctccgtgcctttctcctttctgaggtaatctgaattttgtgttttctttatacttgaaccacatagtttgtatccctaaactgtggtttaattttacatgtttttgacactaatcaaatggaatcacagtgcagatatttttatgtgatttgcttttttcccatagcgtcaaatgtgtttgttttggtcagattttgcaaataatcktgggctgcttccacatagacgtataagtttattttgtagtaattttccttattcatctcagagaatatgatttatatgtttcggtcttgtggaagtaaaagagaatgatttcctagtggataaaaagaaaccagtctcctttaaggcattctgtctccatgcactccaccatcctcactctggaacccattgcagaggagctcttcaagggggtgttagctttttcctcttttacctcgccttggrcaggctgagacacctcctgctcctcaaataggtgtggcccagtgcttctttaccttgtgtataagaatcaccaggggaggggagctttaagaatattcacacctgtgtgcaaacactgaccaattaaattagaatgtctcctttacatacaattaaattagaatatttcttttacctgtttttacatttaaaatttcaattttgttttaatggagttgcttctttcatattgattgtaggtctttacatattctgtatattaatccttggactcctatgtgttagaaatattttctcctagtcaattgatttgtctttatgattccttttggcttacagaagtttttgatttttaaaatttgagacttcatcattatgacatctgtattttgcgtcttaactaagaagactttctttactcctaggttttaagctatttttcctatgttcttactgtatttataattttacttccaacatttagcactttaagccacctacagtttattttatttatttatttttatttaatttatttttttattttgaaacagggtctcactctgtcacccaggctggagtgtagtagcatgatctcagctcactgcagccttgacctcctgggctcaggtgatcccctcccatctcagcctcccgagtagctaggtctacaggcattcaccaccatgcccggctaatttttgtattttttgtagagatggggtttcaccatgttgcccaggctggtcttgaattcttgggctcaagcagtccacctgccttggcctcccaaggccactgtgccaggcctgaaggttatttatttatttatttagggacggagtcaggtatttatttatttatttattttgtgacagagacttgccctattgccaggctggagtgcagtggtgtgatctcggctcactgcaacctctgcctcctgggttcaagcgattctcctgcctcagcctcctgagtagctgggattacaggcacctgccaccacacccagctactttttgtatttttagaagagatggagtttcaccatgttggccaggatggtctcaatctcctgaccttgtgatccacccacctcggcctcccaaagtgctgggattacagtcgtgagccactgcgcccggcctattttttatgtgtagtaagaatctaacttttcttcaaacagatagccaggtgtgctattaccatttgagtggttctctctcctagtgatttgaaatacttttaaaataatttccctaaggtctgtttctagactctctgtttccttctaatgatgtctttgccaatttccagttgaatatcataatcttttaattactagtgtgtcataggatgtttttcaatttgatagagcaggtcttttctcgttactcttttgcaaacatttctcatctattttgggcattcttctattagatcttaaaaattactttttatcaatgtgaaattcacatcacataatgttagtcattttaaaggaaacaatttagtgagtgtgactggtagtacttcttgtggttttgatttacattttcctaatgtctgatgatgttgagcatctttccataagctcattggctgtaattatatcttctttggagaaatgcctgttcagatcctttcccattttttttcatttgatttttaagataagcttgttaggctgggcgcagtggctcatgcctgtaatcccagtgctttgggaggctgaggcgggcagataatgaggtcaggagtttgagaccagcctggccaatatggtgaaaccccatctctattaaaaatacaaaaaatcagctgggcgtggtggcatgcacctgtattcccagctacttgggaggctgaggcaggagaatcacttgaacccaggaggtggaggttgcagtaagccgaaattgtgccattgcactccaacctgggtgacagagcaagactccgtctcgagagagagagaaaaaaaaaagataagcttgttaatttctattaaaaggtcatgattggaatttgtgatcacattgactttttcaactcatttttaatggacctctttatagtattgagtcttttttgatcaaaagcagggtttatttgtttaggtcccttttatgttttcaggtgatcctcttacttcagcctcctgaatagctgggaccacaggcatgtgccaccacgcctggctaatttttaaatttttttaaattttaatttttgagacaaagtctctgttgctcaggctggagtgcagtggtgcgatctcrgctcactgcaacctctgcctctcaggttcaagtgattcttatgtctcagcctcctgagtagctgggattacaggcatgcaccaccatgcctggctaatttttgtatttttattagagatggggtttctccatgttgggcaggctagtcttgaaatcctgacctcaagtgatctgcctaccttggcctcccaaagatctgggattataggcgtgaaccactgtggccagccttccttcatgtttttaaaaataattttaaaattcaaattagatttcacaccctactagcttgtgattttggttgctacttagaattgatctttttttctccttgcattttcaaatttatcattgttggcatataggcatgttatcaataatataatttgtgagtatgtcattttagatgttctagatagtcattttatctgtaaataataaacacatagtctcttttccaatatttattcctcttccttttctgattatgttggctagggctgctccagcttagtgttgagttgtaggtggtatctcctcctaactgtaatgggaatgtcagtaatgttatactgttaagtattttatatatatatatatatatatatatatatatatatatatgagacatatttacatattatatatcatatttatatataaataagttaacatatgtttattttaattaagtgcttattaagtgtccttttttttagatgtttaatactaattggtggccaggcgtggtggctcatgcctgtaatgccagcattttgggaggctgaggtgggtggattgcttgagtccaggagttcaagaccagcctgggcaacatggagaaactccgtctctactaaaaacacaaaaattagctgggcatcatggtgcgtgcctgtaatcccagctactcgggaggctgaggcatgagaatcgcttgaacctgggaggctgaggttgtggagctgagattgtgccactgcactccagtgtgggtgacagaagtgaggctctctctcaaaaagaaaaaaaaaaaaagaaatactagttggtgataaattttgtcatattcttttttggacatttgttaagttcacctccccctattgctatatagtgagttatatttaatagatagactcttataggatatacttgcttgagtgtgtaatcttcaatatattgtggggattcatgttgttaatattttatttaggatttttgcatctatgttcataaatgagattggcctgtattctttgctttccttacttggctttgcaatctagaatacacttacttacagcatggtagcgggtttttcatcttagtctgtgctttggaatagtttacctaacatgggaagcaagatattatatttgtctttacatttgtttatgatgtattatatattcaatacttacgtatttcatctttctgcagttaaatctttcaatctttttatggttttgtgttttatgataacttctttaatctgtcaagtttagtgtgaagtagataaagaatgttttatttcttttccctgtatagctccactattatattaccatttagtgagaaatcttttttctattgatctgaaatgcctcctttatcatatactaaataatttctacatttggatttgtttcttagtgttttattcaagcattttttttttttttgaaacagagtctcaccctgttgcccaggctggagtgtagtggcaatatcacatctgactgcaacctctgccttctgggttcaagtgattctcctgcctcagcctcccaagtagctgggattacaggtgcccgccaccacacctggctaatttttgtatttttagtagagacgaggtttctccgtgttggccaggctggtctcgaactcttaacctcagatgatccacccacctcggcctcgcaaagtgctgggattacaggtgtgagccactgcacccagcctcaagcatcttttaaagataatttttggtaaactcttttgaaaactagattgaaagacaagtatatttttaagctgactttaatgcattttaattaatcaggctttgctttagtttcactctatgtattttacattcctctgcctttattggaaaagttatttgagatcatcagagaggagttttcagtggatctcctaagcttggttttagtggtgtattgatttactgaggctgccataggaaagtatcacaaactgaatggcttataacaatagaaatttattatctcacagctatgaaggatagaagtgtgagatcaaggtgttggcagggctggttcctcccaaaggctttgaaggagaatctgttgcatgtctctgttagcctgtgttggtggctggtaatctttggcttgtaaaacagggatcctgaactgtccgtggcctgttaggaactgggccacaacagcaggggatgagtggtgagcaagcattactgtttgagctccacctctgtcagatcagtggtggcattagattctcataggagtgcgaaccctgttgtgaactgcatgtgagggatgtaggttatgtgctctttatcagaatctaatgcctgatgattgagggccaggcacagtggctcatgcctgtaatcccagcactttgggaggccaaggtgggtggatcacgaggtcaggagatcaagaccatcctgcctaacacgttgaaacacgtctctgctaaaaatacaaaaaattagctgggcatggtggcatgcacctgtaatcccagctactcaggaggctgaggcaggagaatcgcttgaacccgggaggtggaggttgcagtgagccgagatcacgccactgccctccagccttggcaacagagtgagactcatcttaaaaaaaaaaaaaaaagaaaagaattaaatgtagtataagtggaacaaagttctttattataacagagttttctaattattattgggatataataaaaaggctatttttgtgtattgtttttgggcattattgaacttatattctaatactttttgcgtattggattttctagatagtgatttcatttataattgatcattttgtctcatttctaatatttatatcaccttttttgttatgtagcagactatctcctttagaacattattaaataacaaatagcaggcttttcctattcttaagttaataggaatgcctctggtgctttatcattattcatatgttattttatgttgctaatttttgtttaaacatttttccttttagcttttatttttaaattaaactttttatttttattttattttttgagatggagtctcactctgtcacccaggctggagtgagtggcgtgatctgggctcactgcaacttcttttttttttttttttttttgagacggagtctggctctgtcgcccaggctggagtgcagtggcgcgatctcggctcactgcaagctccgcctcccgggttcacgccattctcctgcctcagcctcccaagtagctgggactacaggcgcctgctaccacgcccggctaatttttttttttttgtatttttagtagagacggggtttcaccgtgttagccaggatggtctcgatctcctgacctcgtgatccgcccgcctcggcttcccaaagtgctgggattacaggcgtgagccaccgcgcccagccaactgcaacttctatctcccaggttcaagcaaatctcctggctcagcctcctgagtaactgggattacatgcgtgcgccacggcacccagctaattttttgtattttcagtagagacaacatttcaccatgttggccagactggtcttgaactcctgacctcaagttatctgcctgcctcagcctcctaaagtgctgggattataggcatgagccactgtgcccggcaaattaaactttttattttgagctacttgtagaatcacatgcaattgtaagaaataatgtagagaaatcccgtgtacccttcacctagttttttcttgtgtaactaaggtacagtatcaccatcaggtaactgcacataccttattcacattctaccattttcacttgtactcygtattcagattttaccagttttgcttttactcatttgtgtgtgtgttctgtcacatctgtagattgtgtgaccaccaccacagtcaagataaagaagagttccatcacaaagatcccttgtgctacattttcatagccacagccattgccctctctctctgcctccctaaccccatctaagcactaaactctataattttgtcatttccagaatgctatataaacagaatcatatagtatgtaacctttgagattgacttttctttattcagtgtaattcctttgagattcattcagattggtgcatgtatcaatagtttgtttttcttcattgctgagtagtattccatggcatgcatgcatcagagcttgcttaaccattcatctgttgaatgacggttgttttcaggatttggctattatgaataaagctgccgtcagcgttcatgtgcagctttcatttctctggaataaatgctcatgartgcatacaccctttacttagactcatctgttggtaacattttgtcccatttgcttattatttccttcctttctctctctccacttttccatacacacacaaatataaactaaaatttttccttaactgcttgagagtaaatttgactacatccttactcccacatacttctgtatttccaagaattaaggatattttmttacatactgtgatggttaatattaggtgtcaacttgattggattgaggcctagatagctggtaaagtattgtttctgggtgtgtctgtgagagtgttgccagaggtgattgacatttcagtcagtggactgggagaggaagacccaccctctgtgtgggcggacaccatccaattggctgccagtgcgtctagaacaagtcgggtaagctggcttgctgagtcgtctggcttttatttttygyccatgctggatgcttcagtccgctcctggtgcccttggacatcagactctgggttcttccgcctttgcactcttgtacttacaccagtggtttgcccggggctcttgggctttcagccacggactgaaggcagcactgttggcttccctacttttgaggcttttggacatggactgagccactaatggcttctttcttcctcagcttgcacatggcttgtagtgggactttgccttgtgattgtatgagccagttttccttaataaactccctttcatatatgcatataaactattagttctgcccctctggagaaccctgattagtacacatacccacaggaaagttatcaacttaatttaacataacttttgatatagcttttatcagatctatcatctataacaattttgtcaattcgcctagcaacgtcccttttagcatcttgtccccttctagtacaggggctggtctgggtccacatattgtgtttcattgttatgtttcctttacctcctttaatctgggaacagctctttacattgtcttctgtgacattggcatttttgaagaagcaaaaatgagaactttacatgtattgtctcctttagtacttaagacagctctacaaagaagcttttattattatcgcctcttttagatgatgagagggacagaaagatgaaataatttgctcaagtcatcttaaatggtagaacctggattcaaacctgggtgttttgacttcagaagcctgtttaaccactgagctctactgtctttcattaatcttttagcctgtttgtagtagcacttgacctttcagaaactgagaaccagggaaactattttctatattggctgacataaacaagtatttaatttgttttacagtagatgatccattttgtgatgacttcagatatttcatctgttgcttttagttggagttaaagttaggtctgcatctgattaacatttatggtactttatggaagtattaaatagtttaaatgaagttttaagcatcaagcagctggttgtcttgcatattagaaatagrstttataggaaaccctaagttgtctgggctgtgtgtttcaggccagataaggatagtttcttccaggacattcttcagggcttggtctagtctttgttaattgtctcaaagaaagagctccactatccctggaggaaggcagttttctaatctctcatctttctggaaggttttctttgtaataagatgtggcaattaaaatgtgccttattctttctaagattcttttaacgtcactaccatctgaagtaatatgaaatacatgtgtatgggtttgccaagattgcagtttccgtgggaatcataacattggatttaatcacatctgggttaatgaagcgtgcacaaaggctctgcatgaatataggttttatatttaatgtgcatctggaggcagcaaggtcttagtgatgtagtttccctgtaagtgacaagttgaacacttgctagctgaaggtttaaggtaatcccaaggctaggaactttgccacggaactgaggtcctgcaccttgaccctcagtttagaaggcatgcgtaagcactgggaatctggagctctttagtggagctggaggcccagcttatttccctggagtctgtagactttgggtttgttttgtctccatgagaagcagggattacagtgctggtgtttkgacttctttttttgaagtggtagggagaagaartacaccaggtctgtcatagttgtactttggtgttttgggaatgattttggtcatttttctttttctttctttcttttttttttgagacagagtttcgctcttgttgcccaggctggagtgcaatggcacgatctctgctcactgtgcgcgacctctgcctcttgggttcaagcgattctcctgcctcagcctcccaagtagctgggattaaaagcatgtgccaccacgcccagctagttttgtatttttagtagagacagggtttgtccattttggccaggctggtctccaactcccgatctcaggtgatccacctgcctcggcttcccaaagtgctgggattataggcgtgagccaccgcacctggcctatttttcttagattgttttctctgctgtctacctgacgttttataactattaagttcatggtgatggtccttgagagtggtagtggtttttacgtggaaaatctagaattttggattgctccaaaccctagaatcactatctttcaaactcactcatgttgaagggcatgaatgtggaacttaatttctccacrgaaagtggagctagagkgagggttgtctttgtagggcctctctcaggtccaccagtgccacgtgcttagctgacagaccaaaatcagaaagttgacttagaggtcatcaagctttccctatctatctgtggtctgttttagtatcttagtcattttactgtttagaattttgtgtcctccattcctccagattccttgaataacactagacttctccgtgactttgagggtaaattacaactggttgtgactttatatgtcatcttacaggagtgttctccaagacatgacgtggatcttgtgtgtaggcaggaagatggttcttagcaaggccttaccgtgcttagggctgaaagtctgttggtagtaacttccagatgtttgcagccgcagtcctgagagtagtaggcattgttgtagcaatactttcccaagactaaggccatgatataactgacatttttgaaaaaaataaataactaacacagaagctagattgatgttaatctcttgtgtaaaataaaaacaagtttttatgaacactgacattttatttgaactgatatgaacctagggaaaattactttcaattcttgtatgttttagtcattttgttcagttgattataggttctgaaagtcacatatttttccaaattgccatggtaaaattggccacgtggatgagctttgcaacccttttttcctttgtcttattacttttgagactagtgtatggagatgtgatggctcggattaccgttgaaattatgcgtgtagatagtgggtgagttctttctcagctttatttttaaataactgcttctgtatcacagcatgaaatttggattgagcttgtggtaaccttgctcaataaaatttatgctttctgtaagtaaaggccctaagtgatagtagttgttgctgaattgtttgctaaatagaatattttgccagtgtgacctgtaaatgggagttttaaaaatgtatgtgtcagtataattgtgtgtgtgtgtgtgtgtgtgtgtgtgtgtgtatgtgtgtgtttgtatagaggcgtagatgaaaaatctttggctattaattgaaaattatttaatttgatgatgaatgtatggtagtttcttacattttttctacctcatggatgttttaaaatttccaaaataaagagtaaaagagtctccccaaacggtaattaagaaaagggacaggggactgggcacagtggctcacacctgtaatctctgcactgagggaggctgaggccggatcgcttgagcccaggagtttgaggccagcctgggcaacatagtgagaccttgtctctacaaaaaagtagaaaaaattagtggggtgtggtggtatacgcctatagtcccagctactcgggagctgaagtgggaggattacttgagcccgggaggttgaggctacagtgagctgtgatcgtaccactgcaccctagcctgggtgacagagtgacataatgagatcttgtctcaaacaacaacaacaacaaaaagataagatgtaggttttatttgctagggagtagagacaagggtcaatgaaatagatgtcatgatttctaaaaccttccagggtggctttttcagtggtgctgaagtactgcccctgagttacttcaggagagagaatagaattttactgttgttgcctaggtttactgatcatggcagaggtattccagtgtgctgcccatacattacaaaaagaaaccctttgtgttttctttccacaagatccttttatttgatatttggagccaagtgtgaattctgacaccaataccttcccatgcttctttaggttttgatttttttttttttaaagatgaggttttaagatgaggcttttaattagtctctattgttttgcaagtgtttctctctgttccttccttcactggatggatggagagtggtttcttattgtttctaaagtacttgtgtttgacttgtgctttttgccactctccctagaatttgtctccgaagtctgcacatttttcccaaaaagaaaggttagaataaatttcagagggttgaaaatgccagtttgatacgaaagtctttaaagcataggaagaaatcttagtcgcttcagtgtaataattctgtagatgactttaatcgtagtaataaaatgcgggaaagaaacatgagattgaatttataatgttatactgtacagagtacacatgagaaatcaagctatttgttgaaacaatttccaccttataacatttttgggccttatttggtagcaaagcttgtatttgagatctctttcaattttggttttgtatgttttgtcattgcaaatcttaaatttgttattgtgtgatttatggccaaaactctggtacttcagtggcattaagatgattctgtctttattaggcaagtaatgatactgtagatccactcaagcagtatccttcatgtacttcctgccattaccgatgtcctgtgtattaccaagatgtgaatatactaaactccagcattcaaataaatcttaaatagactccgagtttttggagtgctatatgaatttataagagaatttcagaagcgagagaaagtttagttgtctttaagagttttcttttttttttttgagctctgcctcccgggctcaagtgatcctcctacctcagcctcccaagaagctgggaccataggcatgagccattgtgcccggctaatttttgtatttttttgtagagatggggttttgccatgtcgcccaggctggtcttgaactcctggcctcaagtgatccgcctgtctcggtctcccaaagtgctaggattacaggcgtcagcccactccagcctaagagttttcttaaattccgtaatgtgggaaatgtttaatattttgacggcaactattattgtctttaaattatttttattttttagagacagggtctaaccctgtctcctaggctggagtgcaatggcactatcatagcttactgcactcttgaactcctggactcaaatgatcctcctacttcagttttctgagtagctgggactacagcatgtgccaccatctggctaatttttagatttttggtagagatgaagttgggctatgttgcccaggctggtcttaaactgctgggctcaaaggatccttccacctcagcctccgaaagtgctgggattacaggcatgagccaccatacctggccttaattgtcttttaaatttagagttgaaaaacattacagaggctattcattattttccatcagggtatatcatattatttgcattagggtatattgccaaactgtgcctgtaattcctgatgtgacattaggccgtaataaattctcctgttatcaagaacatttattaggtgtgtaccctgtgggcatggtgtagaagtaggcagaagacatgatccctgctcctcagtaatttacaggttttgagagtacacagggcatctcttttaatgacttcattcagtaagcatttcctgagtatccactgtgtgctagcccttccaggaactggggatacagtgatgaacgggacatacaaggctctacactcttggaatttacatactggaaccctcaacacttcacgtgctaaatgatgaaattgttaaggaccttatgaggggaggtattactttgctgtggtatggttgggaaggctgtattgagggatgaggactggagctggacaggcgtgagactgttcatttcccactgtgtattctgtggaacctgctatcaaagatttcgtggtcaaatagatggaaaacatgacccacttgggattgtggagaaggcatcccaagagctggagaaattaggtgagacagtaggggagaggatatggaatttgagctgttctttaatgggtaaaattttaagagtgaggttggagtagagggtgagtgaactgtgtgagaatgtgcagggagcttgaagagtacgggccatgttgggggatgctacccaaaatgcacctgtccccagcctcccctcctaccctcacagaagctacccattgtccttggctccaccgtgtcacctcttccatgctttctgtgttttaacatgctcaagtttctcctttcataaaaacaccaacaaaaaggcaaactgtcttttgcttccacctttcccgcttcatggctaaatttcacaagcaatcaacagctcacgaactccacatccccccagcccattcatttctcagctgatttcttttttgtgttatccccattgcttcccccttgcacctctcactgagccccttgtgatatccatcctgctaagtgtaatgaacacttaatgccttatttcacttctcttagtgacatagggcttcattgccctctgtcttctcgaaatcttgattttctttctcttttccctgctgccaagcctccaggaagtagagaaaagacattttcttgacatcacactcttccaagttttctcttatatctccctcttaggaggccattttttctcagtctttgcaatttctgttcccttctccctggctattgaactttgaggctcctcagagtctcaatcctaggtcccttcctttttttctcgatattcttcctaggctgatcgcatctgtgttcaatttcagttgctttggttatgatttgttctctggtgactcccaaatttgctgtcagcccagatgttcttcagagctcctgacttttgtgtccagctgcctggtgttgcagtcacctcaaactcagcacgtccaattcttggctgatgatctctacccctctatcctcattcaataaccctgtcctggtgcatgtaactcccatccatccaattatgtaagctagaaaatatgaagttatctttttttttttgagacagagtcttggagtgcagtggtacgatcttggcttactgcaacccctgcmtcccaggttcaagcaagtctcctgcctcagcctcctgagtagctgggactgcaggtgtgagccaccacgcctggctgatttttgtatttttagcagagacagggtttcgccatgttggcctggctgggcttgaactcctgacctgaggtgatccacctgcctcggcctcccaaagtgctgggattacaagtgtgagccaccgcgcctggctgagatggctttttttctttatcagtaatccttgactgaggtcagtagtcccccagtkacctctgagggtctgcatcacttaggtttaattacctggagatttcacacagatcctaaaatgatatattgtaggtaaatggtgtccaggtaatgtctttcattaaaatgaaataattaatatacatttaagtccctccctctcatccactttaatacttaaggataaaacaggagctcatattccaactgcattttttttttttttttggtcttcttagaagagctctaacggttaacattgttgaataagaatgtcattgttgaataagttgtcattcatctatgtcaatgacaggttctagaaatgaaaaaaataacaatttatcttttttttcctttgtgaatcatgcttttcatgtcctaagaactcttcacctaatcgtaggtcatgatgcttttctcttatgttctcctctaagagttttatagtttttgtattagatctgggatccattttgagttaatttttatatatggtctgaggcaaaggtcaagattttttgttggttttttttttttttttggtctattgatgtccagttgttccagcactatttgttgaaaaggctatctttcctcccttgaattgcttttgcacttgtgtctgaaatcagttggacatatttgtaaggggctatttctgggatctctctgttgttccattggtctaggtggctgtccctctgaaaataccacagtcttaattgctatagctatatagcttaaaatcagatagtatgattcctccaactttattttttttggtcgttcattattttagttattctagttccttttcatttctatataaaatttaagataagcttgtctgtatctacaaaagatcttgggactttgctaagaattatgttaaatgtataaatcagtttggggagaattgatatctttactatgtcatggtctactagtgtcaacagcttaccactttaggtggaacataggaagcttaccacgatttaggcccctttaccctccctgctttatagttacatacattgaaaaccacatcagacaatattatacttttgcttttaattacctaatgtaattttaaaaactcaagaggagaaagtctagtactagtacacttaactataaagttactctccaacattagttactttttacttgtaaaattctatttctttcaaaatttatattttagtaagtttctttcgcttgtgtttattttttcttttctttttttctttcattctttttctttttytttttttttgagatagggtctcactctgtcacccaggctggagtgcagtggcattatcatggctcactgtaacctcaaccttctaggctcaggtgattttctcacctcagccttctaagtagctgggactacaggtgcatgccaccacatctggctaactttttgtagagacgagatctcactattttgcccaggctggtctcgaactcctgagctcaagtgttttgccctccttggtctcccaggtgtgagccattgggccctttcattactttatatacattgtttaaaaatattctgtagttgtctttttttaagacctgaagttattctgtactacattttgctattttttctttctgactgtcaatcgtgatggctctttccttatgtgctttgtaagcatttagcaggcttttgactgtaggcatattctgaagcaaatagttctgagaggagtttttggttcagcaatgggtgccaccaatctaggatcactttaagttcgtttctatgcttggggttcattagctggaccctattgtatgaatacaatcctgggttctgaatgttcagaggagactttcctatggaacctagatcaaaacagacacctgtgattttttttccttcaccagctggtgtattttttctagcctattttctcactgagattgttccccttcaagggtctgagttttttccaaggggctcacttcaacctttctacattttgtatcatcaaagccttagagtcttcagtccctctgcggctttaaaccactcttgatactaacaccagaaagtgctcccagggtctctatagcctcagtttctactttttctggtttctggctcccacttgatttttagctcctggggattttcttttctttcttgagaactcaactgtgcattttaaaagaaactggtaatattttgtttagcagttataataattcaataattcagtatcaggtggtttttcagatattgactccactatgttactagaaatagaagattttgacacacagcttccaaaccattcaataaagtatagattattgggtcccaggagggactcactctggtttctttaaaattggtcatttgggacaaaagttcttcctgtctctcaggaggggctgtggtagcgacacttgtccttaaaaggaagaagcatgggcatctttagtactgccctcacatctgccaaacagctagagaggttcaagaaggaagggaatgctcaactgtgtcaagtgctacagcaaggtcaactaagatcaagactgaaaattgacagtgggatttcacaattagaatgtctttgccagagtaatcccatggaattgggaggatggtctttggtccaggcaattcctgtttttctcaggaagaatgacttcttgtttatcagtatgtggttatttattttatgctgtcttattttaatactgtctagcttccaaccttgccttagatagagtagctatgtctgtcatagaaactggattcagccatagattgtaggacctatcttgtatacacctaggtccttaaagcttttgtttatatctcaggtgaggtcatcagaaggaagaactgaagaggtaagagcccagctggggtattaaagtaagagaaagaatataatgaggtattgtcagttttaacatgaagcctctattttgtggaatttttaaaaattatgaaacaatttgaaacacacaaaagtagagagaatagtgcattgagagaatagtgcataacccaaatttagtattttttgtacatttgccgtgtttatctttcttttgctgaaatattttaaagaaatcctgacatcatttatgtacatatcttaactatgcaatgtgaacattttcacatgtagtcaaaatgctgttatcacatctaatataaaatggattattctttactactatacataagactgtggaggctttctattttaaagtcctttgaacatgctgagattgttcctccttttctgtctttatacttgtcatactgtctgtctagaaggctctagtctgtgacctccacatggtggccttagtgacagtattatttcctcaataaaggctttcctgatgactgaactaaagtagtgtccctttcccccaccctgttggccactgcctccctgctctgtgtcactgcctgtgtgcttgtgtattgtctgtctcctcccctagattgtaagcgccatgagagtagggacctggtctgtcatggttattgctctatggccagggcctgaagcaagcctagcctattgtaaggaagcaaaggtttagaaacaagtcagctattagattaataaagattccaaaatttgcttaatattttataaccattatctcttcctacaactgatttctattccagagcttttcttttctcaagagctttaaccaacagctgtgtttgcaaaaagtgctgggctgttgtccctttcaggacatttaatcttttaaatcctcaaaatattttgtaaaatataagtgagtaaagtcattgctgacctgttaagaggcagtgtttttactgacataactctcatttgagatcactttatttgagcttgcagctaataaatctgttttggctcatatgaaacagggtggaatgatcctgtagtccacatagcctttaattgattatttgaacttcatttatttagtgcgtcatttgtattccatgttaggggtatatcaaaattgtcagttgttgggaatattctttagcatgagaaaaaatgtaattcagtaaaacaggtatgattctataattagacttggattcttttgaaaaacataatttcagaccgataaaagagacgagagaatggtacaaataattactttgtattctttacaagattccccagtgttaatattttaccacatttgctttagtatccctccccacttatcctctattgtgtttttttgttttttggtgagtggagacactcaaagccatcctcttttataacattatgcagttattagaatcagggaattaacattgatataccattagccagtagattttattcaaattccccaatcatgcccttttcctttcttatatgaaaagaaaattctggatcatgagtggcatagagttgtcacgtgtctttagtctcctttaatttggaacagtttttcctttcatgattttaacatttttgaagattataggccagttatacaacagggacagtttttagcaggtccctcaatttgggtttaactgactgtcttaatttgatttctgttactataacagagtgccacaaactgggtaatttaaggaaatttatttctcacagttctggagtctggaaagtccagtagtaaggtgctgacatctgttgagagccttcttgctgcatcatcctgtggtgggaaggcataagggcaagagagcaagagcagagagggccaaactcacttttatcaggaactcatttctgtgataatagcattaattcattcactatggttgagccttcatggccaaattccttcttaatgatcccacctgttaataccattacaatgacaattaaatttcaacataaattttggaggggacattcaaaccatagaactgatgtttcaaaactgacatgtttttcttagtgcttcatatcaggagacatataatgttgatttggctcattaccggtgtttactttgatcacttgattaaggtgggtctgccagatttttccaccctcaagatagattttcctctttgtgtttacataatatctttgaggatactttgaaactatttaaaattctgttacttcttaaactcttaccaactagttttagatttcattgatgaatacacattaattagtatgatgatggttgccaatggtaattttctaattccattgttttttctagatttatcacttgcgatactgctgtaaggaatggcttctccctttcacttatttatttttgtctatcagtaggaacttatggattcttatttagtcagttataaaattttgatatttaaatgatcatatatttggccagtagcagccttttcagagggctcctgtgaacttttgacatgtcctcatcattttttgagtattttcttactttctggaacagcaagatattctaggccagggcttggcaaaccttttctgtaagtggccagatagtaaatattttcgattttgtagaccatacagtccctcttgcaactgtttaactctgcccttgcmgcaygaaagcagccatagataatttgtaaactaatgagcttggctgtgtttcagtaaaagtttatttacataaataggtggatgcactatgcatagtttgccaacccctcttctaggctcatatttgtacgtttctaccctggtctcagaattggccatttttccattggttgcttttagtgatgagtggtgtttagaaactgagatctaggcactagatatgctcattgctactggaatgtcattgattctaggccctttcaggagacaaagctagggaatataagaatatatctttatatgctatatacatttgtgtgcgtatatagacgcatccgtatttctctatttattataaaccattgagttatactgatatctccagttccatttcgattctagcctttccacttttccatatttgtaatttttttctccaacattgacaaacttggctcgttatccacaagtatttacttatttgttccatctaggatatatagaaagcagttttggaattgctcactcatacttctataaaaaacctattaaccagagtttaatctttatttacacttattttttgtttttagccacaggatttggttaaatactgtaccccacagttacttgggttagtgtgccattcctgttacacccatttcctgctgccctctaatatattgtgatttatttatttttaattgacaagcaaaaaattacatatttttatggtgtgcaacatgatgttttgctatatgtatacattgtggaatgactagatcaagctacttaacatatccattatgtcatatacttatcatttttttgtgatgagaacacttaaaatacactctcttagcaattttcaagtatacttggcccctagatatccacaggggattagttccaggactcctacagctaccaaaaaatgtggatgctcaggtcccttatataaaatggcaagacatttgcatataacctatgctcatctttctacagactttaaatcctctaggttacttataatacctaatacaatataaatggtatgaaaattgttgttatgctgtatttttaaatttggattctttttaaaaattgttgtatttttatttttattgttgtttccccaaatatttttgatctgaattcacagacacagaattcatggatacagagagatgactgtatacaatatattgttattaactctagttgccgtgatatacaatagatctcttgaacttattcctccagtcttattgaaattttgtgtcttttggcacagacatctctcctctcccctcaacccccagcctctggtaaccaccattctctgttcctatctgttcaacttttttacacggcacatataaatgagatcatgtggtatttatttgtctttctatgcctggcttatttcacttagcctaatgtcctctaggttcatccatgttgttgcaaatgagagggatttccttttcctttcctttcttttcctttcctttcctttcctttcctttcctttctctttctctctttctctctttctgtctttctctctttctttccttctttctttcttcttcttctttttttttttttttttttaagagactggatttcaccatgttgttgcccaggctggtctcaaactcctgagctcgagcagttctcctaccttggcctcccaaagtgctgggactacaggcatgagccactgtacccggcttccttttttttttgtttgtttgtttgtttgttaaaccgaatggtattccattgtgtatatatactacattttgaaaatccattcacccttgctgaggatttaggttgattccgtatcttggctattgagaataatactgtaatgaacgtgggagtgcaaatgtctttttgatgtactgatttcatttcctttgaatacatacccagaagtggaattcctggatcatagggtagttctgtttttaattttttgagaaacctccaaactgttttccataatggctatagtaatttacatttccaccaacagtgtacaagggttctcttgctccacatccttgctaacacttgttatcttttgtgttttcgataatagccattctagcaggtatgaggtaatatctcactgtggttttaatttgcattcccctaatgattagtgatattgagcattttttcatatacctgttggtaatttatgggtcttttgagaaatgtctacctaggtccttttcccatttttaaattggattatttgttttcttgcaattgattgtttgagttccttgtgcattttggatattaactattatatgtatggtttgcaaatatattctctcattcattgtctctttgctctgttgattttttgcttaacagagtcttcttagcttagtggaatgccatttgtctttttttttttttttttttttgcttttgttgcctgtgcttttgtatttttaaagaaaaaaaatctttgccctgatcaatgtcatggaactttatttaactccatgttttttcccagtggttttcagtgtcaggccttacatttaaatctttaattctttttttttttttttttttttgagatggagttttattcttgtcacccaggctggagtgcagtggcccagtcttgggtcactgcaagctccacctcccgggttcaagcattctcctgcctcagcctcctgagtagctgggattacaggcatgtgccaccatgaccagcaaatttttgtatttttagtagacaacagggtttcaccatattggtcaggctggtctggaactcctgacctcaggtgatccacccgccttggcctcccaaagtgctgggattacaggctgagacaccactcctggcctcctttaatccattttgacttggtttttgtatatgttgtgagatgagtgtctaatttcattcttctgcaaatagaaatccggttctctcggtaccatttattgaagagattgtcctttccccactacgtattcttggcatctttttgagggccaattgatagtaaatgtgcttttttatttctgggttttctattctgttccattgctctgtgtgtctgctttgatgccagtactgtgctgttttgattactgtaggctatattttgagatcaggtagtgtgatgcctcaggctttattctttttgctcaagattgctttgcctatttggggtcttttgtgattctatatgaattttaggattgctttttctatttttgtgaaaaatgtcatggaattttggtagagattatattgaatctgtagattgctttgggtagtaaggacactgttacagtattccacaatcatgaacatgggatatctttccattttttggtgtcttcagtttatttcattaacatttgttgtgtttttcattttaagtagagttagcataatttctttctatttgaattgcatttttaggccatttcccccattctggtttgttttatgttgcttttttttgagatgtgaaacatcactgtggttccaaaagtcagaacatataaaaaggcatattaagtgaagtgttattccacatccatttcttttacctmgttatcacctgcctccctttcactgttcccatctactcactgtaggtagccagtctcattagtttctaatttactgtgttgtgtgtctttttgcacaaatgatcgtatgtgtgtgtgtaactcttattttttctttctttgtcatataaaaggaaacataccatagattatcttttagttaattcagaagctcaggagttggtcaaagtagaacatttctgtgtggtgaaatgagtggcctcaactcaatcaagttattggaggggagagtaggaacttcatcaggttatggtcaaattaagcctagaacaggaagtaagccaggcttacccaggtattctgccttggattaaaaagacgctaaattatttggtggcagggatcttaaatgataacaatttctctttcctgactctgctctaatctagacctttgtcctccaatctagaggttaccctttatgcttaatgcacatttgctatcctggggtctcttttttctctgtcgttttagaaaattcctttgcactttttttgtgctgagtcttctcctcattgtactccatatcatcctctgtttcagtttattgtgtcattttggtggagcacatcctttagtagcttcataagaaaaaatacaggaaattttttttggcctgctattttgaaaatgtctttattctacccccatacttgattgttagtttgactgcatatagaattgcagattagaaataattttccttaaaattttttacaactttactcatgtataatttacatacattaaatatttctggtgcttaacatttattcctgaaaatccagttttgctctggtatcatttccctttagcctgaagaactcagtatggcgtttcttgtagtacagtgctgctggtgatgggttttctcttttatctgaaaaatgtctttgttttgccttcattactgaaggatatttttgctggaaataggattcagggctgacagtttttttcttttagccctttaaagataagttattccattgtctttggctggcaggaaagaagacaataaaaaataaggaatctgctgccattcaaaatgttgttctgtttgaggtatttctttttatgttgactgctttagattttctctgtattgttcgttttcagcagtttgattatgatgatatagatataatttttaaaacaattttcctttttggggttcactcagtttattgaatctatgtatttatgtttttcagcaaatctgggatgtttttagccagtgtttcttcatttttttgggacctgttctcttcttctgggaaatcaattccccttatttrttttttttggagacagagtcttgctctgtttcctaggctggagtgcagtggcatgatcttggctcactgcaacctctgcctcccaggttcaagcaattctcatgcctcaccctcccaagtagctgagattacaggcatgcgccaccacatcccgctaatttttgtatttttggtaaagacrgggtttcaccatgtagtccaggctggtctcaaactcctgacttccggtcatcsacccgccttgaccccacaaagtgctgggattaacagatgtgacccaccaggccaattacctttatgtttgaccttttgttgttgtcctgtaagtccataatactttatgtttttgttcagtcttctttctgtttttcaggttgtataatttctgttgataaagtttaaactccttgagtgtttattcttttacctctattttgctattgagcttatccactgaattttttatttcagatattgtatttattaattttaagtttctttttttttttttctttttgagactgggtgtcactctgttgcccgggcaggagtgcagtggcgtgttcttggctcagtgcaacctccacctcctggaactcaagtgatctgtccacctcagcctcccaagtagctgggactacaggcatgtgctaccacacccagctaatttttgtgtttttagtagagacggggtttcaccatgttggccaggctgctcttgaattcctgggctcaagtgatctgcctgttttagtctcccaaagtgcgaggattacaggcatgagccactacacctggtctaaaattctcatttttaagtacgtttttatttctctgttgagagtttcaatctcttcagtcatttcaagtgtcttttcctttacctcagtgagcgtagttatcagagctgatgtaaagttcttgtctgatagttctaacatctgagtcattttgaggttgggatttgtagttttccctttagaatggatgttttctgggttcttagtatgtcaaataattttggattgtttcctgaatattattttatgtagactctgaattctgttaaattcctttgaagaatcttgatttttttttttttttttttttatttcactagcacttagcttcagaccctgttaggttcagattgcgtcttgtctcctgtaggcttaaatctcatttgaaatctcctgttggcttaaatctcatttgaaatttttaggcctttataatgttgcgttgagtctgtcctacatgtctacatggctaaggggtcagcctgagacttgaagagtcataagaattaggggagtcccttcttcagctctctcctcttttagattgctactgacctccacctgtggtcctttcttctagccaggcgcagcctatggaatttgtattgaagatttagctgcctgcattgcaccaaccctgtgatggtggcctgcccttgggacaaaacttctatttccctccccacaaattttataaaaactcatgaaattccccctactaataccagttacttgtccagattcctactcctcccaacagccttcctccctttgtttaccctgcagaatctataggtagttgtttctgatttttttccagggtttataattgttaacccaatttgtttttaagtcatttttctggctttgatggcaatcatagtctttcccaacttactattttcatcagtgattcacctagtgtgatattgaaaaacttatagtaagagatgcgcctggaaggatgggttagattatagagctgcagtgagcaaccctgaagggttttgaaaaggcactttatggctgggcgcggtggctcatgcctgtaatcccagcactttgaggggctgaggcgggtggatcacctgaggtcaggagttcyagaccagcctggccaacatggcaaaaccctgtctctactaaaaatacaaaaattagccgggcatggtggcacactcctatagtcctagctacttggaggctgaggcaggagaattgcttgaacccgggaggcagaggttgcagtgagccaagatcgtgtcactgcactccagcttgggcgacagagcgagactctgccttgaaaaaagaaaaaaagaaaaaagaaaaggcattttataaaatatcttctatgttgtaggtgaaacgtggagtgaagaaaagagattcgtgagtgagagacctgctaaaaaactattgccatctttatggtacatacaccgttgtaacaacctgaattcagacagtgctaattaagttggaaatgaaggaatctacttaggactcattttgaaggtagaatagacagaatttggtaatagagtactaatggagaaaaagagattagatgtctactgttgctgcccagggatgataatgatgtcattaatctggatgtagtatgcaggtggaaaatayagtttgaggagaataataaattgaattagaaacatgtggcattcaaagtgcttgccggtattattcagcaggatgttggaaagttaaagaagagctttgaagagcagagctggagatgaaaatttaaaactctttaaaagagaagtgagatgaggtataagagtagaatcttgtaaatggtagaaaccgaagaggtaagtgaaaaaaagaggagtctgtaaggaaacctgtgaattgtagagagagaaagagaagaaccacaagactgttgtgttctggaggccaagggtgaagaatttgtattacaaagatatagctggtcagtggcatcctgcacaaaaaacaagcaaactgagagaatgccattatttaagtagtgaggatttttctttctaggaatacagaaaactttacttcattatagagaagatgatagacgtcatattccaaaagagattaaagagtgtgtaatgggggaaatagaggttgtgagtccagaccacatttttaaactttggcaaggatgggaatgagakaaatggaatgatagctggtagcctgaggtgggcagaaggggagcagggccaggttcttacattggttgtgtgctattgggaataccccagtggcaagaataatgggtgtgttaaaagttctagagtagattaaaataacatgaagaacacacattaagagggttaggttataaatatgtagggacattttcccctctaaaatagaaagcgaagataggtgcaggtatggagaagttttgtctgggagaagagtgagtccatataggagagagttgggaatgagagagttaagagtgaggttgatacttccgctctcagttatggcatagaaaataattggaaacctggctcactgcagcctccacctctcaggctcaagtgtttgtcctgtctcagcctcctgagtagctaggactacaggtgtgcacccctgtgcctggctaatttttgtatttttttgtagagacagggtcttgctatgttgcccaggctggtcttgtgaactcctggcctcaagtgatccacccaccttggcctcccaaagtgaagaacactttcaccatattagaaaggacaggtattaagaaaatacaagagaatattttgaacaacattctactcccaccatgaaatgttagatgaaattgagaaattcctatagaaatgcaaattaataaaattgattcaagaagaaatttaaaaaatatgaactatcttatctgtttacaagttttagtttttttcttctgatgcctttctttggctatggtatcaagggaatactgtcataacagaatgaattctctattttctggaagagttgtaaaggatttgatgatatttttttcttttgatgtttggtagaatacaccagtgaagacatttgagcctggaagattttaaattaataattctatttatttacttgttatatgtctattcagattttctactactttttttttggagacagggtctcactctgtcactygggctggagttcagcgatgtaatcacagctcacgctcactacagctttgatctcccaggcttaggtgatcttcccacctcagccaccagagtagctgggactacaggtgtatgccaccatgtccatctaattttttgtacttttttttttttttttttaatagggttggggttttgccatattgctgtggctgttctcaaactcctgggttcaagcaatctgcctgtcttggcctctgaaagtgctgggattacaggtgtgagccaccacatctggccaaattttctctttttgactcagttttagtaatttttatttctgggaatttgtccattttttttctaagtttattgtattcctttataatccttttaatttctgtaaggtttatagagatgtcctctctttcatttctattctktggacaccctgtggaggtagaaaataacccttccaattaacaggtaggatgtctatgctggaagcactccacacgccaacaaaatttgagagaaattttattattcacccaagagacttctggggatggtagggttagtacaagtgggtctggcctgccttgagttagacagagggagtgggttatgcctttataatggctagggtgctggsgagttcccatgtgyaggctgaggatcggcaaaacttgaattttcccctggygccaaaggcaaggcacatgtggacttccttattagcctgatcagttgtgggttcaaaaggggagaagtgaggtgaggcttaacataagtcagtggtcagacatcaaaaatttaaaaaatggagtgagactccttattacaattcttsactttggaattaaaagaaaatttccttgttctttcttttcttcagattgtataacgttaattcatctaccttcaaatttattggttatttcttctgccagcttaattctcctcttgagcttctctagtgaatttttcatttcagttgttgtctttccacttgaaatttccatttggctcttttttataatttctctttgttaatattctgtttgctgagtcattgtcatcatagtttcctttattttaaaagtgttttcttctagttctttgaacatatttataatagctgctttgaagtcctattgtctaacttcaaaatctaggctcccctagagatagcttttrttgaaacttgtccccttccatgtatgggtcacgcttttctgattctttgcatatcttatgaaaactggatatttctgataatatattctgtattctgatttccttctccccagagttagaggtggttgctctttttgtttgtttagtgacttggctggactaattaattccatggagtctgtttctccatggagtgtgtgtgtgtgactgctgatgtctctgcttagctcatcctttcttgtttttatttttcagtatggctgtcaagtatttgcctcctgggtcagcgtatcttagtggtcagcctatgattggtcagaggttgtgtttaaattccttgaaacaacgagcttccctttgtcattggtttttgtgaggcttggagaatgcattcaaagttcagaaagtctgcctgggttttactttctccatttgcaaggcctcatctttttccaggaatgagcagcttgctgtggccctaacatttctttccttcatgtttgcagtcttgtgcatgtggacagtcttccagaccagcaggaaaaaatagatttttatcaaggcccagtctggctgtctcattccttagtctccacgttggtctgctgatctgttgcttgcgctgactggcattgcaaactcaagttagctgtaatattggctttccctccttttttgcccttgaaatcactttttgacaacacctatgggcatggaattcttctccaaattaatttagctccctctggcagtggagcttcctgtcatcacagcttgtcctaccctggtagcttctgtaccaaggaattgggagcgagtgtgggatgataggagccccaggctaaaacaccacactcttcactgttcttaccaagattcagtagattttcttggaccagcacttctcaaatttgttgtaatgtttttgatcaatatcaagatctttaaatagttttagcaatgtcagttttattgttgctttaggggttaatatttgtcaaactcctcattcaaccgtctggatatcctttcccctgccccctccctttctctctatctttcatctctgtgtgtctccctgtctctgtctctcatttttgaacatttaaattttattcaaactgaaatttattttggaatatgttatgaagtagggatgtattggttatttttttaaaatggtattaagtagtgtcttaatactacttgttgattaatccatgtacttcttactgatttgtaatataaatggtttatttttctaatctcattgagatttattttaattttgccctctttttttttcttaatcaatagtcatcttttgcttgtttttcccatcttttgctttccattggctcatctttttctctctctaaacctgtctttggactttatctctttgagtttccttcgctattcggcttcatacattccatttgctctgatactcgtaagtactaaggctaggctaagacaagtgagatgcataaggcacaaaaattctaggaagctctcactcctgggtcctgcaagtgtgggattagtactcatagaactttgcgttttcaaattttgcaccctaagtgcctggcttgccccattgtagtcctggccctgccactcatgcttctcactagtatatatttgttgtaacctgacttctgtcccaaataggcttcatttattccaatttttgagcctttgctatgtactctgcattgtgctaggttttggggaatacaraggttctcaagacaccgtttatttcacccagaagccttcttcagatttgcccttagtgaggtctagtgccttttccccattcctcatccttcctgccttcttgtaccatgtgacattattgaccgctattgcctgttcatcctaatgtcagcccagctcttaagaatgtataactatttccatggtaggacaccttttctagggaccagtgggctgttgggcagtgtatcagtggccctcattctggaagttagtaaggattggaaactggcccgtgctttcaatgtgtcagggtaggagtgcccagggacttgttcaggcttaatgggcctttataactatgtcacagggaatagaagatttcttgtttgttcattttctttctttttttttttttgagaaggagttttgttcttgttgcccaggctggagagcaatggcacaatctcagctcactgcaacctctgcctcccaggttcaagcagttctccaccttagcctcctaagtagctgggaktacaggcgtgcaccaccacgcacactaattttgtgtttttttagtagagacagggtttctctatgttggtcaggctggtctcgaactcccraacacaggtggtctgcccgccttggcctcccaaagtgctgggattacaggcgtgagccactgtgcctgcctgtttgttcatttttcttttttgagacagagtctcactctgttgcccaggctggagtgcacagtctcggctcactgctacctctgcctcctgggttcaagcaattcttgtgcctcagcctcctgagtagttgggattacaggcgcatgccacctygcccagctaattttttgtatttctagtagacaccgggtttcgccatgttgcccagtctggtcttgaactcctgagctcaggcagtctgcccgccttggcctcccaaagtgttaggactacaggcgtgagccacgatgcccagccattgtttgttcattttctacttagcattttatatactcagaatctttccatctccttctagtgctttggtacccaaatgtggcctttactgcctgcctagctgtccagcttattcttgccaattttgttttctcagtcctgcgttcttcccccattctttgctgacttgtttttaaagtagtttcctggtatgaccctgctctgcttagtgttctcattgcttgttcatgaaaacaaactcatccattcatttatggagcagcttttgagcacctattctatcctaggtgctgtgggagctgcyagagttacaatgacaaacccaatcaaacattccttgtctccctgagctaaagagacaagttaggtgttactcacacaaactgggataactgctgtgaaggaaagatacagatgcagctgatctagggacactggaattgaaatctgtccccttgtctcacttacctggcagtaactccccttcattttgaacttctgcctgaatcaggattgacatgtagtgccccattttcaattccagcgcttgtttttgggttgctggcagtttgctctcgactcctcgccccaaccaaggctgccgcgtttgttttcttagtcactagtggtagcataccctgatcatggatctgtcctcacttgggagctcttttctcttttttttcttaatgcctgcctctgttgattcttttcctacatcttcattagcttctttgttgtattttatacttctttacatttcctaaaagttgccctaacccagattttgtcagggtaagagtgcccaggacttctacagggataataggccttcacaatgatgtcacrgggaagggaatgttgcttgttcgttccttgtcctatgccctcctctgtatctgcgtaccctttcttggcaatcttatccattcttgaacactccgtgttaccatctttatgcaaatgactggctaacttctctctctcttttgctcctgttttcaagtatttggtggattgccccatgtggaggcatataatactccaagtagaattcatcatcttctctaactttaccaactcccagtctcctacctagaaatctcacacaaccactcccaccttgctcacttccagacatgcctcgttgctagatggtgccactttgtcctgtgtaataccatggtaagggcctcttcttttcagtgtcctgaactcaagttcgggtcttcctttcctttcacctgtctgtcctgattttctcctaagatgcatctgctgctagtatctgtcaagtccagatgactctgagtcctgtaccaggttaatttttcctgaaacaattctaatctgttgtttttctcttctgctcattcatgctttgaaaactccctagtgcttttgaaaaactggcctagttttttagaccttccaacttgttttaatttccttgccactgcctcccttcatataggctggactctatccaaatggaattaattttgcgagaactcgcctgtattttctgtttgcgcctctatttttatttccttttgccaatagtatgctttcctcacactcttagttctttaaaatctctcctaaagtactctcaggtttcctgacctggagatactctttctctcctgtcatctgtacatttatccacattttaaaaaaacatagtgcttaccacttatccttcattctgtctagtgtagtgccctgaagaaatatgtgtgaaattaacgagtggataaaagcatttctgtattaagccctcagacagtcttgactcctccatctgcctttcccattcccttgctgtttatataaggccatctctttctctcccttctttcaactggattggctttatctgtgaatctctttatctttccctaagtggcctattatcctttgtctccattgcttttcttctgctgagttagtattaatttcaatttaaagagaaattacatcattttggtgaaggacgtgtgtgggaaatatagaggaaatggaagctagtgttcagaatgacatcttgattcattttgtgggaactcaggctgcccacaaaaatttcaaatatagacttgactcctgggctggtggccagcagagactagaaagtagaagttgtgatgacatgttcagcatccaggtggaaggccaggggccagctgcagggccccacattccagcctgctgatcctggcagctgctcttatattccttagatacagctgtttgagcttctgatgagacagctggtttgaggtgatggcaggtaagagtaggggaagagacgtctaattacagtattgctgtgttttgaaagcatgtgaatcatctggggctccctgcatagtttgggacgtcaagttgtgacaatgaattaggttttgttggtggattctaaggaattgacttacttggtttcatagaggtatatcatttgtccggagttggacttagtaaatgccacatattgagccccagtttagtacctattccattacagcttttagattctagatctttattatcacttttcaaaactatatttctttatatttttgtgcatttcacaagctgaatagaaccgcaggattccttatttttcacatcattgccccatttgtggagatgtttagttgaagtggcccaaagaagcagtctagtggtacctgtgagggtgaaggccttgaaaagaaacttgagacagatggtgtgcttgactaactgccccagagaatgtgatgccagaacccaggaggggcaccatgttgcctttgccattgaactactaaatttctgagaggacagaggaggctacagcttaaccgctctccaattaccaatctcttcttggtttcagcgaatgacaacagagctgctcaaggcgggaactctgagctaagcagtggaggtttctctggatctggagagaagagtgaccttggagccaataatgagccatcctgactacagaatgaacctccggyccctggggacccccagaggtagtaaaaggaaaatggagtctgcctgaataactggagaactgaaatgaaagtggaatgggtgtgaagtggaggctgtcttttaggactgagggctactataattcttttagtgacctgttaagtattctgtgtgatttattctagaattagatgtggtttcttgctgtcttaatttattgttgtattaagtacagctgtttaatttcctctagaaaagtggcaatcttttagtaatttctattttcaaaaagtctgtgtgtctataaatagcaaagaatactgaactcattattcagattatgttccatgcgtgttgttgtgctgatttaaaactcaagtctcatctgtgtatattttattcatgttttcttagccactctttcctttttgttattgttaaaaatcaccatcagggagtttcagtctcttgttggtctctttaaataataattgtaaaaaggtataatatctccagttttaaaaatacacagatgtttgaggaaagagttgattgctgcctcctgtttctaggtgtgtctgctgtggctggtccacatgacattggtgcttcgccaggtgacaaaaagtcaaagaacaggtccacacgagggaagaaaaagagcatatttgaaacttacatgtccaaggaggatgtttcagaaggcttgaagagaggaacactcatccaggtgcttaaaatctactggaaggctattctctgaatatgtagaatccaaaacaatctattaaactgtttcctgttctgtgctatatgctttcagagagacgatgatgtaacaggtgcagggctgttatgatggcataacagagatgatgaggtaacagattcttcttagaactacagtacatttagaggtaataagcaccacaagacaggaacaggaaaagtgctctgagatttgagaggagggaaccactatttcccattaggattgtctagagatgctttattggaagtgacatgtttgagccaggccatggattggtgcagtttgagtragtgaagataagagagagctttacaaatgtagggaccagtgtgagctactacaatagaagtgagaaattgggtttggatatatgaaacattgaatagttcagtttttctggagcatgtggatgctgaacgacrgagaaaaatggatgaggttggaaaggaagcagtaaacaacaatagacagtatttgttgagtgctttatactttacaaactatgtttacaagctagttcagtggtttggctgaacaaatgtttatggagcatccattgtgagccaggaacagttatggttagaataagtgtgcagcatgggtgcctttgacatggaggtagacaagattgccttgctgtacttcagcttgcagcccagtggtrggaggcagtcatgtgaacagatgatttggggataaaatggcaagtgctcagataaaagggtgaccagggtatatggcaaaatattggggggaaatggggaaactgtgtaggctgaggttctggagaggcttcctggagttggtgaccctcgtggtaggtattgagggtctagtttgggcctatcagatgagtgatatgtgtgtgggaggtatggagaggcagtggcgctaacgaaaacatgaacttgtgaaacaacatggagtatggcagcttaggcctccttgggcataaactatcaggcaggtagtaggctggggagggaggcagggccacatattctgtgaattaagtctatttcataatactttcattagtatagaaatattgccatgtgctacctggctcacttgaaaatgctgtgttccattttctcttattctgagagcccagcttctgtatttgtgtttttggctgaagatctaaccaatttacagatgctgtcatcttctcttcctttttgtcccctccctccctccctccctctctccctccctccctccctcccttccttccttccttcacctttctttacctttctgtatttatctgtggtcaagtgcacacgtgcacaagaaagaagaaagaaaactatcttttaaaaaatgagttggtttttctgattcttggagtactcttggtggttttaatttattatttatttatttattttttgagaaagtctcactctgttgcccaggctggagtgcagtacaatcttggctcactgcagcctctgcctcctggattcaagcgattcttgtgcctcagcctcccaagtagctaggattacagaaggtaaaaattagtcatgccatcatgcctggctaatttttgtatttttagtagagatggggtttcaccatgttggccaggctggtcttcaactcctgacctcaagtgatcctcctgccttagcctcccaaagtgctgggattacaggcatgagccaccacacccagccctattggtgtttcttttttttaaagctttccctggatttatttgacaaggcctctcttaggagagatgaagctgcatttggatgttagtccattcattaatccattcatttgctcttcattgttcagcccatatcccaaacaccattttatctgtaagtttcttggcccttctcttgtttcacataggaggacccattgtgcctttccattcttatcctcctgcactctcctccaggaacactctcctccattcaccctgagccttccagtcttttcctctaaaaactgttcttcttgatgtctctgtgactttgtgcatgctgttcctggtgcttggaatgctttctcctgctgccttgatgtaatggtgcttaccttttaagtccgtgcctaaatgttacccactttgagaagcctcattttaattctccaagtagagttggctgttagtgttttcctgtagttgacttctttgttttccctttattctaaacttaacaccatttcttggcttttatgtttcccccagatagactgttcatgtccttgatggcagggtcatgtcttgttccagaagttagctcagtgcctggcatttgactgttgcttaatacatttatattgaataaatacttacttactgactgaataaaggatccagatactgtcttttgaagaagagttgggggaacttcagttgttagaacttgaaagaaaactagcctagaattttggttatagaattatacctgtctagagataaggagaggacagcgaaggagaggacagcgttctgcagtgatattagcttcagctcccttttagtttttgcttttgaagcaactcgttgctgatactcaaacaaaacaaaacaaaaatctgatcaatattaacaactctaattcccaggagtttgtaagtgattccttctggcctgtgacatcatgggactctgcagccagggcctcccccctacatatgagaacagttgttctttgcagatgggaaaaggaatgggttccagatatgaggtcaccgtgtgaaatatacaacactgtaaataagattttcataggcagagaaacagagtccatctgctgcttgatataaactttatgtgtgcaagccttgcggggtaaggtaaaaggccagacaagaaaggatgttttaatgctgatggagaaaattaagtgtattagagatacttagaaacttttgttaactttagtattcaaactcatctcttttgacctcttttttttctccctatccagagaagaaacttttatcgagagattgaagggggatttaaaaaaaaacaggagtagagtatttttattttgttttcaataccttaactaatacttcgacatttcattagtattttttcctatgtggggaggagaccacagtttcctctttccagtgtttgaaatggcaataacagtaacacatggtcatgtacatgtagttttgaagtttaaaaaaaaataataaattctcacatcaaaaaatgtatttcatttctctcttcataggtagagtactgagaggttgttataggagatgttgggagagattagagtaggggatagacaagcctggaaggggctccagtttagggtgatgatcaaggtgacatgggtatgaacatggcagaattggctgtttcagatcccaaaagatgctttggctaaaggaagttcaggctaagcctccagagctgtcttagtcatgatgtcggagttcctcttagaatagaatattggtgtgaagttgttattggctctctgaaaaatcctagtccaggaagatagaggtcaggatgaactagtttctgggaccttcaccatttgttaagagtgaaatcaagcagggtgtggtggctcacgcctgtaatcccagcactttagaaggctagggtgggaagattgcttgaggccagaagtttaagaccagcctgggcaacatagtgagacttcatctgtacaaaataaaaatcagccaggcatggtgatgtgcacctgtattcctagctactgggaaggctgaggcaggaggatcgcttgagtcctggagttggaggctatggtaggtaagtcatgatcatgccattgtgctccagcctgggcaacagagtgagaccctgtctctctctctttttttttttttttaaagagtaaaatcagctggagaatacttggggatgaattaaagatgaggggaatagatgtgatgttacagtggaatgcccagccacttagaagggagagatgatattcataacattaatactgggggtgatgagagaactttagctctgcaggcattaattaattaattactgcaacaaatgtttcttgacttcttactcagtgccaagcgtataccagtgagcaagttaggcaagtcactggggaggtaaggaaaaacaactaaagaaaaagagaagaaattatagactgatcattgctaataaagaaaygggaagggtgagagagaataattagagagagcctctttagtagggtcgttagggaaagcctctgtgagatgatctgtgggttatctgagatgagaatgaatcagccaattgaagaattaggagaagaacataggtggatagctcagctagtagaacagcagcaagcagaagaaggcttggtgtttctgagaaatgagaaggaagcctgttggaacattgtgagcaaagggagttayattatgggacaagtggagagttaggcagcagccaagtcatgtagggtctctaggctatgctggagaattggattttgttcaaagagcagcaggaagtcactgaaggctcttaagcaggggaagaaaataatctgtttcatgctttgaacatacctctctgggaattgtgagatgaatagagtggaagctgagaggccactcaggaaggtatcaaagtaaaccaggtcagaaaacatggagatgggaacaagaaagtggcagtaaagatggagaggagtggatggatggatggatgtggggctagaactgatgtgacatggtgatggatgagatatggaaggtgaggcagagggaggcatccctgatgcttgctgagttttcgaattgagcagctggctggatgatgttgccattaaccaagacagagaaaagcaagggttggaatgtggtgctgagtttttgggcaagagggatagctggcatacatgagtgaasaggccctggtggtgaccgtggcaaacagagagagaggctgttcacagtagttgagagcatggagtctggagccagattgtctggccttgaatgtgatgtgaaagcgggcaattttcttaacctctcagtgcctcagtttcctcatctgtaaaagcaaggataatagtatctacctcatagggttgttgtgagggttaaattagctgatcgatataaagctcttcaaagagtgtgtggcatgtcgtatgcctgcataagtggcacttgagttttgtttttattactataagaggagcgtctgttattcaggttaggtggttgctgtcatttggagaaccctgtccaaagctgttagatcttatgatttttcaagaatatctggaaatatgtattttatatgtgtgaaattcctcagttttaaggactctcaaacaagccaaatacagtatgtttgtgattgccagttagactgatttagcccagttgtgtggtgtttttctatggtactgtttagctcctggggtataggaagggagaaagcagatagctggggttagttgagagtagagaatcaagggtaaaatcttcaaggtcttttgctggttgagtatcagagtaagaggtttgttcaggatttgcaacgttaatagataatgataggccatggcaattaggtggctagagaagggagtaaacagtgggaggacaatgaatggtgacaatgtggtcacagctttgggctggagatcttagtgaaatcgaagagttgttgaagtggggtttctaccataagtagacagaagattgccatcggaaagtgcgatatttgaattttttttttttttgaggtagtgtcattagtagtgctgacgggatccaggctgtgaacgtgggagagagtaggtgggttaggggagcaaatggtagttagagtgacaggctagggttgcttggtcttcaacatggatgtgaagtcccaaaaatatatatagtagtgaggatagagaggaaggcagtgaactgctagtcaaaatgttagtgaattggagctttgacccacctgtaaatttgaggatgacagcaccaaagaggtgctaatgatatgaactttaaaggatctgggatttttgaaagagaatggaggaaaaaatacttttaaagtcatgatggggaagcaaagagaccttcctcccttggtccctgagatacatgggttatgagagataaaatagactccctctgagagcactcgagagaagcaatcacttcagggaacagccaggtttcaattaaggcgaagaatcaggagcatctggagaagagatggaggctatgggatcctcactgatcaagtttcaggcctagggaagtgctttaggaagaagacaggagatgggcaattgggtcaggttaggggatggctatagaaatgaaagccttggacttttgtaggtgagtaagacgagatctgtgggaagtatcctttagttaaatgaccatttgtttttgacagacttaaatgccagctgcttctctcaggctataggaacaactctggtctgctgcggagctctgtgggagtttctgctttcttagtgtgatctgcattccctcaagggctctgtttccgaggtccagttcttcagagttatgctccagtcaaatttgcaaatgctgttgtggaaccaggtttctattcttccttgtgtgcttttgtatatattgggaagtttgggatagagaatcaagggtaaaatcttcaaggtcttcttaacatcttttcttttaaatagagcctggatgcagccctgagcaacctgtctcttttccctgggcccagcctggcctgtctgagtgccctgcaattaaaggcattttcaaagctagaggcattctgatctctgtacttgttcatatgctaaccattctttgagcgacaagggatgatagaagaataggaattgaaaaaaaaacttaggccagagaaaagcatctggaatcagaaaatgaaattgttagacatttaatttcaatgaattgacttttgtttgtttggagtctcttcccctcacgagactgtaagctctgtgatggtagagactgtctgttgttagtctcccttgtaccccgtcatttgacatggtgcctgccatgctattcgttaggaaatatttgttgagtgagtggatgaatatttaggttaaatgtaagttttttccctccttccctcaacaagaaacagctgtctagaagtggatttactgtgacactctttaacaagggactggccttggggagctttgccaaccttatctcctggtccctccctcttctgtgctaggcagagttatcgcacaatggagaagagttagtgagtgccctcttaaccacttttgctaacacagtgtcctctactatacttctcatctgatttatttgcaaattttgctcttctgtaaaggactaggtcagataccatctctgaagcctcttctggtgccctcgctgtgaaagtaagctgtacctctgctttatgttttcctttaaaatagggattgagcttagttaatcattatcttctccatcagtgtgtctcagggtcttgaatatagtccatactcaataattaattgttgaattaaggactgaatgatcrtttgtagtagtctatttgagtgttcatgatattgtaaactgtggcatggacatttgtaatttaaacatggtacagtgcagaaggaaattattttctgctttattttatgccgttgcctgttttgttaattatgtatctttgagtctttaaacgttttagggagaaatgttatttaaaacactttctcaagatatcctttgagtctggctgttagaaaaataactgcttccatccatgtgttccagtggcctgagactacagctggaacctggggagccttacagcttcctgcaagagcctgaaatactgaactgctattgaagaggcccccacctgcacccctgtgtgtaaatagaagcagaccytgatttggtgctggaataacatgaagttgaaggcagactgggtggcctggctgttggagccaggattccagtttgcattaagagctggttatggaccattttgaattattgactcattcagctctgcagaggggccagagtaaaaaataatgcatccagtttcataaggctcagtatctagcttggaaatcaacctgtaccactttgaaaattgtcacagaaacaagcaattgtggaaaggtcttggaactgggagaaaaaaaaggcctttatatagtgaggcacaatccctaggtaatcttgtttgtaaagtcaaggtttaaatttgargactagcatataggggcatctaaaatcctaatagttgccactttcccactctacgccaagctctgttgttccttacctttgcttgttcacaccaaggtgccagtctaagctttctgtttttgatagaaccctctatttcagatatcaacataaattgtgtttcctgcatttaatgaatakttcttatacatctaacttgttttctcaagtgacctgtttaattttaaaactttttattggagaataacatacgtggaaaaatcgtaaatatatagctagattttcacaaactttattttttgttttaaagggtgtattgagaattaatccaaagaagtttcatgaagccttcattccttccccggtaagttcaataaatttataataaactttatgtcacatttaattttttagatctgctccgaaactgaaatcatatattctaactaaaaagcagagtagtgaaacaaaattgacgatgggcaaagatttgtttcaaatttaaataaactaaattttcttttggttaacaaccccttctgtcagtcttaaaatcgcatgccaaatgaaagggatggcatttgttacaaggctgcaaagagcagctggacccaggcagactacccaccagttcgtgtaactggacgcccttggtttatggcttaaaaggatttatggttttttccaccgatttaagttaatctttcctaaacaaatatgctatctactttggatctactgcatgagctaatctgaacatttgtccaaaaataacgtgtaatgctttttttttttggtgggggtcagagtttctcacttcactttcgtgcaggtgataaaactttgtacaaggctctttaccgttgggtctttagaccctttcttacatttatgactcattttaagaggctctttccacttaaatcaagtttacactgatatatagttagcagcagttctctagagaaggtttgattgagcaaagctgggagagcaatattcttaaattcctgacctaacttttccaggataccataaatagaatagctatagaatcacagatttttcacagtgaaagagaccaaacttatgcttatagatgacgaaatgggatacatatattttagttaacatattttattattttaaatgacagtaagtttagtgagaatataggttcagtcatgtactttataaatgtcattattacagattgagcaccccttatttgaaacacttgggaccagaggtattttggatttagaatttttttttaaatattggaatatttacattacatacttacactgaaatccaaaatgctccagtgagcatttcctttgaatgtcatgtcagtgcccaaagagttttatattttggaacatttcagattttatatgctcaagtgatattattgttattgttacaataaccttatgacctattctcaagctcagtttagtccttttcccctgccttctgaaatccagggactcacattgcatccaagttcgagtcttacccattgaattagataaaaggtatcactgacattcacattattctttctcagtcatattctgttcctgttagagaaaatggcatatgtcttgaccctgaaacttgagttgtaaaattgggttgtagaattgagggtcagttttgaggtggtaacttggctgcacgaacagttctcacatgtacgagaagtgcagtttacatatgtgttagtttccagaatttgctcataagcttaaatttacatccaggaatcataaaaactacccagaaaatctcttaggaaggtgctgtgttggagacggataaaccatctctcagtacgtcctgcataaccaatgtttttttcccataagaaagcatgactgtttcttcaagaatataccagttgaaggaacttgattgtattaggagccctcatgtatgaaagacacagatttttaagcatgaaaatgtcactcaatgtagtaagttcatcctgagagacagctgggaactgggtatattcagacctcttgtctcttgtgcatgcttaagtttgctcttattgattggtgtgataaggggaactacagcattttgaaaattttgctgcttcctctcttccctgataacacagtatagaatttccctaagttaaatccctattgggttggctcctagcaagtgtgggacctaggacagaagtasaaaagaaggcacacataccttaaatcaaatattgaaaagttagacatcaaaaccaccatcaagtaaaatatattattctatatattccatgtaggaatagacaaagtctattccttgccaaatacaccttcatatacctgagttcaaatgtagaattctcagatttcttgcagctccatgctgaaacatggcttcacctctggcttgcccctcttcccttctcagtgctagctccctgtccccttgtgattcccttgcattcagtgagggccctttcatgcccaaacgtgggcatcctatcccatstatctaagctatgtccatacccattagaaatacctgccattgagtggaggcacccccrttgagggggtgcctccggtggtggggaagtgcctgtatatgtcctggaggtaggctttgggctgcttattttagggaagcacatccatttggccctgtgaactccttgtctgatggggagggttgtggctggagcagggccagagcagaggtcctatggttcctgcaagctaaattcaagtaatttacatctgcaaatgatgtatctccatggtgtaacctggcttgttaaagaaagctaagacacaaaagcaaaaggtggtgatgttttaaaagctcatagttgttctcttacttaaaattgtattcttactacgtcatacttagaaatttttagacagttgcgatattaggattggcttatttctatgcctcttttattcttttatttggctcctgcttgagtcgtaatattgtctcagagaaaaacaattcacctctaggtaattaagaatagatcataagagctaccaatcaaggcccattgcargtgattgtatacactctggttttggacacgggaacagtcctacattcttgctttgtgggtttcagtttccagaagcattatagaaagcaactgaagagggcaataatagaggcaacagattactcatacataaagcccataaccacctgtggtctagatttctgagtatacatatctcatatccatgtcaaatatgaacttgtatgaactggaaacttgacttaggttcattatagcttctactgatagaaagttgattttcattttatgacatataaaatgtatgggatgaaaaatgcctgcagatagactgggaagtagaatgtcagaaccagggcctaattgttaccggcttaagctaggagcataaaggcaggaatgaatatgaaagatgaggcttttgctctgacagtaggacatacagtggcttcctcatttgtaaaatgaggggatggagtaaatgttgtctaatgttgctcacattctaaagtttttagagagacaaaaatagagatttgtttaaactatttaggtttgctcttactsactctaaaaatggttgtgaatttacacaatgtcatttgctatgctaaaatatctccctaggtaaagaggtgaagaacagtgaattagtcagcaggtataaaataatactttgttttaggggaacttgacttaggttcattataatttctactgacagaaagttggttttcatttcatgacacatctaaactatacaggatgagtaacttatgtgtacttgctagttttgtgaggttctcaataaaaatgaaatacagaatgtgagtaaaatcatgtgactttcaagcaaaccaagataaaatgatattattgtcatgccttttatcctatttggggataggataaagaggagaaaattgatcagatggaaaaacctgtcatttttaaaaagcacagtttctattctgaattatgtaaatctaagaagctctctaactttttaatgcatcgtgtcataggaggcaccctttgtacagtggtggaatttatttttggtccaaagggaactgttccatcaatgaaggatgctgtgaccatcgtggcatatttgtgttgtcctccttcccccagtcctctaagtctttagtctgattaccacatgcccacctcccaattccattatttttcttccagggaagttcattatctatttttctttcttttttttctattatctattctttctgatgggtggaacaagacttctggcattcaaacaaagagctgaaatctttggcctaaaaaagtggttaaaagagatgactcaaacttttaatattgagcagttcccaagcttagtgtctttaaagtaagagattcagcgacagatcagtcttctgaatgaatcaaggaagagctgagtatgatgcagtagctatagatttttgtgttgtctgaggttcaactcagccctgctttccttggtttcctgggattgtaaggtgacagtactatcatcccatcaatctgaaatctctgcgctgccaaagggtggttgtatctgcttataatagaggcatttcattgcatatgtttgacacgtgagtatgggttagggtgacctccaaacagcccatttttcattccaaggaggtctgagagatcctattgctgtttgaattgcaaaaggcagcaatagatggtgatgtgccttatttcagttgttctctctctgtttactggctgtctcttccacatctctctgagaagcttgtcaagaggtcaactacagtcatgttttgtggctaacacagtagcttttcctcagggactagggtggggtcagttttggcagagtgtgcaagccacagctgtcaacccatagctaaactggaaattgagcagaaaaactattctagaagatctctaatggtttgtaagtggaagctgtaaaaaatgctgagtgactaaaatctgcccctccccctttttttgatttggtgattttgggatgctaattttaactttaaccaaaatttcatagtaatcaccttcagtccattgagtgttatgttcaatcttatctatgtcaagtgtctctattagaaaaatttgagtgatgatgttccagactcttttgctgtcacctcctgtaagaaaaaatgttttacttctttcttattctctgaaaaagagcacatcatataaacttgtagagaatagaaggataagagtacatgtttgttggtgaaacattttgaaaatatttcattttctcaggaaccctgactgctggtgaaggcctgcatttccttggctatcttgtttatttaaaattacaaagtaatttggcttactaagaagactctggcacctatttaagccaagaagttgacacctggggagttcactggggagccacattatttaaagtgggttgtttctgagtgagtgagtgaggatgaaagtgtctgtatcttgtgttcattgtctggagttcacggtggtcctaagtcagcaaggtcggtagagtgtgaagatcrcgtgatgaatctcatattacatctctttccttctcttctttgccctctacttaggtctccrtaaaaacaaccacaatttagtctctctgccactttcttggggggcattatgaatttgctggtttcctcctagagagtccaaatcttagagccattgctactcctgccctcagtttgttttcttgggggagattatatgttgttcctcttctgttctcttgcataccttctatttttatactttcttgatatgtaaaaaattcatttagtattaaaaaggtatcagcatgctttatttaatacgaaaaaggataacctaagaataacttgctgttttctatttcagttatgaaagcaggcaatctgttttttgctttatgtgtttttaagctcactattgttttatttctttttccaacctaggatggtgatcgagacatttttattgatggggttgttgctcgtaatagagccttaaatggggatctggtggtcgtgaaactgcttcccgaggagcattggaaggtgagttaagttttccctttctaattacagatttcttagggtctttcacattccatggtgcaccaacaaggcatcataaactggaggagtcacagaccccttaggcgctgtgataagatggggtgtaatcttggaagcatgctaccgaatgcttggaacttagaagcatctgctgggcagattgctaattaaatgagttctccttgctctctctctagtgatccatcctccctgtcacatgccttgcactggtttttggtattcttttgaataaatactgagggcccattcaaacttggtatgtattattttcctacatcctatgcagggagaactagaaagacaaagccatggagacagtggcagtccccacgcatttctgctgcctccagtggaaaacccaggcaatacatgtggagttctgttggcccagtttggtgattgggtgccttggcagataaaaatagttggtctgtgtttttataaatcagggatttagtggcagaagaaaatgtttttaatatgagagtattttgggtttcrgtctccatctatgtctgttaattggaaaggaagatatggttttagttttgatggttttaaataaaagtaaggatcaggcattggaatgatgtgtggtgacaatatctttgaattgtcatgtaggattggagacatgtatctaagtctgaatttgtcttcatatcatttgttttatttggcttttttgttttatttatttgaagaatttggtgtcttcttcaataatacgtgttatagatgtatctaagtctgaatttgtcttcatatcatttgttttatttggcttttttgttttatttatttgaagaatttggtgtcttcttcaataatacgtgttatagagtagtgactaaaagtatgggcttttaggctaggctacttagatttgaatctcatctctgccattcatctctataactttgagtgaattgtacaacctttctgctgcaaatgtctcatctgtaaaatgggaataatcatggtacctacttcataggtttgtcatgaaaattaaatgagaatacatgtaaaaattttagaatactgcctaaaaatcttagaatggcaggagctcaagaaatgttcttactagcttttccaaaaaagatgtgatgtgaggagtaccattttatctcagagctttgttgaggcatacattctttttaatctgatacagctaaagtaattgagttatagctatatgccaggtattcatagggtgtagggaattcagtaatgagtagtattgacatagttcttgctctcatggagcttatagtttaatggggagtacaggtaggaaaagacagatactgatcacacttatacaaatttaagtgtaatttttattagtgctgtgaagtgcagggtttctttttttttttttttatattataccctaaattctgggatacatgtgccgaatgagcaggtttgttacataggtatacatgtgccatggtggtttgctgcacccattaacccatcatctatattaggtatttcttctaatgctatccctccccttgtccgcacccaccgacaagccccattgtatgtgatgttcccctcactgtgcccatatgttctcattgttcacctcccacttatgagtgagaacatgtggtgtctggttttctgttcctrtgttagtttgctgagaatgatggtttccagcttcatccatgtccctgcaaaggacataaactcattcttttttatggctgcatagtattccatggtgtatatgtgccacattttctttatccagtctaacattgataggcatttgagttggttccaagtctttgctattatgaatagtgctacaataaacatatgtgtgcatgtgtgcatgtgtctttacagtagaatgatttataatcctttgggtatatacacagtagtgggattgccgggtcaaatggtatttctagttctagatccttgaagaatcaccacactgtcttccacaatggttgaactaatttacactcctgccaacagtgtaaaagcatttctatttctccatatcctctccagcatcggttgtttcctgactttttagtgatctccattctaactggcgtgagataatatctcattgtggttttgatttgcatttctctaatgaccagtgttgatgacctttttttatatgtctgttggccacataaatgtcttcttttgaaaagtgtctgttcatatcctttgcccactttttgatggtttgttttcttgtaaatttgtttaagttccttgtagattctggatattatccctttgtcagatggatagaytgcaaaaattttttcccattctgtaggttgcctgttcactctgatgatagtttcttttgctgtgcagaagctctttagtttaattagatcccatttgtccattttggtttttgttgcaattgctttttgtgttttagtcatacagtctttgcccatgcttatgtcctgaatggtattgcctaggttttcttctagggtttttatggttttaggtcttacatataaacatttaatccatcttgagttaatttttgtataaggggtccagttttagttttctacatatggctagctagttttcccagcaccatttattaagtagggaatcctttccccattgcttgtttttgtcaggtttgtcaaagatcagatggttgtagatgtgtggtgttatttctgaggcctatattctgtcctattggtctatatatctgttttggtaccagtagcatgctgtttttattactgtagccttgtagtatagtttgaagtcaggtagcgtgatgcctccagctttattgtttttgcttaggattgtcttggctatatgggctcttttttggttccatatgaaatttaaagttttttctaattctgtgaagaaagtcaatggtagcttgcttggaatagcattgaatctaaattactttgggcactatggccattttcacaatattgattcttcctatctatgagcatggaatatttttccatttgtgtcctctctttccttgagcagtcgtttgtagttctccttgaagaggtccttcagatcccttgtaagttgtattcgtaggtactttattctctttgtagcaattgtgaatgggagtttgctcatgatttggcactccattattggtgtataggaacgcttgtgatttttgcacattaattttgtattctgagactttgctgaagttgcttatcaacttaaggagattttgggctgagacattggggttttctaaatatacartcatgtcatctgcaaacagagataatttgacttcctctcttcctgtttgwataccctttatttctttcacttgcctgattgccctggccagaacttccagtactacgttgaatagagtgctgagagagggcatccttgtcttgtgccggttttcaaaggaaatgcttccagcttttgcccattcagtatgatattggctatgggtttgtcataaatagctcttactattttgagctatgttccaatacctagtttattgagtgtttttagcataaaggggtgttgaattttgtcaaaggccttttctgcatctattgagataatcatgtggtttttgtcatcggttctgtttatgtgatggattacatttattgatttgaatatattgaaccagccttgcatcccagggatgaagccaacttgatcgtgktggataagctttttgatgtgctgctggatttggtttgctagtattttattgaggattttcacattgatgttcatcagggatgttggcctgaaattttctttttttgttgtgtctctgctgggttttggtatcaggatgatgctggcctcataaaatgagttggggaggagtctctctttttctgttgtatggaatactttcagaaggaatgataccagctcctctttgtacctctggtagaattcggctgtgaatccatctggtcctgggcctttttttggttggtaggctattaattactggctcaatttcagaacttattattggtctattcagggatttgacttcttcctggtttagtcttgggagggtgtttgggaagaatttacccatttcttctagattttctagtttatttgtgtagaggtgtttatagtattctctgatggtagtttgtatttctgtgggatcagtggtgatctcccctttatcattttctaatgcgtctatttgattcttctctcttttcttcttcattaggctgtctactggtctatctattttgttaatgttttcaaaaaaccagctcctggactcattgawttttttgaatggtttttcatgtctctatctccttcagttctgctccgaacttagttatttcttgtcttctgctaacttttgaatttgtttactcttgcttctctagttcatttaattgtgatgttagggtgttgattttaaatttttccygctttctcctgtgggcatttagtgctataaatttccttctaaagactgctttagctgtatcccagagattctggtacattgtgtctttgttctcattggtttcaaagaacttatttatttctgccttaatttcattatttacccagtagtcattcaggagcaggttgttcagtttccatgtagttgtgggttttgagtgagtttattaatcctgaattctaatttgattgtactgtggtctgagagactatttgttaagatttccattgttttgcatttgctgagaagtgttttacttccaattatgtggtcagttttagaataagtgtgatgtggtactgagaagaatgtatattttgttgatttggggtggagagttctgtaaatgactattaggtcctcttgatccagagctgagttcaagtcctgaatatccttgttaattttttgtcttgttgattattgtctgttattgacagtgtctttttgtcttgtctattattgacagtggggtgttaaagtctcccactattattgtgtgggagtctaagtctctttataggtctctaagagcttgctttatgaatctgggtgctcctgtattgggtgcatgtatatttaggatatttagctcttctttttgcattgatccttttgccattatgtaatgcccttctttgtcttttttgatctttgttggtttaaagtctgttttatcagagactaggattgcatcccctgcttttttttgctttccatttgcttggtaaatattcctccatccctttatattgagcctatgtgtgtctctgcacgtgagatggctctcctaaatacagtacactgatgggtcttgactctttatccaatttgccagcctgtgccttttaattgggggatttagcccatttacatttaagtttaatattgttttgtgtgaatttgatcctgtcattacgatgctagctggttattttgcccattagttgatgcagtttcttcatagtgtcaatgatctttacattttggtttgtttttttgcagtggctggtaccagtttttcctttccatatttagtgcttccttcaggagctcttgtaaggcaagcctggtgctgacagaatccctcaggatttgcatgtctgtaaaggattttatttctccttcacttatgaagctttgtttggctggatatgaattctgggttgaaaattcttttctttaagaatgttgaatattggccctcactctcttctggcttgtagggtttctgcagagagatccactgttagtctgatgggcttccctttgtgggtaacccaacctttctctctggctgcccttaacattttttcctagatttcaacctttttccttaatttcaacttttccttcatttctgacaatatgtgtcttggggttgcctttctcgaggagtatctttatgatgttctctgtatttcctgaatttgaatgttggcctgtcttgctaggttggggaagttctggataatatcctgaagtgtgttttccaacttggttccattctccctgtcactttcaggtacatcaatcaaacgtaggtttggtcttttcacatagtcccatatttcttggaggctttgttagttccttttcattcttttttctctaatcttgtcttcatgctttattttattaagttgatcttcagtccctgatatcctttcttctactcgatcaattcatctactgatacttgtatatgcttcacgaagttctcatgctgtgttttttagctctatctagtcatttatgttcttctctaaactggttattctagtgagcaattcctctaaccttttatcaatgttcttagctttcttgcattgagttagaacatgctcctttagctcggaggagtttgttattacccactttctgaagcctacttctgccagttcgtcaaactcattctccgtccagttttgttctcttgctggcaaggagtcgtgatcctttggagagaagaggcattctggtttttggaattttcagcctttttgtactggtttttcctcatctttgtggatttatttacccttggtctttcctgttggtgacctttggatggagtttttgtgtggtggtcctttttgttgatgttgatgctattgctttctgtttgttagttcttcttctaacagtcaggcccctcttctgcaggtctgctggagtttgctggaggtccactccagaccctgtttgcttgggtatcatcagtggaggctgcagaacagcaaagattgctgcctcctccttcctctggaagcttcatcccagagaggcacccgccagatgccagctggagctctcctgtatgaggtgtctgttgacccctgctgggaggcgtctccctgtcaggaggcacaggggtctgggacccacttgaggaggcaatctgaggaggcaatctgtcccttagcagagctagagcgctgtgctgggagatctgctgctctcttcagagctggcaggcaggaatgtttaagtctgctgaagctgcacccacatccgccccttcccccaggtgctctgtcccagggagatgggagttttacctataagcccctgactggggctgctgcctttctttcagagatgccctatccagagagaaggactctagagaggtagtctggctacaggggctttgcggtgctgyggtgggctccgcccagcttgaacttcctggtggctttgtttacactgtgaggggaaaaccgcctacttaagcctcmgtaatggcagacgcccctccccaccaagctcaagtgtcccaggtcgacttcagactgctatgctggcagcaagaatttcaaaccagtggatcttagcttgctgggctccatgagggtgggatccgctgagctagaccacttggctctctggcttcaaccccttttccagcggggtgaacagttctctctcactggtataccaggagtcactggggtacgaaaaaaaactcctgcagctagctcggtgtctgcccaaacgtctgcccagttttgtacttgaaacccagggcccttgtggtataggcacccgagggaatctcctggtctgagggttgtgaagactgtgggaaaagcataatatctgggccagagtgcaatgttcctcacagcacagtccctcatggcttcccttggctaggggtgggagttccctgactccttgcacttcctgggtgaggtaacgccccaccctgctttggcttgccctccgtgggctgcacccactggctaaccagtcccagtgagatgaaccaggtacctcagttggaaatgcagaaatcaccagccttctgcgttggtctcactgggagctgcaggcagaagctgttcctatttgaccattttgtctgggaatcctcttttttctttttgaattacagtgaactttcctagttcagatccacctcccagcttcatccccagttgctgccaattgttgatacagtgtcttccctggattccttgaaagcatagctaaaggctggcttcatgttttaggtatataggttgatttaggtcactttgttttcttgaatctagcatagtgttgaccaggtccaagaagataagagaagtgtattagggccaggtcaaaccaaaggaaacattcctagaggtcatttgagggagtaaagaggcagcattgtaatgaagaagagccaaagaaagaacagaaagatggtggcatcttttaccctaagacatgagagtggtagaatagggagaaacagaagaatggttagcaagttgggtgggtgtagagcagaccagagcaggtataggtgctgactggttgtacagtaggcatggaaagcatacagtagagcaccagtggagctctacagaagtggatgagattgcttaaaagagcaaggccaagtaacctggcatcctttctgcccttggacccaggcaagagatggccaaaataagcaaacatatgaataagtaagtctgttgcattgttttccttgtttctcaccccctttattgataagacagtcagcacagcctttcctgtgctgttagaagtgctcttgcttcaggcaggaagtctaagacgatggggtagattgttaaccaaagcttgggggtaggttgagggttaaagtgtttgctgttgttgaggtctggaggaaaggtttgggacttgagcattcttgtttctgccttggtgccttttttcttggacaaaaatcagtacctcttttaaaactgaatacaacaaagttgtgtttctccctagaggcctaattttatgaatttctaggtcataaaattagcttagtgctacctacttctacaaactgttatctgtttaactagctcctacagaggggctgctggctgcctctgaagctttcagaagatttgaaatgtagagggtagccccgggttccttattattttgtttctgtggagctcccgagagtcttcacagtggctgcctgacaattgctttttgtgttaacgtcagccccattaggtacatctctcaggcctcattagttagaatatttcacagcttcttattctgaagtgggggagttctgttgtccttagcccacctgtgatagttgttggtgacagggtcaaagtagggagaagagaatattcggactgtcatcaagaatccctgacgtctagaatataaacatctccaaacatactggccaattgtcttacaggtttgttagtacaaaagcatattgttatcaaaggaatctgtagtcactagcgtgagccaatgtggattaattggattattcatctttgcttctttctgcttgtcgtgctcactcctcttgggtatgtaaactacagggcttttggggttttagaaaaacaacagttcttttcgttgtagtagtaaatagtcaatttatttcacagcatgatttttggcaaaatagatagctgtatgagtatcaagctgtgaggcaataatgaaaaataatttactcttatataactcttcgaagttcagattcttccacatttttactgtctccttatactttttattacagacatctaatgaaagatagttgaggggcaaatgatagtttcttcctttgtcaattggaatattaaggtactgtgagagtgactggtttgaggactgagagtttttggcagaaccagggatagaatccagatctcttgacttacagcttaatatccttttcctcagattttcaaagtggagatcatgtccscaaatggttaggaagcattgatcctgacagttctgcctggagcagttcaaggtacccagtggcttctcatctaccattcatcctgccctgtgttagattctagagatacaaactagaataggtcacaggctttgcgcttaaggagttcataggctggttgggaagagaatggaaacaattatggtacggtttgcaggatggaaacagaaataccacactgttatgggagaaacaaactctatttgaaagaattggggaagacttcatagaggttacattagagctaaggtttaaaggatgggaatagagaaagagagaggatttgttttatttcaagatgagaatgatttggcaagagaggattgtgaaaattttaggtttcagggaggcatgtatggatcaaagctttctcttcctggtatactattggctgagtacagcagcccctctactaactctcccagacattggaagaagtagkgggctcctaactcttctgaggatcctgccctcaagggaaactgaaagggggaccatggcacccttttacagagactcttcgaacattgctgccagctcagtaaactcttgtttgccatttatttgatctttgccctgcttcttccattctctttccctttttttcatcaagttcacctcccataaccatagcccatacttgtctttcatcttttggttaaccataatgagtttattctattattttccttctcttaataccccaatacggtaaattacaaatatgcatatataaaccctgtgggtgctaataacaactgctaacttactggtgcttaccgtgtaccaggtactgtgtttagtgtcttgtactattcttttgtatgctgttgtctgtatcccaattttgtgaatgagaaaactggggctcggtttaagcctcttatttagggcacatataactaaggagtaacagagtggtattcagatttacatctcctggcttcatgatcatactgttatttgttattccagagatatcaaggagagagttatttgatctgtatacagatattgtcagtgtcataataattagcacacatttagaaaataaaaatatatgcttcagcattaggtaataggtaatatcttaagttgccatcatggataaacaaggtgactatcagttgacataactaaaagcttagtgttagtctcagaaaataaacaattcagaaaatattagttagaattctagtggttgtatcttaggactggagaggtatgataggacattatggagacaggtgttgagaatgagggagaaccttaacaaatacttgccctagacagtggagatgacccaacaataaaagtcacatcagagttgcagcttgctgttcaaggcagagtcaaaggggttacagacctagatgccattcctgactcaatggcagcagatcccaaattcatagtatttggatgcacaggtattcaaaaggcaggtaggcagttgtcatataggaggaagggggtcctactggggcttrgggacagggtgctaagttcagaaatgtgggactgttttgttataagcagagtggtagaagcagccactgggctaggagtcaaggataggatttgatcctcaagctgggagaattgactagagccatactgggagcaaaaaccaaagcagaggaccagccttgagagccagaattctgaaactttttttggttgtaccaaaggagtcttgggagcccagaattcagctgtggtattttagttgatgcagccatagtgattggctcagagaaaataagagtaaaagaggctgacagagcatattaaaattacactcaatcggcaaaacaatgtgatacagaacctaactagcaaaagagatggatttcaagtgaaacttttactcattgaaactgttaaaaatatagtaagacaggcaggaatatgcttgatacattgatacctgttggaaacctataatgctagggactcatttatttctcccacatgtatttgtgcagcacctgcagggtactgagaggataaagtgggaataaatcagtcaagtactttgttagcaagtctaaatttctctcaagacaggattatttcacttaacttacagcagagcaaagtctatacatgatttaaggaagtagcgttcagcaagggaataatagatgtataggtgagtgtttcggaagagattggcactgaaagaaagaaataacttgagtctgaaagaataaaggaagtgttgataggagtggctactcttgttctaaattaaacaaatgcagaaatcaaagtacacatttaatccctaattttcaatggttgtttcaaaccttcttatggtcacatgaaattggtctagtacagtaaagtgtttcctttgacaactaacttttccttcaagtgattgttttaaagttttgtgttccaagttcttctttaaatgtgcacccatcatactagattatatttaatccaatctcttatataaccactatcattttggattgttctcaattccagtggaattagaatttcttagaactgtttggtttcttggcctgcatggcaggcctgaaaaagacttggaaggtactcagtgatgggagggcaagatcttcggagcctccatcaagagtagtatggtaggtaaggtatatccactaacatgatcagattttcccaagattgttatatamacagcctatttttaacagtcatcttttttcttcattactgccagctctgcatcaaatacttcaggttcttgcctgctttaaacatgccctcagatctttgtaattcaagttgaaatgtctgaaataaggagtgtattgtttaaggatagagtagcttatttatgctggaaactcctaattaatatttcagggttattttctagaaaactaatttatttctccttaaccccatggagatgttttggtgaaaaccacattcattgtaacgaaagagttaatgtaggtaaatacttagggcagtgatggcacattctaagtgcttgagagatgtcaggtattactactattagtcttagaaatgaggaccaagaacatggttcagccacaacacatgataattcagatttactttttctagctcttgagtgtaccacatttactgacagaagacaaaatattcacataaaatgttggtgttttagtatgtgtttctttgagtcatctgcactgctgagcaactgtatgataggcaaggttatattctggaatgatgtggtttgtttcttactcatgctcactgcccatcaagatcatctaggggctttgctttgcattatctttactccaaagctcaggatggatggaacatagaccatcagaagtgctccctttctctgtggcagaaggaaacagagccaaggagggccacatttaaaatgcccctgtccagaagtgatggagtcacttctgctcatagctcattggcaagaacgagtcacctgacactacccaaccacaagaggaccaggaagtgcaatcctaccaaatgtctgcaagtagggatataacaggatgtatctggtaaactgtgctaatgactctcacgctggactaattagattcattatgtgttgcattcctgactagccatctgaaaagagtatgacactggtcatggcaaaagcttcaatattgcttactacaaatatatccccactactgaaagtagaattcagaaggaacctgaaaatgttctagatggtctgtctataagatcaccctcagtcatgtaattattgctttaaagtacagggtatgataacaagtaaatttgttgattttggaattaagttaatggtgtagtagtacagtttttgtaagtgaaaggcaaggaaattatattttaaggaaatgtactgacatttacttggtaatatttataaaccacaaagagtttatcattcatagtagtattgtgatactgctgcttgctactgctattgttcaaattctcattttttattaaaatttcaatagatttctcttatgtcttatagaactagtaatgatttagggcatatacatagctgtcttatgaatttaggcagtattatgtacaaaggcattggagacttctgaaaatatggtagatttggaaaactacagatattattttatttttgagcttaaaatgcaagctagggatataaagtggcaagagatgaggccaggctggcagatggagaggcaggggtggtggtggtggtgtcacattgtgaaaggtctggtaagagagttcagttggtatgtagtcactggggagtcactgaatgattttgaggaaggtgacatagtcacattgtatattaaatatcattgtggtggtaaggtgtgaaggacttaaagcaaaggggcaaaattggtgggagactgaaaagaaaattatgtgttgagagtcccagtgagagatgaagtcacagtgcccatgtggaatacaaggaggagatgaatttaagactgtttaataagctagaacatggtgactggatataggaagaagctggggtgactcctacatgttaggctctggtaattgaggggatggtggcaccctttgccaagatggaatttaggaaggggggcaagggcagaagttagggtaggatgataaacttgtttcgacatgttgagtttgagatgcctagggacatataggtatacaaagctagaaggcatttagatattaggatttagagttcagaagtcagagcttggctagaggtagagatttgggtgacctcaattgcacttgaataaatggacattttatagagagataaaagaagacctctgaggatagagcctgaggaataccaaaacttaatgggtatgcagaagaagaggatccaggaaaggatgctgtggagtggtggccagcaaggaaggaggaacagcagcagggaatgatgtgccagaaaccaagttgaggaactcctgacctcgtgatccgcctgcctcagcytcccaaaatgctgggattacaggtgtgagtcactgctcccagacaagtagagttgttatttattgcatgtaatggatgctttagtgtatgggggcttaattctcctgggaactcaggttgagaaaatcggtctagtggagcaataatagagtggtaagtgcagtgatagagaaaaaatcctgggtgtcatgggagtgtgcaatagggatacccagctagcttgcagagggccagggaatgctttctggaaaggaattttgggaagaaatgaagtctgaatggaaaactgttaaccatgtgaagagtagaaaaggcttgatggaaaagagagactaaccttctctaagtccaacaagttttaaaaatatggctagaggggagattttgagaacagtggtgagcagaggtaagttcttgtcagctttgttggggatgtttcttactgggcactgacaaaggcagatcacagacagtcagacccagtgtcttactggtctcagttttgtgctgctgtaacaaaacacctgaaactgggtgatttataaagaatagacatttattttctcatagttctggaggctgggaagtcaaagatcaaggcactggcaggttcaactgcctggtraaggctgcattctccagagggaaggaatgctgtgtcctcacatggcagaaagtggaacagcaagtgggcctaccactgtgtgaagcctcttttataagggcctaaatcccattcatgagggaggagccctcatgatatcatcaccttttaaaggcctcacttttttttttttttttttttttgagatagagtctcgctctgttgcccaggctggagtgcagtggtgcgatctcggctcactgcaacctccacctcctgggttcaagcaattcccttgcctcagcctcctgagtagctgggattagaggtacctgccaccacgcccagctaatttttgtatttttagtagaggtggggtttcaccatgttgaccaggctggtctcgaacccctgaactcaggtgatccacctgcctcggcctcccaaagtgctgggattacaggcgtgagccaccgcgcatggccattcacttcttaataccataacactggcgacacctgaattttggaggggacacattcaaaccatattacccagtctcactggatgaatgctatctaagatgagctggacactgtcacaacacttggtgcgtggtcatttcttttycttgaaattatgatgcactatcttcagtctgtaagcaccatagtctcaggtcctttgggataagatatggtgtcttttgaaagggaggaggttgagcctggatacattggctttgggccttctgcctgtcctctctaatacatacttggtgttgggtgtggttttccttttggggtaatttggattattgccactcaaagtgtggtccatgtactaacggcatggaagaatctcaggcccaagacccactgaatgagaatttgcattttaatgagatccctaagtgatttgtatgagcattatattttgagaagcatcgatgtggatgagtaggtcttctttgctcttaagataaagattagtttgtcactatagagaaaggaggaacatatatatgacattattatagctggtcctggaggagagtcatgggtgcagtgtaacttgttggggcttcagaggtttcaagtaattataacgaattctttgttttagactctagatccctcactgtaaccccttcacscccttctccagttaggtctaacaattgaaggatatattgttcttgtagttggaaaaaacccactgactagtttattgaaaagagatagattttagaatatcttgagttatttttatcctactaagtgttctgtaacccacctccttcccattttggggagatcattttatttatttattattattatttttaagatggggtcttgctgtattgtccaggctggtctygaaccctaggttcaaggtgtcctcctgccttggcttcccaaaatgctgggattacaggcatgagccaccatgcccagccttggagatcatcttaatattaagttcagacaatcatgtcatttctgtcttactggactccagcttcactcatttttttctggaaggggattacctgttacattatgtttaatacatgtttgtcacagctttctgttggagacccacttttagtagttttcagcrtgttttgaagtctttttgacaagtaaatttacagaatattgcaaagttatttcaatataaagagtttttgtatcttgaaacacttcaaagtgcaaagcacctcctcataacttgagtgttactgttttccatttggcctatgctactgcaagatcatagactagtgcatcaggtgggattagaaagaaaaagaagatagctgctctttctgtagttgatagtgtaaagaactacaagaggaaaatgtaaagaaaagcagtctgaaactttaaatgactatatttgaggtttatcagaaagatgaactgttttttaataaatgaggcacctgtattatcaaaatgatttattatttgtaattggaattgtcttttcattcagacactttctttggtaagaggtggttagattatgccaaaaatgattaaaattttaaaaaattgagataaaattcacataacatagaattcaccattttgataatttaaagtatacagttttgtggttttagtatatttacaatgttgtgcagccatcacaccatctaattccagaatattattcacccccaaaagaatccctgtgcccattaagcagtagtcactctctgttccccttcttcccagatgctggtaaccactaatctgttttctgtctgtatggattttcttactctagacatttcatataaatagaattgtacaatatttgtcgttttgtgtttgtgttccttcacttagcataatgttttcagagttcttccacgttgtagcacatatcagtacttcatttctttttgtggcagaataacattccatgtgtggacatgccacattttgttatcctttcatcagttgatgaacatttgggttgtatctactttctggctattatgctgttgtgaacattcatgcacaagattttatataagcacatgttttcacttcttttgagtatttgtctaggagtgaagttattgggtsatgtggtgactccatgtttaacaaaaatgatttttaaaatatagatcactaaaagatactgtccccaaacttttctgaccccaaaggaattagtcttatgaatgtatacacaagttaagccctaaaattacttgttttctttggcatttagtccactatatgagcagcagctgtgttgctcccgtttcttttcacacgcaagtcaccattttggacatttcaaaatggagcccctctatctcctagattgtgaatttgatggccctttgctgtgttattttatgagttacttctggagcatcaaaagttctctcttaaaaaaaaatcttgtgggcacttaataagagttgtaggccgggcgcggtggctcacgcctgtaatcccagcactttgggaggccgaggcgggtggatcatgaggtcaggagatcgagaccatcctggctaacacggtgaaaccttgtctctattaaaaatataaaaaattagccaggtgtggcggggtgcgcctgtagtcccagctactcgggaggctgagacagaagaatggcgtgaacctgggaggtggagcttgcagtgagcccagacgcgccactgcactccagcctgggcgatagagcaagactccctctcaaaaaaaaaaaaagagttgtatatgcccgaaatatgtttgttgctgttgttgaaggaggttgtttattatcattgttgttatagtgtgttattgaatatagtttaggaactcaagtagcttagttacctaatgtaaatactattgtcctatcagcatttcatgtctttgctatatagttctaaaaatgcttatatactacaaatatacaagcatttcatattatatacacacatatagtttrgtgttcatagtatatatagacacatagtttagtattgtaagctttttacgtaccataaacatctcagtttattataattgtttcaggcacatggaatgcattcagtgaatgaataaattgtcacttttaatgactacataatatttccttgagtggatgttatatattttaaataacttccctatgttataggacattttaattttttatgatttttaaaatttaaataatattatggagaagatctttaaatatatgactttttatttcttaagattgttttctttaaattcttaaagaggaattactaggtcaaaagataagaaattattcaaatggattctttgtactaccaggttgctgtggtctgaatgtatccccagaattcatgtgttagaaacataatctcaaatgcaccagcgttgggagatgtggggtcttttgggaggtgtttaggtcatgagggtagagccctactgaatggattataaataaaagggcttgcaggagtgggttttcgtactcttgcccttctgccttccgacttctaccttctgtccacatgatgacacagcaagaaagccctcaccagatgctggtggcttaatcttggacttccgagcctccagaactggggagacagtctggacacagggaaaacctgagacacaggtttttatccattctttaattaartaattaaaagagatcaaatttgcatttatttctttaacttttactttttggttttccatttcatcctgtgaccttgttgatattttgaatgttggttttatcatcttcagtattggttgtttcttatatatgttatttctacatttgacayttygcsttgggcacagtgccacttctgtgtgcctaagctggatttgtgtcctcatggtatttaggggcatagacatatttctgtaagcgtacacatccttattttgtgcagacttttctttcatgctcctgtttcttttccttttgcttgtagccagactttttggactcagtgtctatttctcactagtgatgtggattctgcagtttgttttctaccctagctttctactaaagttgttcttttcatggttgtcactgatttcctacctgttttcattggttgtttgcttagttttcattttcctggagctttctacagtgatttaagaccattgatttcccttttctttgtaataacctctcattagctccatgtcccagttctgtttcttctattcagtatgtttgttttttattgatttctctcttttctccacttagttgtagacatttcttttttctttttttgagacggagtctcgctctgtcgcccaggctgtagtgcaatggcgtgattttggctcactgcaacctctgccttccgggttcaagtgattctcctgcctcagcctcctgagtagctgggattataggtgcaccaccatgcccagctaatctttgtattttttttttttttttagtagacagggtttcatcatgttggccaggctctcgaactcctcacctcaggtgttccacccacctcggcctcccaaagtgttgggattacaggcgtgagccactgcacccggccggttgtagacatttcttaagcttctagcctatgtcctcttttctttctttacgttcttttccagatagatctttatgtagtttcctagtttaaactgacacttttatttggaggatttccaccatccatttgtttattcgacattttttgattggcagctttgtacgtggcactggcatgggtcctggagatacaaagatgaacacactttgactaccctcgatgaatttggagaccattgcagaaatcagatgtgtrgacagagagccacattgctgtgtgatatgttttaacagagatctgagcacagagatgaaggaggtgtatggagtgggagacaatggctctgcctaagggaacttaaatttcttgtaagagtgacatttcaattgcagttggaaaggagagtttgcgaaatgaaaattaaggggagaggagaatatttaaggcaagggaactgtatgtttaaaggaagagacgcatgcattcctcccaagtctcaactggtaagggcaggggttttgtcttattttatttatattcatggtgttaaggtaacaacaggaacctttcaagttagattggggtctccattctagatcctttgtttactggctctgggctttaggggcctcacctataaatggtataagtttttgataaggattaatgaactgtaatcacctaaaatagtgtctgacaagtagtaggtacttttaaaacgtgagttttattctttcattttccttctatctagccacctgttaactggcatacagtaggcagggaatagatactttttgaacaatttcagtgtttccaaacwtcagaaaaaggataggattgtttattgtgatgtaaacttttacgactaggaagaccaaaaacacaggatgaattcactaaatttagtgatcttacaaagcagaaacttgttttcttaagaactagcttcggctgggcgcggtggctcacgcctgtaatcccagcactttgggaggccgaggcgggcrgatcacgaggtcaggagatcgagaccatcccggctaaaacggtgaaacmccgtctctactaaaaatacaaaaaattagccgggcgtagtggcgggcgcctgtagtcccagctacttgggaggctgaggcaggagaatggcgtgaacccgggaggcggagcttgcagtgagccgagatcccaccactgcactccagcctgggcgacagagcgagactccgtctcaaaaaaaaaaaaaaaaaaaaaaaaaaaagaactagctttgattggaagagaaaacaaagcaatgaatcaagtcagctctgctggatgtttgcacatgggagctggataattctccccccaaatataaaagattggatatattgtttataaatgtcttctataatgtttcttcattaatgtttatagttgattttggatttgttttcatcttaatttccttttttttttttgagatggagtttccttctgtcacccaggctggagtgcagtggtgcgattttggctcactgcaacctccgtctcctggttcaagcagttctcctgcctcagcctcccaagtagctgggattacagatgcccatcaccatgtctggctaattttttgtatttttagtagagacggggttttgccgtgttggtcaggctggtctcgaactcctgacctcaggtgatccacctgcctcggcttcccaaaatgttgggattacaggcgtgagccactgtgcccagcctccttcttaatttctttttgtttacagagttaaataaacttgattgtagatttcagttgatccaggatggtctgttttctccttggggtctcaaatacagtagtttaactatttctcagttagtaccagctcagactggagtcttttaggtttttattaccaattacattcttattcctttgtatgacataaaggccttccatgacctgccctcttccctgttgggcaactctgtttcctttagcatacccttaatcttgggcaccacatacagaaggtctttgaatgcaccatgcagctgcatgcttacattttctttttatacacagtttcctttgcttgcagttctctgcatgtgtctcttcctctttcccctactcatctttctagactggtttcacaggttgttgcctctgggaagcctttccttcatatctttacaattgttattcaatgctgctgttttattgaattgaaaaatctttagatgtttttcacatattatagggccctttatattgtctctgttcacattccagtggcatttgatgttttcttctgggtggtatttgcatgacctactatgaatgactcccactatgtgatgatgttaaaaatggcaagtgccgtttgttgttgagtacctgttctgcgttaggcactcttctagggctttgataacactgcatgttgcagacatagatttctttgtgagatggactggactatagtatttctttttcattcttcatgtgcttatttctaaatagaccagagcatattgatttaattcatgaggagacaatgtctggtaacagataaaaagtcagttcctaaatccaaagaaaatgagtaaattcttgaayttgagtttttgtttatacaacatctaaacttcatyttcaaggtacttctgttaagactatacagaatttagaaaatatgttggtgtcagttttattattatgttaaaagtagtttaaaagtatactttttaaaataaaagcaaggagaatacttacatgtctaaaaggaaacactgtttttctatactactctcaacactgctgacatcaactgcatggattttccacaccaaccagttctcctcagactctaattgggtgtcctacattttaactcaatcctgacactacgcagagttagcacagaccccacaggttaagggcttataccacaagactgccctctacccaggtgccagtcacagtccgggctgcctgtacttctgactggctattatttggggattcccatggccccctcaggttcagtaatttgctataatggtttataaaactcagggaagcattgacttatgtttaccagtttattataaaggatattgcaaaggatgcagatgaatagccagatgaagaggtacatagtgcctctatggaggggcatggagctgccacaccctcttgaagtcctccaccctaccagcacctctctgtgtttaccaaccctgaagctttctgaactcatttatggtttttatggaggccacattacacagggatgattgattaaatcattggccattgaactcaatctccagcccctcgtccctttctggaggtcagggggtggggctgaaagttccaaccctctaatcacatgattcattctctggcagctggccccatcctccaagagtccctcattagcataaactgaggtatgttcgaaaagggcttattaccaataacaaaagatgctcctctcaccccatcactaagaaaattcctggggtttttaggagctctgtattaggaactggggatgaagaacacatttatattttttaattatatcataatatgacagtatcagtgtttcttttcttcttcagtgatgcgacaattcattcaacaaatattattttggacatctactgtgtaccagataagagaacatatcattgaatataacatagtgtactgtcctcatggaacatacagaaagtttatattgtctgttaggccaaaatggatccatagaggcttattttcaaaacctattctgtctttatttaagaaccatagaagatttaaataatactttaacatttggaaactattttaacaaatgcaaaagccagaagtgatttttacctttttctaatttgaaaggaaaatttttttcttttagcagagacctctaaattcattagggaaagaacaaccaaccagccatagtattayatgcttaaagtatgatttttgtcatagaaccagtaagttaaatggctttcctaaactcattcatttgagacttatttgacacctttttgaggtatgaaaagtccagtgtcaaatggctttacaagtgaatgcttccaaatgtttaaaacagataaataacaccaatcttacaaaactattctggagaacagaaaaatgttttttgaggccagtatgcccttgatatcaaaacgtgacaaagataatacaatataagaaaattgtaggcaaagtccttttataaacacagatacaaatatcctaaataaaataatagaaaattgaatccatagatatgttgtagggataatagattatgaacaggtaaggtttattccactaatgtaagattggaggattactattcaaaactcaaataaggtaattcatcacgttaccagaagaaaggaaaaatctatggttactctagtttctgtagaaaagtacttgatgaaattaaagatccattcatgataagtactagtaatagaagaagactttcatctgataaaggctccttacaaaagccgacagtaaacatcatagctaatgttgaaacagtgaaagctttccctctgataatgggaatgaagcgaggatgctcactatcattacttttattccatgttatatcgtagactgtagttaatgcgataaagcaagaaaaaagacatgaggattgggaaagtaagacagtactcatcattttcagactagttgattgtatacatggaraatttaaaaggctgctacatacaaagtcagcctacaaaaattatttgcatttctatatatcaacaacaaagaaaaaatgttacccttatgttagcatgtaaaaaagagttttcaagacctcaacattgcaaacgacacaatgttatcaaaagatgctaaagatgctctaactaaatggtcatggactgtaaaattcattatggtaaaaatattaattcttcccaaattgattgctgcatttaacagaatccaagccaacattccagcaatcgttgttgtgtgtgtgtggaaagtaacaagctgattttaaaaatagatggcaatgtgaaggaccaaaataaccaagacaattttgaagtacaaagctggagttcttaaactgcccaacatcaagrcttaccataagtgagcacagttacaatagtttggtatttagtataaggagagacacataagctagtgaatgggatagaaagtccagaaatagactcatatatggtcacttgattatgataaagggaacagtgcastgcagtggaggaaagaatgctcttttcaacaagtggtgcaaggctgattggctacccacttggagaaaaaggatgttgacctttatttcataccatgcacaaaaatcaattctaggtagataaaataactaaatgtgaaaggtagaacagtaaagcttttcaaggaaaacataataccatattttcatgactttaggggcaccaaaaatttcttaaacaggacacaaaaaataggccaggcgtgatgccttatacctgtaatcccagcactttgggaggctgaggcaggcagatcacctgaggtcaggagttggagaccagcctggccaacatggtgaaaccccgtttctactaaaaatacgaaaattagctgggcctggtggtgtgtgcctgtagtcacagctactcaggaggctgaggcaggacaatcgcttgaacttgggaggtggaggtgagctgagatcatgccactgcactccagactgggtgacagagcaagactccatctcaaaacaacaacaacaacaacaacaacaacaaacaaaaaacagtaaccatgaaggagaaaaattaatagattggagtacattaaagaactcttcaaaaataccacaaggaaagtaaatattaatctgcacagtgggagaagatgtatgcaaccagatatatattcaacaaacgactcctaactagaatttataaagaattccctgacataattgagaaaaaaaacagacaacaaatagaaaaatgggagaatgactgatacaggctcttcacaaaaagctatccaaatggccaatgcacttaggaaaagattctcagctttatcagttatcagggaaacacaaatcaaaaccataatgcagtactacttcacatctccctgaagggctgaaataaataggtaaacaatattaagagttggtgaggtgtagagtaactggaattctcatatactgctagtgggaatgtcagtgtagctgcttcagaaaactgcttggcatcatttgctaaagctgctgctatcttgtggcccagaattttcattcccaggtatatgcccaacagtaatgggtacatttgtacaccaaaaaaatatgtctaggaatcttcctaggaatattatataaaatagccccaaactggaaaccatccaaatctcaatagtagaatggatgtattgtggtatgtatatacaatagaatactgtacagcagagagaatggatcaactacagcaatgtgcagcaattaagtatgaatctaatggccaaacacaaaactgcttatggttctacttataagcataaaactatagttttatcaggatattatttgtctttgaaggggcaataattgaaaggggcaagagaagaacgtcttgagtattggttctggcaggcagaattgtaaggtggccctcaagattctcctccttaaatacacacaccatgtttaattccatcatcttgagtgtgggtgggacctgcgaatatggtggggtatccttcctatgagcaagtcgcaattttgggcagaggtaaagggcttttgcagatgttattgaagtccctaatcagctgactttaagttaaccgtaagagagattatctttgtggacctgacctcatcaggtgagccctttaaaatagcatccaggagttagagatttttcttgctgcccttgaagaaacaaactgccaggagttttatagctccaagaaaacaaattttgccgacagccacccaggcttccgttaggaccctaatcgttaaaccatagatgagatagcagccccagctgacaaacatcttgattacagccttgagrtcaccactagagaacccagctaagccataccgagatactcgacccacagaagttgtaagataataaatgtgtcttgttttaaactgctaagtttgtggtaggtttttgtgtcgcatagaaaactgacatactagtgagactctgtttcctcatcttggttagtgttgtatgtgggcattgtttattttgtaaaaattcatcatattatgcatttatgatttgtgtatttttctatatgtaattaaaaatgagttatattacccaaaagtgtttactttaaaacaggagaaaaattaatggcattcctctgtatttcctttaaccagtacacaaatataatcaaatagttatgttgtaattgcaatggttagtttgaacacaagcagatttggtcacaaaattaagttaaatatttcttcccataagtgaactcaccctctgtccttgctctcattgacatgtcacttatattttacatctcctcctccatggtttcactatgagagtggtagagtcttgaagctggagatgtaatgatttttcactttcttatttcaaaattgatgaaactggaatgtgcctcaagttaagtattgagtagcaaagccagtacctcggttcttgacggctctaattctgtgcccatttcctcttatcatagagcttctggaatccaaaggaaatacaagcattttggtagtggttatgtcatagatgtagtttgatctgggtggagggtactgagtgggggagtaacattctctgtttctaattagaactagtaagctaattttgcaggttgtggaaggtgtaggggaaagrttcggttagccacaaatgtctactatgcctaacctttatgctatgtactgggatgtyactgtcaccaattatctttgttttgagtttctgtttaccacacatggcttcctgcgcttccaaattttcccagactcatactgctttacagccttcctctttcttgagtcaataaggagttagataatgcccctacttttcccagtgtgcacacagaactggactctgtatatgtgtgagtgggtgtaaatccaggtttaagtcagtcattgatcgtgaagaatccttgggttaaggtttctactgattgaaatcctgactcagtgatgtaagaaagcattgcagaattaaatgtaacaattatggcaggtagatgcatctaaacatgtttgattcataaagcatgtttttatttgtgcccattttcttaaatggttttataacttatgacttattttttttcttttttacatgctgatcctgagttcatagtcttgtattttggaaaagctagaaatattaaaatagtgcttctggggtaaagcatctgtcagtatttccattttggaatgcaatttcaaagggtttagaagtcagctgtaaaaatttgttcttggctgatattttgtatacaaaaagctctgcccaggataattttcagaagaattcttgcaacagcataaactgtaaggttatatggcagaaccagcttacattgaactcattttttatgcttctatcaaagtagggaaaagatgaaagcttttaaaatgattcaaataaaacaatatgaaatttgtattctagacttatatgcttagaaaattgttggttttaaaagatactctaccactgtactatcacaaggctcgccattggcttaactatcaaaaataatagcaccaccaaacccagcataagccctgaatcttaggtgacttcagaacaactctttttacaaattttttaaaaaataatttcaacttttattttagattccgggagtacatgtgcaggtttgttacctgactatattgtgtgatgctgaggtatggggtatgactgatcctgtcacccaagtattgaacatagtacccagtagtttttcaactcttgcccctatcccttccttcctcctctgggagtccccagtgtctgttgctgtctttatttccctgagtacccattgtttagcccccacttataagtgagaacatgtggtatttggttttttgttcctgagctaatttacttaggatagtggcctccarcttcattmatggtgctggaaaggacgtgatttcattcttttttaatggctgcatggtattccatggtatatgtgtaccacattttctttatccagtccaatattggactgggcacctaggttgattctatgtctttcctattgtgtatagtgctgcaatgaacatatgagtgcatgtatctttctggtagaacaatttattttcttttggatgtatacccagtagtggcattgctgagattttttttctatagagttgtttgaactccttatacattctggttgttaatcccttgtcagccatctgtaaagsgatatctgcgaaatagtttgcagatattttctccattttgtgggttgtctcctcactttctccattttgtgggtttttttccattttgtgggttgtctcttcattttgttgattgtttcctttgccgtgcagttttttaacttgatgtgatcccatttgtccgtttttgctttggtcgcctgtgcttgtagggtatcgctcaagaagtctttgcccactccaatgtcttggagagtttcttcagtgttttcttttagtagtttaatagtttgaggtcttagatttaagtttttaatccattttgatgtgatttttgtatatggcaaaagattgggctctaattttattcttctgcatttagataaccagttttcccagcaccatttattgaagaaagtgggttctctattctgttctctatgtgtctgtttttatgccagtatcatactgttttggttactatagctctgtagtataatttgaagtctggtagaatgtgacttttccagtttcgttccttttgctcaggatagctttggctattctggtcttttatggcttcatataaatttgaagatttttttctatttatatgaagaatatcattggtattttgttaggtattrcattgaatctatagattgctttgggtagtatggacattttaacattattaattcttccaaccaatgagcatggaatatctttccattttttgtgtgtctttttcaatttctatcatcagtgttttataatatttattgcagatgtcttttatttctttggttaagctaatttcaaggtatttaattttatttgtagctattataaatgtaattactttcttgatttatttttcagattgttctgtgttggcatagagaaatgctgctgtatgttgattttgtatcatgaaactttactgaaattgtttattagctctaatagttttttggtggtttttaggtttttccaaatataagatcatattatctgcaaacaagaatactttgacttcttcctttccaatttggataccctttgtttctttctcttgtctgattgctctagctaggacttcccgagcaacttatttaagaacagattttagcagctcattttgaaagcagcatttggggctgctcagggactgtgtaactctaaagagactcttttgtctctttttcctagttgatgaaaaatagctttctgtttgttacctggcttaggtgtcctcaaagaaagtaagaagggaaagcaaagacatgtttcttgcgtgattggagacttagtccgtgaagctggagagcttcttgttaatgtaactttcttcccaaatctttgggcaggtcttagcttgaaaagatcaaccacaatgaagataagctccctgcttttatgttattgtgagcacacgtacacgtatagttctactgcattttacagcttgtggccaggtttttttcttcttattgtctactttttcttcaacattcaatctcataagcagattgcctccaggataattttatatgtggcagccagtctagcctcagagttggcaataccttcctctattgtattacttctgacccatggaagtgcagttcatgtgcagagagcctacagggaacatttgaagtcttgttggtctgaaatgaaacatgactttatgtgaaatgtgaattagaaatgatgttgggttatatacagttactcagaaataaagtctccatggtggagaaggaactacctcattaaggacatgcttctttccctcaccactccttattcttcaaggtgctgatgctgtaccacacttgggcccaaacaaggttaaaacggcaacagccctttggtttataaagctaaacaacttttctttctttgtaaaagaaaacaacttctttagacagatatatttttttaaaattaggtcattacttattcagagatcataggaaatttgcttccagagtcatcctgttcagctacggggcgggctgggttggggggccgctatgccgagatgaaggaaagtcggccttggcttcagaggtggatgcatgttgctttctctggagtcatctcagctgagaggcagcttctccatccttgcctggtctagttttaggtggcttattctagagacaggcattcatgttgtcatgatccactagaagctcgaggctggaatcttaggtgtggaagtgatagtaggcctcttgaagggagagaaggcactaccacaccactgagtgaatgtttgaattcacagttcctggaaagtgggtatgtttagtatagagatgctctttgggaaagagcagattattttgcttctcagaggggtaatcaattactataattatttattgaagagtaatgtactactatcattattgttcaaactgcccctgatctgaccagtggtagccccccaagttgatctctgtgccatttggacatgtcctcatcgttctttgaacacttgtttatttcctggtgatgttcccacctcatcctgtaactttctctttgctatccctcgaatcagccattttttctaagactccctagttccttttaatggagatatccagactctcccaagccctcttaatgaacagaaactaggaaagacatgtatgtatctyccctccttccctcctttcttccttcctgccttcctatcagcctgcctgcgtgcctgccttacctatcttacctaccctatcttcatctatctatctgtgtctctctctcctttcccttccttcccttccttccttccttttcacatggatatctccaattctaacacaacaccatagggtttgttctggtttcccccttcccacatttgtaccccctttctttgacagtgagaaacctggctcttactgttcacattatatttacttttttgctcattcctktttgtaactaatctatttccattgcttgtcttctgtatcactaggtcacctgcttcactccaggcttcagtccttgctaggctcctgcttcctcactcagggcctggctccttgctcccacctccccatccccattgcaccatgttatttttgaacatggttcctttgaaagttggaggttctagcttttctatgtaaagtcctatagccagttgatcaatggcacttagtatacaagaacctcaactctacttgtgtttagaatgttataacatttctattttgatttctttcttgatggctatctttcttttaagcatcaagttgagaaaaaaagaaactgtgtatgtgtgcatgtgtgtatgtgcctgtgcgttttaaggtacatacgaatgacatttaaggccctccttggcaaggatgagctcattcttccttagtggattttttgttttttttgtgcctcttcagaagcttccagctgcagtgacacctgtctactttctgttctgcaaacatgcctacttcttgaactttttaaactatgacatcttttttcatcactatccattctcatgacctatgctgcattctgccatgttaattaagtctttccttcgtcatctcacaggaagcaagacactgccttcatttcctaaagcttataccatttgattgatgattgcttctgcttgaagatagttagggatgtgctttgtgggtgtacttatttctaggtgttgataggccaatactagcgatgtggttttcgaaaatgccttattaactgaagcgtcacctcactgtaagtgggagtaatttgatgcctaatagatgctctgcacattacaaaattttgataaatatttcttggattttaagttttatcagaataaaaaatatttgatacctttagatcataaccttggcttgtagtttgggtgtttttatggagttttgcacttttcctgtgtatagatgctgagtttgcttggctttggtataaaaaaaaatttatttggttcatatagtctttttgctcaggtttattgaagtataatttacatatagtaaaaaatcactccctttaagtgtccggttctatgaattaaaatcttgtgtaaccatcaccataatgaagatagaaaagcattctttactcccgaaaattcctttgtatcccttttaagtcaacatttcccctcatcccacagcccctgccaaccactgatctgttttgcatccctgtrgatttaccttttccagaatgtcatataaatggaataattttgagtctggcttttttctattagcgtgcgcatgtgaaatttatccatgttgttcactgttgccgactagtattccattgtatagatgtttcagagtttgtttacctcttcaccagttgaaggacattttggttgttttcagtttttgatgattaagaacaatgcccctgtgracactgctgtacacatcatcgtaagaacatatgcttttatttctcttkgttaagtaggtacctggatgtggaattgctggatcatatggtaagcatatgtttrtctttatacgaaattatgaagtggttttccaaagtagctgtaccatttctcactcccatgaaaaatatatgagagattcagtttctttacatcctcaccaccacatattataattatagccattctggtggatgtatagtgttatctcctttgttattgtttgttatattttgctttgaatttccctgatgacaaaatgatgctgagtattttttgtatttacacccattaatatatatgttattctctgatgtgtctgtgtaagtcttttatacatttttggctttcattttaatgaattgtaagagttctttatataatgtggacaaaagtcctttgctacacaaatttctgaagggtaccttttgcagagcagaagttttaaattatggtgaaatccaatttatcaaaatttttaatgagttatgcctttggtttcctatctaatatatctctgtctatcccaaagttgcaaagatttctccttttcttctttcttcttaaaattgtggtaagaacacttaacttgatctaccctcttaccaaagttttaagtgcatggtatttttaagtatgcatgatgctgtgcagcagatctctagaacttaattcattttatacaactggaactttatattcattgaccagcagctcccatttctttttccccccagctcctggcaaccaccattctactctgtttctgcaagtctctttttttttcttataaaaggtttatagtagtttgaattttcactttttggtctattgtccatttcaagttaatttttatatatagtgtgaagtgagggctgaatttcatctttctcctgtggatatctacttattttagcacatttgtttaaaagactcctttccctattgaattaccatgacatctttattgaaaatcaatttactatataaatgtgattctatttctaggctctatattctgttccattaatctatttatctatccttccttaattactgtagctttgtagtaagccttaatatttagtggtatttgtttttcaaaattcttttgactctttgggctcctgtgtatattgatgggaaatttagaattgactttatctacttctatgcataaagcctatttggattgcattgagtctgtagatcaatttggggtccaaatggcatagattggagttgtctaatccatgaacagatatttatctccatttatttaggtcttctttaatttcttttgacaggattttgtagttttcagtgtataagttttgcatatattttgttagatttcttactaaatcattcatgtttttgatactatgataattgaaattatccccttaattttattttccagttgttcatatctagtatatagaaattgacttttgtatatgtatatgtatatattttttataatgtcctgcaacctagttattagttttagtacatctttaaagattctgtaggattttctgcatatatattgtctgtgaataaaggctgttttatgttttctgttctaatctatatgccttttagttttttcatgctttacaagaaaccttcactatgatgttgaacacaagtagtgagatattcttgccttgttcttgatcttatgaggaaagccctctatctttctcattaattatgttagttttaggtttttcatagatgccctttatcaagctgaggaaatatccttatagtcttagtggaattttcatcatgaatagaagttgaattatgtcaaatgtgtgtattgagatgactatacagattcttttctttttcctgttaacatgttgaattacagggattgattttaaaatgttaaattaggtttttattcattggtttggtttgctaataatttgttgacagatctaacatgtgtcctcatcaggattattaacttgtgacttactggtattattatgtctttggttttggtatcagggtaataatactggtctcataaagtgagttgggaaatgtttcctcttcccctatattttgagagagtatgatagggttggtatttcctttttaagtatttgataaaatttactagtgaaggcatatgggcttagagtattcttttctagtgggtttttaattacagtttaaatttctttattgatatagagtgtgrtggttttaaacatgacccaacattttttttgacattcctattattgataacagatactaaaggcttttaaatttttctgtttcttcttgtatctgtcttggtaatttgtttcatttaggggacttattcatttcatctaatttgtagactgtatcggcataaagctgttcataatattcttttactgtcctttkaatgtctgtaagatttttaatgattgcccctctttaatttctgaaatattattggtaatcatgtgccttatttttcttttttctttatcattctagtggaagattttatcaatcttttcatgtaataacttttggttgcattcattttctctagtttttggtctgattttctatttcattgattttctctcttaaatttactgtatctttccttccacttattttgggttaaattagcttcttatacttcccacctccagacttttgaaggtgaagcttggctaattgatttagtccctttttcccattagaagcacttagagctatatcattttctctagacgctactttacatgcattgcacacatgttagcgtgttgtatttttattattcagttcaaaataagttaaagttttctttgtatttttttctttgacccattctttattttcaggtgtataggtgaatattcaaatacttaggaacttttctagaatatcatactactattcatttctaatttaattgtgttatagtcagagggcatactctgcaagatatcaagctcttgaaacctacagaaattcatgtggctcagcatatggtctattgtggtaaacattctctgtgcacttgaacttatatctgcagttgttcagtgttatgctctgtaaaggccacttaggttacagctgcttgcattgttcagggcttctgtttccttactggtttttgtcttactttatttaattgtgaaaatatctatgattggggatttgtttatgtctccttttacttttgtcagtttttgctttatgtggtttaaagcttttttattaggtgcatatacatttgtaatcattatattttactaatacagtgccgcttatcaacataaagtgttcctctttttccctggtaatgccttttttcttgaatcactgtgtctaatattaatatgggaatgttttcaaagatgggaggtaatagagaacatttgtgtgctgatatgagaaagatttaccatagagagggagaggcaatgagatggggagagaaggattatccaaggagcaaaaccctcagagcaagaagtagtattcagagcatgtgctgggattggtcttttgcaaaagaagtgaatcacttcatctgtatttgcactgcagaagaaggcaaggatgattatagacataagtagatttttagagttggctatacgtgaaatctatatattttagatttttaaaatctagcaatatgtactttacagtatgccagaaaccactgatcaaagaaatgtggtttcagtttttgtcatcaatatatgagggtgggccaagtgcagtggctcacaactgtaagcccagcactttgggaggccaaggcaggaggatcgcttgagcccaggagtccaagaccagcctaggcagcaaagtgagaccctattgctactaaaaaaaaaaaaaaaaatacaaaagttagctgggcgtgatggcatgcaatagtcccagctacttgggaagctgaggcgggaggatcacttgtacctgggaggttgggggtacaatgagccatgattgtgtcactgcactccagcctgggtgacagggtgagaccctgcctcaaaaaaaaaaagttatatgtatatatatttatatgagggtggtaattaaagtgttggctgatctttcagataattgtggttaatttcttaatactaaattgatcctttggaatatcctcaggctccggaattatggctgttatatcactgtcctgaatctcccttgtcctgaaattttttttattatatactgtttgattttctgaaatggtctgcaaattgagcttatttttaattttaattttaatttttttcttgagacagtctcactctgtcagtcaggctggagtgcagtggcgatctcggctcactgcaacctttgcctcccgggttcaggtgattctcatgcctcagccactcgagtacctgggattacaggcatgtaccaccatgcctgactaatttttatatttgtattagagacagggtttcaccatattggccaggctagtctcaatctcctggcctcaagtgatctgcccgcctcagcctcccaaagtgctgggattacatgcgtgagccaccgagtctggcctgagcttattttttagtgaggtccaggatatttaagtgtgtttctaagatgaaatctgaggtaagggactgcagctaagtctctccacacataaaatctttaaatatagatgatctttatttgacaagttgtttaacctttacaggttattttctttcctgaatgatgttatatctctgctttgattctctatcaaaaattgttgtgattctaaaaggggaataatctttcattctggcaagcagttggaaattatacccatagaagtaggcttctgtgtattgttttatcagtgtagtgttctatgaataaaaatacagagacttgtcttttaaaatgatcctacttgagcatttctaaggaagcttcaactttattctttactagtgttgaaaaattggccatattcctcagatacagggataatcagtgtagttcacttccttgctgtggtgatagatggaggaatgggcatgtgacccaaatcaaccccagcagacccagccttgggacttatttgcagagtctctcattaagagcttatcgggttttgtttttgttttaattttttactgggatctctaagaggatggaatgtaattctggagctactggtatccttgcatccttcatccttctctatgaggagagaagctgtcctgataatggagcaatattgaggaaggctgagttgagacacatacacacatacacacaggcacatacacacatctgtgcacacactgtcccacagatatcatctgagcctctcaatttgatcagtttgtctcaattacataagctaataagttactttaaaaatgacagccagttcaagttggtttttctgtctctagtagctaatagaggcagtactaatacattgactatgttttagagacttaagtcaaaatacagtaaagagtatgagtcaaagaaaagcaaccacccatgtacaaggtatatctatatacatgtatatatgttcatccactaaatttcaataattattcctcctgtgaactctgttcaagtagaaatccagtccttctatctctgttagaaattctttcgtaggggcggaggttgcagtgagccaagatcgtgccactgcacgccagcctgggcaacagaggtgagattccgtctcaaagaaaagaaaagaaaaagaaaaattctttcctagggcttgcttttctagtttacccagatttacttcctgcctttttgtttgttttttttttcctgtttctgagctttagaacttggtgtgatattctgtcaaattgcctaatgctctctgtttatttctggcatcaaaaatatttatcaccttgctactgagagaactctagttggatcctgctgtgttctatgaactgggtctcctctgggaagtatgcctgcttctcactcttcgttagtgattcagtaaggaggcttgcttgtaccggagttaggttatggttctttttttttttttttgagatggagtctcactctgtcgcccaggctggagtgcagtggcgccatctccagtcactgcaaccttcacctcccgggttcaagtgattctcctgtctcagcctccctagtagctgggactacaggcgcgtaccaccacacccagctaacgtttgtatttttagtagagacagggtttcaccatgttggccaggatggtctcgatctcttgaccttgtgatmtgcccccctcggcctcccaaagtgtggaattacaggcgtgagccactgcgcccagccaggttatggttctttagttgattgtggtggccatgcaggagaggagagagggcacatgttacagaacacttctaattctgattcaaacatgggaacagtgtccagaggccctatagcctgacccttagatctctgaactcttcttctcctgcagtccaagccaggtctgcatagaggagggctccttaacgggtgctgattatttctccaaatctatttttcttttttttcttaaaagagttaaaacataattcagccatttttaaagggagttaatatagttttctgtactgtatcacaaagaatcagaaagagagagacagatcctgctgttctgagttgttagagacctattcttggctcgctgtggtggctcttgcctataatcccagcactttgggaggctgaggcaggaggatcttgagaacccaggagttctagaccagcctgggcaacatagtgaccctgtctctacaaaaaataaagaaaaggtagccaggcatgttggtgtatgctggtagtcccagctgttcgggaggctgaggtgggaggatagcttgagcctgggaggtcgaggctgcagtgagctgtgatcacactagtgcactccaccctgggcaacagagtgagaccctgtctcaaaaaaaagaaaaaaaaaaaagaaacctgttattgagctggtgggatttaacccaagacagagtttgcagtggtctgtgaatggtgtataatggaaggaaatggcagataagattaaaataactgaaaaaggtcagtggacattgagaaagtcaaggtcttgtaagccaaagaatagagaagtagtttctctttttaaaatagagacgaggtctcactatgttgcccaggttggtctcaaactcctgggctcaagcagtcctccaccttggcctcccaaaatgctgggattatagacatgagccactgtacctggctgataagtagtttctctaggaaagagaaacccatgggaatgtttttgaataagaggataatcagaatttttatttctggagatttgtagggtggtgtcacttagaagaccagggaatttgtggagctctaagattgcttgtaaaaaggtaagtgaaggatttggtgactggtatgttaagcagtgggaagagtcaaatgtagttgcaaggttttcagcttgagtggcctggaagaagtagtagtggtgtttgaagaaagagaagaacaggaaagggaaatgctttgaggggaaggaccagagtgcttttgatgttttgagtttcaggtggcagtggccttcatggagtttgtgttgcactgggaaagatataataatattaaataaaatactacatgtagcatactcaatggtgatatgtgctgaagagaaaaaaaataaggaaaggaaatatgattttgggggataaggattgagattttaaatagggtgatgaaagaagacctcattgagagcatgactttgggaagaaacaaaggaagagaggaagctgtccttatggagatcttggggaatggcagtgcgttcctagtgtgctcaaggaatagcaaaggggctgaggtagagaattgtcagagacgaggtcggagggatccggggtgggggtgcagtcaggtagagcctttacatcataggtaggattctgtttctggctctgattgaagtggtaaggcttagagtggtaggagtagagaactgacatatcacttatgtttcataggctcactctgttatgttgggaatagactgaaaggaggcaagggtagaagcagggagaccccttacatggctattgcttacttccaggatggagatgatggagactaaaccaggatggtggcaatgaaggtagagctgacaagatcagctgacagttgggatgtggggtgtgtgtgtgtgtgtgtgtgtgtgtgtgtgtgtgttgctgtgtgtttgagagaaggggaggttgaggtggggtggggaaggaagtcgaatgattgattgataaggactgcacagggattttgggctgagtaattggaagaatggagagagattgttcattctttggctgttaactagataaaaggtacgtttggattagctaccctaagcaaacgaagttcccaacaaatacgcccttgaaaatgtctgtaaatatgtcttttaaatgatagtgcccatagttaaattttataatgaaaagcttattggcaagccttgtcaagagctccctgtggaaatatcagttgcttttcttggcttcaaggtgtttcctgaacagtgtattatcctttgtcccgagtrtgccattaagggatttgaaagtttgttaaaacatgtgtggcaagtgagtgctgtcatttaagcctagccagggaagccaagaaatgaaaagcagctctttgctggacttcctgacatgctttagctctgaatccgaggctcaggtagtggggtggacagggcattatttcctgtgcacaaagtgtcagtggacacagttctcaagccatttccgcggaaaatgtctgtggacatgggtatatgtgaatcttttggaaaaactccataataccaagttgatagcaaccccctgcctaaggagaatgtaatagggtttatttgctgcaacagaattttccagtgctaatatggacttgctctttttataagatttaaaacagcactctttaatgatggtctttgagctcgaggaaaggttttttctatatcagtaaacagggaagctatgaaatgtttcatgcttggagttcgggtgagccagcataatggaaaggttacctggcacttttatttaggattccattagaattttttggttacagggactttttctgtttgcttttcaattttgaaatacggtatattgattttaaaaggaagggaagaaaaacctaatgcacatcaaacagttttgaagtgaccagtttcttctctagatcctggtaggtttgaattgctgtttgcaaytgatctaacttactacacagcgtagacgagatttccagctttctgagtgacagattgctacttcacaactctggaaagatcaggaaatgtccctctgaggtgttgccagatctaggctttctttccttcatctggacatttgtgacttttcttgctaagacacttcttttcaagttggggagcagttaactttatggttatatttgcatttatattgaaaactggagttataatttagatataaaggcatagaattattttagaaaaatgaatttatttcagtgcctcccaattttattcatttgcatttatttatcttgtatctcttacagtgataagtttcaattttgatgaaataattgttgactatttcctggtttccagacacattgtgttaatggaggacattgctgtatcatgaagtatcttatggacatgcattttaatttagctggctcttgctgcttagtatttatttctcactattttttgcaaatgcttcttttacagctgattcaagtctttctcattctcttcagaagaagagaaaagagaatcaatatttactgagcacattctatgtgccatggatcatgggagactctcagaaatataaaaatgaatgtaatgtggtttactgtctagtggaagaaaaaatatgcaaacaaataaatgaaatatagccccatcaaggaacctttttttttttttttttttgcttttgagaaaggatctcgctctgttacccaggttcaccacgtgagcagtgacacaatcacagctcaytgcagccttgacttcctgggtcccaatgatccttcctcctcagcctcccgagtagctgggaccacaggcgcatgtcaccatgcctggctaattttttatttttggtagagacggagttttgccgtgttgcccaggctggtcttgaattcttgagctcaagtgatctgcctgcctcggattcccaaagtgctgagattacagcttgagccaccacacctggccgaggaaccgtatagtgaaagaatgdctaaggactagcagtgctgcagaggaaggcaacaacatttaggcagagagagagaagttagcagataaacattcacagaagagctgggtcttgaattttgattatttgctaggccaacaaaaggttcagaggcatttcatgcaatgtgtgtcagggatgggagctgtatgggtgaggttcactctgaatctctttgttttcaactcctgtggatgatttccttcagtgtccaggactaagagaattgcatttagagtcctagacctgtaggcacattacaactctgccatttagtagctgtgagattgtgacatgtctgaagtcatttcctcctctgtgagatggagatactcattctcctgtgcatcacccagggtcattgggtggatccaatcagttaatgtgtataaaagcacagggacgattgtgcaatagaatgtgaagattcataataaaaacttcagtgtttcttgtgattcccatatccatagttatgtttaaattctctctactttgctcactcctattccttgttgaaaccccattatttgagtcttccccaagggctttatcctcaggttctcttttcagtagacacttggccctgagtcacctttgcttaactgtcaacccatattatgggtaaccctctaatctgatttctgtcctccaagacacttctagtctccagacctacatttccagctgccacctggatgttcctcatcatcttgcacttctcgagtcatctgaaggctacatttgtttccttatatgtaactgctcctaatttttctgtttctattgtctgagttcaggaccttgcaattatttttgacccttccttccccttccccttgcttcaggttgttcttcaggatgtaaaggctcccaactgagtgtactgttattattaaatccttcactttacttaagctcctaccatgttccaggcacctgtgctaagagtttttcatttattatcttagttcccacaatagttttgtgatattagacactcttgtccccattttaaagataatgaaattgagattcaaagaaactgcttttccaaggtggcattgcaggtaagtgcagagccatgactcaagccagttgtgttgtccctagagtttgtgctctgaatcactccactctgctttcacacttcactgacttgacagtaaagtcccaactcattaagttggcatttagggctcttgacatcttgatcttcctttctcmctcttgttgtatattttcacgattatttgccattcctaaaggagaatttgcattttcttatctctttgcttttccatatgttctttctcagcttagatacctctttttcatgtgtacctgtcagaatcctgaaggagacagggcagtgtagtggaataagccagggctccggagtccagtggatctgctttctgctttccctcatagtcctggtctcttctacaaagggctggaccagttcacattcacactagatatgtactgctgtgtgttcttgctagcatttggtattatcagaatttttgggttttgcccatctgtgggtttgtagtgatatctcattgtggctttaatttgcatttctctgactaataaggcagagcacctttccatctttattgctacrtggcatctctattttgtgaagtattttaagccttttcttccatttttctattggattatttgtcttttattgatctatagtagttctttatatattctggatatgagctcctctgtggcttgccttttaaaatttcttttattatatcttagaataaaaagaagttttaatagagttgaatttatcattatttttctttcgtggcagtgttttttatatatatttaaaacatatttcccaacatattttctcacgttttctaaaattctgccagctttttagattacatcttccttagctatttcccactcccagtattgcatagtgtctctgacccggcaagtgttcttgtctttgaaataggatgctacaaggcattttgccattcctctgccaacacaaggcctgtgttccccttaaaatgctgacatcatgctatacccagcctacttttccagcagggtgtctcttcttctcctgtgtctctgaactcaggattctgggcttagttctgttcctttaagtggagagcctctcatagctgcccctcagtttcagccatccttcatggtttttctgggtgccctccacccctacccactgccccaccatgggtcctgctgtagaggccaggttgctgttctctgtcttccggagcatagggaatcctgcctgatggagaaagccttactttttcctttcagcacactgccataccactcttagtgcccaattttaccttccaaaaaaaaaaaaacagtagatagattacagatctgtgcttggtaaaactaacttcaggatgtatctgacacaagtttctgtgtgtgtgtgtttgggagttgggggtgaggtcaaatagattaaaataagtattgtaatrtgctatttctagagcatttttagtggctgcaaatgccatttatttcttatcaatactcctcagttgatatctgtctatattttcactgcttatttttatcagcagggttttatgtgatgcccatcccaccctgttcatggaaaaagactgagagtgaaaaagttctttatgatccagtgatttgattctcccactaatctgtttctgtcctgtccttcagagattagactaaatctccaagggagaaataatcccatttgcagcatgcactcaggtaataagtgcagtcagctgccccacccttgcaggtctatggagaaaccagaagaatttaaaaagtcctcagttaaccatgtcagtaatatatctgctatcctcagggccccttttttcacgctgagcccagagttctccaaaatattggccagcctgaactggtatccttcagcaccaggccctttactgtactttgttatagagtattttctttctttctttctttttctttctttctctttctttctttctttctttctttctttctttctttctttctttctttcttytttctctttctctttctctttctttttttttttttattttttgagatggagtctagctctgtcacccaggctggagtgcagtggcataatcttggctcactgcaaccaccacctcccgggttcaagtgattctcctgcctcagcctcctgagtagctgggactacaggcgcgtgccactacatctggctaatttttgtatttttaatagagatggggttttgccatgttggccaggctggtctcaaactcctgacctcaggtcatccacccgccttggccttccaaagtgctgggataataggcatgagccacctcgcccagcctagagtattttctatctgcttgtagatatgcccttcccccccgccccgctccccgggaggaagggtttacagctttcatctgattctcagagggatctgctaactttcaaagttgagaaccactgatttagacttcttaactctttcaaagacaaccccatggaagaaagcctcttactttacagagtcaaggaaaattgggctactagtttctaacccacatacccttgtgcttgaaaacttttctgaaagctcttgcatcttgataatctactatgtgcattttattgttcttctacctgtttatccatttattcatcaaacattgagtacttaattatgcaagtttctatagaatacacaaaaatgtgtagtatacagttagtgagcagatagtcttaacagatgagataaatcatatgcctagataacaataatgcagtaaagaaattgagaagtgctgaagaagaggtatagataaattgctttgggacttcaaagaaagagaaattattcttgtctgggcaggcaggaggatagagaggaactgggaagattatgtggtggattttggattatagaaaattcatgctttttggagtaggtcttaaaagatggatagattttagatatgtggagatattagatacagtgtgccatctctggctgtttatttgaaagacaattgagtactactgtgtgccaggcctagccatgggcacttcatggagtttatcagggaagatagactctgaacaaatcatttcctaattaattgtcatatttgttgattctgttagcatgtatttcagtggctactaaatgctgctctcaactcagaatacagcagtgaatagaatagatacctctatgttcatgaaacctatattctagttggggaaacagaaagtaaataaggagatatatactttcagatagtggtaagtgcaaatgaaaataaagctggataaggccaggcgcagtggctcacacctgtaatcccagcactttgggaggctgaggcrggcagatcacaaggtcaccagatcaagactatcctggctaacatggtgaaaccccgtctctactaaaaatataaaaaattagctgggcgtggtggctggcgggcacctgtagtcccagctacttgggaggctgaggcaggagaatggtgtgaaccggggaggcggagcttgcagtgagccgagattgcgccactgcactccagcctgggcgacagagcaagactctatctcaaaaaaaaaaaaaaaaaaaaaaaaaagtaaagaaaagaaagtaaagctggataaggggctagagaaatgatagcaaggtggggctatttcagttactgtgatcagggaagtgtctctgacaggcagatatttgagcagagacttcaacaaaacaagagggcaggccctatgaatagccaggcagagagctttccagatagaaggatagcaagtgaaaaagccctaagatggaaggttgtagtattctaggaacagcaagaaagtctctggagttggagggtcatttgcaaaagaagaaactgtagaacatgaggatagaaaaatgtcttgataaggccttgtagcacggcaatggaaggaggttggaaagctgttgggagaatgacatgatctgatttgtgttttaaaagaaacgctctaactttattggtccaaaatggaaataaagagaccaattattgcattaattcagcgtggcaataaaggttgtttgggtttatgtagtaacagtggaaatggcaagaagatccatttaaaggaaaggccactgrgctcttctgatggattgaatgtggggaatgagagggagagggtcaagggtagtgctgcggtttagggctggaggaactagatggaaggtgatgttatctgctgagagagtgtgctgggtgaggagcaggttctagtggggatcaagggttctcttgtttgagatgtcatctgggcaattgaatataagtctgaagatgggaaagattgagctaggcacttaactttgggagttaatagcatgtagagggagatttaaagccaaaagactgcatgaaatcacctaagaagtgagtatggatggatccatcatttcatccctgaatacttcaggtatctccaaaagttagagatttttgaaaaacagtcataacgaattaatgatattcattgtctaatcactatttacatttctcagatttttgtctctcctcctttttttccctttcttttcttctttaaaaatacagggctgggcatggtggctcaaacctgtaatttcagcactttgggaggctaaggtgggtggattgcttgagctcaggagttcgagaccagcctgggcaacatgacaaaaccccatctctacaaaaaatacaaaaattagccaggtatggtggcgtgtgcctgtagtcccaactacttgggaggctgaagtgggaggatctcttgagcctgggaggtggaggttgcagtgagccaaggtggtgccgctgcactcaagcgtaggtaacaaagtgcagctctgtctcaaaaaaaaaaaaaaaaaatacagttggttggttagaatcaggattaaaataaaacctacaaaattgccttttgttgatatgtaacaaatattttaatctataggcttacccttttttcttgcaatttatttgttggcaaaactgggttatttgttctacaaaatttctcaaattgtgaatgtgattgagtgtgcatggtaatgttgtttaacatgttcctgtgttccatttcctatattggatcaggtttaattttggggaaaaaaatacttcgtaggtggtgatgtgtacttcctgatatagtgaatcaggaagcactttggttctttctctttttacaatatgcatatgtatcagtgggttcaggtattgcctctctggtccatccattataaaactctggtccacccattataaaacatccatccattattattacctctctggtccacccataataaaacgttcatacgttataaaactccctctccatcagcttacaacttactggttttagcaaccattgatgaccattacctgaatccattattcagtagggatggcaaaatggcgataccgaaagcctttttttttttctttcttaatttaattagctgaaacacttgtataaagaaaaactttacctcatcaattacttggttaccttgaggtacagtttgtacaggccaggtagaataaatgcgtagaattctccatagttgaccagagaagcccctttatgatacttcctgtgtcctttagacaagacactagtagccattgatagctttcttgttttcccagtatgacaggaggttccagggttgtcttgtccatttcctgctccagatttgaattagccatttctctaaggagtcccacacctttactttttttgtttgttttgagacggagtcttgctctgttgcctaggctgaagtgcagtggtgcagtcttggctcactgcaacttttgcctccgggttcaagttattctcctgcctcagcctccccaagtagctgggactacaagcacatgccaccatgcctggctaatttttgtatttttggtagagacagggtttcgccatgctggccaggctggtctcgaactcctgacctcagatgatccgcccaccttgtcctcccaaagtgctgggattgcaagcatgagccaccgtgcccggcctcacatccttacttttaaccagtatgcaatatgagatggttagagagtacacaggttttgagtcctgtgatctcataatgatcttttccccccataccttttgttcttttcttatgtgttttaggataataacatagaataaaatgctttaaagaagtaacacattaatttatattttaattgcacagttttgaatgacttaatttattaagtcctattacctcaggagtctccagcccctgggccatggactggtactggtctgtggcctgttaggaactggaccacacagcaggaggtgagcagtgggcaagtgagcattaccgcttgagccccgcctcctgtcagatcagcaggggcattagattctcgtaggagcatgaactctactatgaactgtgcatgcaagagatctaggttgcatgctccttatgagaatctaatgcttgatggtctgagatggagcagtttcatcccgtaacagccccctacttctggtctgtggaaaaattgtcttccacaaaaccagtccctggcactgaaaaggttggagactgctgccttgtagcattttttggtttagtaactcaaaagtgaatttagtccctacaacactaattcttcagtataaaccatgaagattatcacaaaatcagacgtaggttagtttttgaatatgctctacagttaagcttgctgtactctggttgttgctttccactgatcttctgtattagtccattttcataatgttgataaagacataaccaggactaggcaatttacaaaagaaagaggttaatggattcacatttccacgtggctggggaggccttccagtcgtggcagaaggtgaaaggcacatttcacatggcggcctacaaaggaagaggacttgttcagggaaactcccctttataaaaccatcagatcatgtgagacttattcactatcatgagaacagcacaggaaagacccaccccccccatgattcaattacctcccacctggtccctcccatgacacattggaattgtgggagctacaagtcaagatgagatttgggtgggggcacagccaaaccatgtcgccttctcttcccattctcttcttaaacttcgtatgcatgagccaaagcataaattattaagtaagtaggcaggcagaatcacgctgattacaatttataccccccccccacacatatacatacatgcagagaaagacctttcactgtgagaaagttcaacctgcagattgtataacaaagtcagaattctggtacctatgatatttctccgtggttggtgggaaccaaatcctttgtggaaccactagtggcagaaataaatacaaaatagaacctaaaggcctgagctctttgcataatgtcttcttcttcttttttttttttttttgagacagagtctcactctgttgcccaggctggagtgcagtggcgtgatctcagctcactgcaacctctgccccctgggctcaagtgattctcttgcctcagcctcctgagtagctgggattacacacgtgtgccaccacacccagctaatttttgtatttttagtagagacagggtttcaccatgttggccaggctggtcttgaactcctgactgcaagtgatctgcctgcattgtccttccaaagtgctgggattacaggtgtgagccaccacgccaggcccataatgtctttccaggagactaccttttacctgctagaccaactgcagcatgacagttgctttcttgcccagaacttctctctctgagataaagtatgtatggggatgatacaggaaaaaccattaaacccgagattgtatatagccaccatgctttagacatagggtatacacctgtgccttctgcctgtgcttaggctgctctgacagtacccaaggttgtattagttctttgaggatggtcaggggcagatgttcctaaatatttctgaatttgccaggcatatttaaggaaattgaatgaatttgttgatttgagtgatatcggattctttttctgctgtaacttgtcagtaaattttcttatttttggatgatcttctttgggtcagttatgaaaacaaggcttatgtggtaaagcagaagtgcagatgggggagctggttttttaattgtacaggctgtgtattccttatccagaataaggaattcttatccaaaataaggtcctttttgggaccagaagtgttttttttgggtttgggatgtttttcggattttggaatatttacattataccagttgagcatcctaaatcctaaaatctgaaatctgaaatgcttcactgagcatatcttttgattgtcatgttgatgctcaaaaagtttcagatttcagaccattttgrattttcagattagggatgttcaacctgtgtatcagtgccctagctgtagcttcactcacatgagctcttgcaggaagggccctgcgggaatctttttggagattgctggcctggccagtagaacttttttgtagtattaaagagagggagatatgtctgtttctaacttcccattgacagatgaatggacaaatgaatgtatgaatctgacatgagtcaaaacaagcaaaaaagaaaattttattaaatatactcagggactgggaaccaagtttttaaaaaagtttgctcaaaagttttgagcacagttttgctcaaaaaaaaaaaaagcattgtttacaagtttttctattactatatttttatggagtcaatttttacaaactgaggatatattcttacctttattctgatcgttaatatctttgtaatattttactttggttttctgagttgatattataatattaattgtctaggaatggttatgttaattgaacctactgtattaaaatgctttaggaaagatttaataactttttctctcttgtataaggtgaagatctttcactaagcatgatctttgtgttacttttaattagaacattagacctatcaaatataaacatggtgaaactgctagagctctcttacttcattcaggtctctgctcaaatgctgcttcctctaagcagtatttcctaatcaccctactgataaactaggcacaccctctccattattctctcatttacttaacgagctttctcattctttcaatatatttaattgcgcttctcactagtcgacttttgattgtgttcactgttctgcccttggcacctagaacagtttctggcaccatgaaagggactccataatgacttgttgaatgagtaaattgttcatcatttgtcaccccactaggatgtaggactcatgacggtgcctggcacgagstgggcattccaacatttgtttgaaagaataaaaggaatgtttacaagtagtgatcaaattcattttttatatttatgtatatacaggtgatcatttaagttttaattatatgtttaaattgaacataggtatttatcatatagaaatagattattaaaaaggatgcagtattcaagtaacatccaagaacctacaaaatctgctgcttttttgctaatgtggatggrcagatttacatgtagggtcacaatttttttcagtgactcaataacacctggtgtattttaatatagtgtccatagacatcagagtgctgtatgtgacaaactcataaaatggattagtatctggattggttttttattttattttattttattttttttagagctagaatatccctttgtcgcccaggctggagtgctgtggcgtgatcatagcttactgtaactcctaactcctaggctcaagtaatcttcccacttcagcctcccaagtagctaggactacaggcgccctgccccccaactatgcctggttgatttttaaattttttttagaggcaaggtctcaatatgttgcccaggccggtcttaaactcctcctgccttggcctcccatagctctgagattacaggtgtgagtcactgtgcctggcctggatttttttcctctacttgcttcattagtattgtagtgtaaatgtccatcagtgtgtgtgtgctttatacgtatatacgtatatatacacacgtatagacgtgtatacgtatatatacacacgtatagacgtgtatacgtatatatacacacgtatagacgtgtatacgtgtatatacatatacgtatatatgtatacatatatacatatgtatatgtatatgcatatgcatatgtatatatacatatatgtatatatatgtgtatatgtatatgtatatgtatatgtatatgtgtatatatacatatacatgcagagaaagacctttcactgtgagaaagttcagcctgcagattgtataacaaagtcagaattctggtacctgtgatattttctccatggttgatgggaaccaaatcctttgtggaaccattagtggcagaaataaatacataatagaaactaaaggcctgagcctttaaatatatatatatatatgtgtgtgtgtrtatatatatatatatwcacatatatatatrtgtatatatatatatrtgtgtgtgtgtgtgtgtgtrtatatatattttttgagacagagtctcgctctgtcacccagactggatggagtgcagtggtgccatctcggctcgctgcaagctccgcctcctgggttcacaccattctcctgcctcagcctcccaagtagctgggactacaggcacccgccacaactcctggctaatttttttatatttttagtagagacagagtttcaccgtgttagccaggatggtctcaatctcctgacctcatgatccgcccgcctcagcctcccaaaagtgctgggattacaggcttgagccaccgcgcctggccaataaagctttatatttttataagaacattttataaactcttgttcacacttaattttgttttttttccacttcatcttgtattcttgtggtttccttggtttcctttaggaacactgtggcatactttgttgagttcttttatcattccctaacttactaattgttcctatatggtgagggtttatgaagcagcatggtactacttctggtattcagggcctttggggagaggggatgaaaatgtagatcagaaatatgagaagtggataaggcattaatttggggcatcctgaagagctgagtgtcagcctggctttgctggattgattatgtgcattaggtggtctgtgcttctggaaaataaagatccttttttgaactacatgattagtgtccaataccgttagcttctgaatatgcagtttcttccttagaaaagaaaaatctgctcttttttttttttcctctctcagtgatttagcagaatttttctgttttctttaggtagttaaaccagagagcaatgacaaagaaacagaagctgcgtatgaatcagatatccccgaggagctctgtggacaccatctcccgcarcagtccctgaaaagctataatgacagtcctgatgtcattgtagaggctcagtttgatggcagcgactcagaagatggacatggcatcacacaaaatgtgctggttgatggtgttaagaaactctcagtttgtgtttctgagaaaggtgagtactagactattgtcttactttttttttaagtacactgattaagtattggaattccctctctgctgcagagtaaataacacaatgccattgatatagtcctaatttttgacctgtggcmgctttcagaaaagggggatctttgacaggtttagctgctggttatgaaagaggggatgaaagtgcttccagcggtttgtgtgggcagtagttgcagttgccacattcctaataggcttgagctgtgttgctggttaacgttgacatctcttgcgataggcgcaatcctgtggatgatgtgaacacaattaaactggtatgtaaaattcatatgaaaaatcactttattttactttcagttttactttaaatatcttttagaagtatttttgtcggctgggcacagtggctcacgcctgtaatcccagcactttgggaggccgaggcgggcggatcacgaggtcaggagatcgagaccatcctggctaacatggtgaaaccctgtctctactaaaaatgcaaaaaaattagccaggcgtgggccgggcgcggtggctcacgcctgtaatcccagcactttgggaggccgaggtgggcggatcacgaggtcaggagatcaagaccatcctggctaacacgttgaaagcccgtctctactaaaaatacaaaaaaaaaaaaaaaaaaaaaaatagccgggagttgtggcgggcacctgtagtcccagctactcgggaggctgaggcaggagaatggcgtgaacctgggtggtggagcttgcggtgagcctagattgtgccactgcactccagcctgggtgacagagtgagactccgtctcaaaaaaaaaaaaaagttttttttgtcatttctggtgggcatggatcacccaaaattttataaacaaatagccttagaaagtattttgattctaagccttttaaaaagccagttttgttttctctgattgaaatctaagccatgggccctctggatgcagaaaaaaagcagttgtaaacacatgagagctgtgaccacggaccctacctgaccacacttgaagagacttaaggaaaatattaagtacaatttgaatatttcaagttagagattttgaagaaattctacatagaaggagtatattttctagccaaatcgaattttatgtatactattaatggaaaccgaccaactctgacctggccaggctgactagataatgagctttgttatcaagaagaagtttctggcacagttcccatgaaaggctaggagaaatgccagaagatttctaaaggaggatgttcagcagacaactcgtttagggactggtgagcatatgtccccccagcgtaaagaaagccgaaggtatcttcaggacatgactggagaaggatgactgcttttctccattgctgaggaggtagtgatctgtgaaagaaagcattttttgaaagcatgtgtcctttttggtgccaagtactcattcagaatgactttccaactttgaaattcttcttgactgaagaggctactacttcctgtgtcaggtactgctatgggccccaccaggtatcactgccttcagggtacccaggttccttttgtttggggacaygtttaggtaactagtggtttccctgtttagagctcagccagttccttttggatgctattccttgacattttattcttgcgatttttctactttcttttctttaaaaatagtcgaatactgtgacattcctcttaaagtaaatgtgtattatcgtaatcacatcagtactatgagtcatgtattttcagtgagaagagtggcaaataaccaggactctaagtagccaaatccttcattaacaagatcagcaaggaagagagatattcacaggataaagccaggcaaaggaacactttaaagcatattgagtatttggcttaaaactacttcgtggaaacccagctctggtgataggcttggcagatctcagcagcctcttttcctctgggctccaagtgaagggataagacacattgatctctcattagtggttggtacaaatataaggacaaggaaatactgatggatggaagtgacagcagaatggatgtctgggttggatgctaacggtttactttgctggcatccaacccagagttttgcgaaactctgatgctatacctcctcttgattcaccctctattataattcttcccccacactccttttgagatagggtctcacttttttgcccaggctagagtgcaatggtgtcatcatagctcactgcagccttgtcctcctgggctcaggcgatcttcctgcctcagcctcctgagtagctgggactaaagtgtgcaccaccacacccagataatttttgttgttgttgttgttgttttttaatacagccctgttgttgccagggctagtcttgaactcctggcctcaagcgatcctcctgctttggcctcccaaagcgctgggattacaggtgtgagccattgtgcctggcccctccctctttcttacaagtaaatatcactgagtacgttacaagcccgctgtatgcatgtttctttccttattctttttgcatccttcctagcccactgttatttatattacttccttagtagccctgactgagggaacaaccttaatccttccctcagtatctggtacagatttctctttcctgctagcctctaaatggagagtttgtgaaaccacatggctgtttctcatttcttgccctcttgatatttaggaaaattgcaatttgctcttttgaaaatcacagcatttttaaggatatttcaaccatcttctcttacttgggataataaaaaaaatctggttaccattaggatgttagtactttttgcactatttagggttttgaagtttgttattgaaacaaaccataaccttgagaatatcaaacttttcctaagacttctagaaaggttctttgctttgtgttctacttgcaagtggattattaatcctggttcatgcttgtgttcaaaagtgtttttttgtttgtttttgctttagtattatgtttctttgcccaaagcaaatgctctatattgcatgtgtatttatagcatatacctatttgctgaggaaatatttatatctttgtgataactaccagtttctctggtaagagagcacattgctcccgttgtctgtagcaagtgcctgtcattgcgttaagagaaacatctcagcatctcagacattcatacagtagtttctttgaggacgactacacaggtctgcattatccccagyccctgagagagagtgggccaaagacctgggccccttttagagatccactccccaatccccctttgagattgaacttttaccactttacaagcagtagctttgttgttagcatagaaagctgccatccatgtggagcttagggacaaccaattaaaattttcttggtatcaaatgcgtaaatggctttaaaaatgttcagctgttgtgctaggaaatagtaggtcttattcattctttgtaactatctttttttacccattaaccattgccacttctccccacttactacccttcccagcccctggtaatcatccttctactctctatctccatgagttcagttgttttagttttttagctctcacagataagtgagaacatatgaagtttgtctttctgtgcctgactacttcacttaacataatgacctccaattccattaatgttgcaaatgacaggatcacattttttttaaatggctgaatagcactccatcgtgtatatctgccacattttctttatccatttgtctgttgatggacacgtaggttgtttccaaatcttggttattatggttagtgctgcgagaaacatgggagtgcagatatctctttgatatactgttttcctttcttttggatatgtacataggagtgggattgctggtatggtagctatttctagttttttgaggaacttccaaactgttctccatactgattatactaatttacattctcaccaacagtgtatgagggttcccttttctccacatcctcaccaacatttgttattgcctatcttttaaataaaagccattttaaccaggatgagatgatatctcattgcagttttgacttgcatttctctgatcatcaatgatgttgagcacttttctgtaaacctctttgccatttgtctgtcttcctcgctcaagaagtctttgcccagtccaatgtcctggagagtttctccaatgttttctttctgtagtttaatagtttgatgtcttagatttaagtctttaatccattttgatttgattttttatgtgagaagagataggagtctagtttcattcttctgcatatggatatccagttttctcagcaccatttattgaagagactgtcctttccccagtgcatgttattggcacctttgttgaaaatgagttcactgtggatgtatggatgtatgtatggatgtatgtattctgggttctctactctgttccactggtctgtgtatctgtttttatgccagtaccatgccgttttggttactatagctctgtattataatttgaagtctggtaatctgattcctccagttttgttcctttttcttgagatagctttgactattttggatctttgtggtgctgcataaattttaggattttttttttctatgaagagtgtcattggtattttgttagggactgcattgaatctgtagattgctttggtattgacattttaacaatattgattcttcccagccatgaatgtgaaatgtctttaaacatttttgtgtcctctttaatgagattcatcaatattttatagttttcattgtatagatcttttacttctttggttaattctgagttatttaattttatttataactattgtaaatgggattactttcttgctttctttttcagattgtttgctgttagcatatagaaatgctactsatttttgtatgttgattttatatcctaaaagtttactgaattttcagttctaatagttttttggtgaagtctttagggttttccaaatataagatcataccatctgcaagcaaggattatttgacttcttcctttccaatttgggtgccctttatttctttctcttgtctgattgctctagctaggacttccagtactgtgttgaataacagtagtgacagtgggtattcttgttgtgttccagaccttagaagaaagtcttagtttttccccattcagtttgatattagctgtgggtctgtcctatgcagcttttgttaggctgagatatgttccttctgtacccagtttttcaagggtttttattatgaatggatgttgaattttatcaagtgctttttcagcatcagttgaaatcatcatatagttttcttccttcattctgttgatatgatgcatcacattgattggtttgcgtatgttgagccatgtttgcatccctggaataaatctcacttggtcatgatgaatgatccttttaatgtgttgttgaattttatttgctagtattttgttgaggatttttgcattaatattcatcagtgatattggcctgtagttttttttaaatatatgtctttatctgtttttgatatcagggtaatattgcccctgtagaatgagtttggaagtattcccttctcctctgtttttcagaatagtttgagtaggattggtattaattcttctttaaatgtttggtagaattcaatagtgaagccatcaggtcctgagttttctttgtaggaagactttttattacagcttcaatcttgttatttgttactggtctgttcaggttttgcatttcttcatggttcaatcttggtaggttgtatgtgtctaggaatttatcaatttcctacattttccaatttattggtatatagtttctcataatatccactaatgatcttttgagtttctgcagtatcagttgtagtgtctcctttttcatctctgattttatttcttagtctggctaaagatttgtcagttttgtgtaacttttcagaaaactatctttttgtttcattgatcttttggattgttttcttcatttcaatttcatttacttctgctctgacctttattatttcttctactaattttgggtttggtttgctattgcttttctagttctttaagatgcatcattaggtggtttatttgaattttttcttctttttcttttttttgatgtaagcactgctttccctgcatcccataggttttgaatatgctgtgattccattatcatttgtttcaagaaatttttaatttgttaacccactggtcattcagcatgttttttaattttcatgtatttgtatagtttccaaaattcctcttgttattgatttctagttttgttccattgtggtcagagaagatactttatactatttcagtttttttgagtgttttaaggcttgttttgtgatctaacatatggtctgtccttgagaatgatccatatgctaaggaaaagaatgtgtattctgcagccaatggatgaagtattctgtaaatatttattagggctattttgatctataatgcagattaagccagctctttctttgttgattttctgtctgcgagatctgtcaaatgctgaaaatggggtgttgaaatctccagctgttggccaggcatggtggctcatgcctgtaatcccagcactttaggaggccaaggaaggtggatcacttgaggacaggagtttgagaccagcctggccaacatagcaaaaccacgtctcttctaaaaatagaaaaattagccagtcatggtggtgcgcacctataaatcccagctactggggaggtggaagtgggaggattgcttgaacctgggaggcagaggctgcagggagccaagactgcgccactgcactccagcctgggtgacagagcgagactccatctcaaaaaaaaaaaaaaaaaagaaagaaaagaaagaaagctccagctgttattatattggggtctatctctctctctctttagctctagtaatatttgctttatatatctgggcactccggtgttgggtgcatatatatttaagatttttataccttcttgctgaattgacccctttatcattatatagtgatcttctttttctcttcttatagtttttgccttgaaatctattttatctgatattaatataggtacttctccccttttttggtttccattggcttggaatatctttttccatccctttattttcagttgatgtgtgtctttataggtgaagtgtgtttctggtaggcagcagatcattgcatcttgttttttcatccattcagccactctgtgtctttgtattggaaagttcagtccagttacattcagtgttaacattgatgagtaaggacttactcctgccattttgttatttgttttttggttgttttgtggtcttctcttctttccatcttcctgtcttccttttagtgaaagtgatttttctctggtaatatgatataattcttgctttttaatttttgtgtatttgttgtatgttttttgatttgaggttacaatcagtattacagatgctatcctwtaacccattatttgaaactgataacagcttactgtttttataaataaataagcaaaaagaaaactaataaaaactctacactgtaacttcatcccctcactttttaagtttctgttgcttttattcacatcttacaatattatctatgtcttgaatagttgttgtagttattatttttaattggtttatcttttaatctttctatttaaggtaagagtagtttacacaccaaagttacagtgttataatatttcagtgtttttctgtgtacctactattatcagtgagttttgtaccttcagrtgattttttattgctcattaatgttctgttctttctaattgaagtactccctttagcgtttcttctaggacaagtctggtgttgatgaagtccttcagcttttgtttgtctgggaaagtctttatttctccttgatgtttgaaggatactttcactggatatactattccatggtaaaagttttttttttctttagcactttaaacatattatgccactgtaaagtttccactggaaagtctgctgccacatgtgttgtagctccattgtatgtttgtttgtttgtttctctctcttttcttttctttttctttttcttcttttcttttctttctttctttttttctgcttttaggatcctttctttatccctgacctttaggagtttgattattaaatgccttggggtagttgtcttttttttttttcttttgagacagagtctcgctctgtcgcccaggctggagtgcagtggcgtgatctcggctcactggaagygctgcctcctgggttcatgccattctcctgcctcggcctcccgagtagctgggactacaggcgcccgccaccacgctcggctaattttttgtatttttaatagagacagggtttcaccgtgttagccaggatggtcttgatctcctgacctcgtgatctgcccacctcggcctcccaaagtgctgggattacaagcgtgagccactgcacccagcgccttggggtagttttcttttagttaaatctgcttggtgttctataaccttcttgtacttggatattaatgtytttctctaggtttggggaattgtctcttattatttcttggattaaattttctatccatatgtctttctctacctcctctttaaagccaataactcgtaggtttgtccttttgaggctgttttctagatcttgtaggcatgtgtcattcttttttattcttttttctcttgtctcttatgtgtattttcaaataacctgtgttcaacctcactaattctttgttctccttgatcagttttgctattaaaagactctgatgtgttcttcagtatgtcagtttcatttttcagctccagattttctgtttgattttttttaatcatttcaatctctttggtaatttatctgatataattctgaattccttttctattatcttgaatttctttgagtttcctcaaaacaactattttgaattttctgtctgaaaggttacatatctctgtttcttcaggattggtccttggtgccttagtttgtttggtgaggttatgttttcccagatggtgttgatgcttgtggttgttcatcggtgtctggacattgaagagttaggtatttattgtagtgttcgtggtctaggcctattgcatctgtccttcttgggaaggctttccaggtattcaaaaggatttgtgtattgtaatctaagccgtatgtgcattaggggttaccacaagcccagtaacactggtttttgcagacttgtagaggttctgccttggtggtcttggataagatctggaagaattctctggattaccaggcagagactcttgttctcttcccttactttctcctaaacaaaccacatctctctgtctgtgctgagccacctggagctgggagtgggctgacccaagtacccctgtggccattatcactgggactgtgttggatcagacctgaagccagcacagcactgggtctcacgcaaggcccactgtaaccacaacccaacaacctgtattgctgctgagctgactttcaaaccacaggatgcagtccttctcacccttccctcccctttccacaggcagaggagcctcaccctgtggctgccaccactacagacccatggggagtactgccaggcttccaccaatgttcacttaaggcccaagggctcctcagtcaacttgtggtgatgaatgttgctaggcctgggacttacccttcaaagtggtgggctcccctctggcccagggcaggtccagaagtgatgccatgtaagagccaaggcctagaatcaggaaccccaagagcccacttggtacccttctcccctgaggccgagctggtacctaaggtgcaagacaaagtcttcctttcttttttctctgcttttctcaagcagatggagtctctcgcgatagccaccacagctgagaatatgctgtgtctaaccttaagctggcatgtctcagagtctcactcaaggcccatggcatgctacttgagtatcacggctggttattcaggatcggatggctctttaattcagcaggtgatgagtcctaccgtgactgagtcattcccttcaaggcaacaggttctctttgggcgtagggtgtacctagaaatgtcatcagtggaaaagttttcttccctgtcttttagtctgggtgaacaatgtagtcatactaggtaggatagatggtcaggacccacagtgttctaagacccaaatcctatgctagaccagacattcctccctatgaagtttacaaaagaaatatacrcagaggacaaagcaaggcggaggaacaattctttttttattaactgaagcttccatctaagccagaatgattgtagtgtacactcctacttgcaatgtatgaggctccttgtatcttctcatctctgccaacagttaggattatcgaggtttctaatttttttttttttttttgagacagagtctactctgtcacccaggctggagtgcagtgacaccatcttggctcactttaacctccacctcctgggttcaaacgattatcctgcctcagcttcccgagtagctgggactacaggcacacaccaccatgcctggttaatttttgtatttttagtagagatgggttttcaccatgttggccaagctggtctcgaactcctgtcctcaggtgatccacctgccttggcctcccaaagtgctgggattacaggtgtgagtcaccccacccagcctagctttctaatttttgtaatatagattaagttctattaattgcttttttaatatcatttgcccatttttccatcagggtgactgttctcttgttgatttacaggaatttcttatcttctatctaataatccctttcctaacagttttacaaacatcttctctcattttgtcatttagtcatttgtctattaactttgtgtggcattcatagaacaaacatttttaattttaatgcagtaaaagttgtcatacactttatgggtttttaagtttttccctgtcactagatcacaaagatattctcccttgtaatcttttattaaggcaaatctttattaagattttattaaggcaaatcttttgttaagttttgccttttgctaaactttatgatgcgcattcttcattgattaagattatcgtctggtttctctcttctaagtctatttctgatgttgaaccatccttttattcgtcatataaattctacttaatcctgatatgtcattattttaaaaatacatgattggattcacttaggtaatattagggtagtattttttgtatttttttttttttgggacagagtctagctgtgttgcccaggctagagtgtagtcacaccatcgtggcttactgtatcctctgcctcttgggttcaagtgattctcctgcctcagcctcccaagtagctgggattacagatgtacaccatcacacccagataatttttgtatttttagtacagacggggttttgccatgttgtccaggctggtctgaactcctggcctcaagtgatctgcatacctcagcctcccaaagtgctgggattacaggcatgagccactgcctggccaagtgtagtatttttatgtgtcatgttaaaatggatctttgatttttttgttaattcagtgtttagaatcaagattataataaattaatgaaatgtcttggtcagtttctgagagtttactgtttttctagaacagcttgtgtaaaacaggaatgaacccttgaaatttggtagaactcattgtaaaattgtacctgctgtttttcagaaggcaagatctttgctgttttaatccctattatactaattggtctgttcagattctctatcagttcttgtgccagttttggcataatttaatgggaatttatccattcaactttattagcatgtagatattcctaatgctcgttatattctgttatcatttcaaaaatctcctttgtgtctgtacttttgtattccttttcattctatattttaattatttgaatcttcttttttctttgataactcttgctcatcaagggtcttatcttattaatcttttcaaagaacaattttggttgtgttatttttctctattttttatttttattttttgagacagtcttgctctgttgcccaggctggagtgcaattgcgtgatctcggctcactgcaacctctgcctgctgggccctgcctcagcctcctgactagctgggattacaggtgcctgccaccatgccctgctaatattttttttttttttttttttgtggtagagccaaggtttcaccatgttggccaggctggtctcgaactcctgacctgaagtgatctgcccaccttggccttccaaagggttgggattacaggcgtgagccaccacacctggccttttttttcctctattgttgatgttttgtgtatctttgatatttgcccttaactttttaatttaatttcttattttccagggatgttgcttttttgccctttccccaaattcttgagttgagtacttagcttattaattttaacttttcttgttttctttgaactgtttttaaagctacatatgtacctctaaatacttctttagctctattctacagatttttatgtccagtgtttttattattattcacttttaaatgttttcttttctttgtgatttcttttgtaactaggttatttattaaggctatttaattctgtattttgctattttttgttaatgtttaattttattgtcagagtataggatgtctgtatatttaattctttatagtttatggatagttccattatagtttattatattgtctatatttttaaatattacacatatgctttgaaagaaaggtgtgtgtgtgtgtgtgtgtgtgtgtgtatatatatctccacaaatttgatttataattatattgttcttcccttcatagtaagctgtttattattgtgtgtactttatctgtcagtttctgagagggatctttaaaaatttatgtctgggggctgggtgtggtggctcacgcctgtaatgccagcactttgggaggccgaggtgggcggatcagttgaggtcaggagtttgagaccagcctggacaacgtggtgaaaccccgtctctactaaaaatacaaaaattaggcgtggtggtgcacccctgttgccctagctactcaggaggctgaggcaggagaatcacttgaacccgggaggcagaggttgcagtgagccaagattcataccactgcactccagcctgggtgatagagtgaaaaaaaaaaaaaagatataccttccatttaaaaatctgtgtctgtaaattttgatgtatttgtatttcttacattttgatttatttgtatttcctacagtcttgtcaattgtagcttgatatattttgaagttgtgttgttatatacatatgtgtatgctagaatatacctagatgtatttttgtatacatgcatatccatatatgtggataactatttgtacccatatttatcatcagtatttagtgaacatttacaatgtgctaggccctttctaagcactttgtaattaattctcattacattagttaatccttagaacatacctagtatagtgtctattttaggaatataaatagtatctatctcaggaattccagtagtttttattcccaagatgcagaaaagttatgcagttggtaagtatactttaagatcattctaattgatctggaatagggctaagcattggtattttgaaagagctctttagagattcaaggattctgctacatactyagcattgctgctgtagaatcagccctaggcttgtcctcccaactattacattctttctcccctaataaatagcaatatatacaatacaggttaaacattcatagttctctaaccctgagtttaataattcaatcaagaatcattgctggatactaaaactattgagataaaggttttggggaccaagatattcacatggactcaaagtatcatgccacagttgacttactaattaattacactgggcagaatgtccttttatagtggacatatttggtggtcaccagtttaaccaactgatcaagcttagcatcattaattgggatagtctgacattttgtaccttctgatgggatgcattattgaatatcattgtctgtgaagcattcatgctaaaaatgtttcaccggaatcaagcctctagccctaacttccagtctactggaaatacaggggatattggaataagttaaatgacaccaagggagaaataataagattaaatccaatgccatgaaaagcaaggggagttgttctagtgaaacaaaaagcaagagagacataactaaaaatattgtgtgaagcttggttagaacctgggttggggaaataatatggtagcaacaattggggagatttaaatttagagtggatattaggtgacattttggaattaccattaattttcttaggtgcgataatgatattgcagagatataggagaatgtccttatttttaggagatactggctaacatggttggggtgaagtatcctgatgtctttaatttattttgaatggttcagaaaaaagaagaaacgaaactatgtggttgtgtgtgtgtgcaaacacacgtgcatatacaaatcaagagagaatgggtgcaaatgtagcaatatgttaattggtgaatcaataggtgttcataatatcactgtttcagctttttagtaaatttaaaaatctttaaaataaaacattgggtgaaagagaaaaattgctatgttctacagttcggtgtggatttcaagagstggcattgctcatcccatctttggccctgaagtaactctaaagcataaaataataattgcttattcaatacaaatatagtcaggactgctgttttcagctgggtcttttttctaaaaattacttttattcggccagtcacaattttatttcccattaaaaatgccagtgtgtcacacaaggtggtagtaaaataaaaatcttgagtaaagatttttaacttatttgagttaacagtggattaagagaaattcttgtgaaaattaatgaagccttcaagtaattttgtaaacatgattgtttttatgaacctcctgtaaaagtcaaacagaatgacttttgtaaaagtgaaacgttcatttgcttgaatgttctgattatttctaataattttgtagttggttgttttgattttctaggtgtaaaataattttgtcttttcctttctaattttgtaccttttatttattaccttatttcattggccattactttaagaactgtgttgcataatagtggtgattgtcttgttccagactttaatgggaatgcttccaatattaaaccctcaagcacaatgctggttattggcttgagaccaagttaaccaaatgtcctcttttatattaaaagtttctgttgggaatagatattgaattctcctcaagtgccttttgagcctctttcaagatgctgtttttccctttggcttgttaacatgatgacatataatattgaataattcttgcattcctcatctgaccatgaccttcatttagtcatggtatgtagcatgcattaacatgtaattcagttgtgtttgctaatttattcatgatttttggatttacaataaaaagtgacattagtctgcagtttcttcttgttttcgtaacttggtaggaagaattggggagcttttctcattgccttggaatagttacaatagcgttgagagtgatcacatattctcaatgattgaagcaattgaagaactcatacttgaaacatgggctagagctttctttagttggcaactttctcaatctccrgtgattattgatttctttaaattttctttgcatgtattttgataattatattttccaggaaaataatacattttgagcacatactgtaatgtattagaatagagctatatgaagtattttcagttgtttagtttcatctgtatctgtgatcataacccctttcaggtccccccccaccacctttttttaacactagctagtgacttaatctgtttaatttttaatgcaaatagatttctgccatttttgtttattataaataatttctactgtttttattaccaaggaatttcttttagatatggtaaatctgagatggtcatatttaattagaaatacagactgaagttcatgatagaggtctgtgaactggaaatgcagtttcatgagtcattactgtcaaattaattccttgagtaactcctggattctgagagttcttttaagagactgtcagaggacgagggcctacctgttctcttttcctgccacctggctttccctccctgacgcagcaggtattgtttatcaaactgtcccctgccctggagtctctataacacacagaaacttttgtgggttaaatttgttttttattgtggtaaaaaaaaatttgccattttagcaatttttaagtgtacaattcaatgtcattaattacattttctgtgttgtgcaaccactaccactatttcccaaaccttttcatcatcccaaacagaagctctgtaaccaataaccatccactcctcatttctcccccaacccctgataactacaaatctacttcctctctataaattttcctattctagagatttcatataagtggaatcatacaatattcttttgtgtctggcttttttcacttagcacaatgttttcaaggcacatatatgttgtagtgtgtatcagaacatcctattctgtggctgaataatattccattatattgtatatactgaattctggtatttttgcttgtttgttttttgcttttgagacaaagactcagagggtctggctgtgttccccaggctggagtgcagtggtgtgatctcggctcactgcaacctctgcctcctgggctcaagccatcctcccacctaagcctcctggagtagctgggactacaggtggcaccaccacacccagctaatttttgtattttttgtagagatggggtttcactatgttgcccaggttggtctcaaactcttgagatcaagyggtccgcctgccctggccccccaaagtgctgggattacagatgtgagccaccatgcccagccacacattttgtttatccatccatgttgatgaacacttgaattatttctacctttggctattgaatagtgaataatgctgaaatgaacattggtgtacaactatcygtttgagtcactgttttcaattctttttatacctaagtcatataggagtagaattgctgggtcatagggtaattytgtgtttagctttatgaggattgtgaggtttttaaaagagggatttttgttggttattaaatacttggttattaggggggttaacagaaactgaaaatgttgatgtattatagaaaatcttgaaataataatgattacatctgttctttattcaaatataactggagcttgcccagctctttttcaggcttttccttttcacttctttctcttcccattttttaaaatcctggagtcattcctacctacttgcctagtttctctttgacacatcaacagacctaggcagcttgggtttcagaacatttttctaacattacaaaggacttattttatagaatatactctgccccactctgcctcttccagctagcaagaarcatcagccttgctaacacttttagcacaaaattgttgggatggaaacctaaatgaaaggaaataatgtctcacaaatgttcatcctgttatctggaaacagggattcccaggctcccaacatgtcagtcgctatgtgtgcctgtccttctcctttgttggaggtgagtgaagacttgaaggcccctgtgcctatcatccccatggcttttccggcaccttttccaatatggtgttcctgactctcttgcttgctctgcagttttagctttatactaggctccctgggcttttttataattcattttccttgggtttactggtaatgaaaagggtctctgagtaatggtatcattttttccttacttccttttccatgctctctagattctagccacttttggactctttcttcccagtccatctactgatcccactctgtgttactttccagatcagtccagtccatgctcatgacaaggtattgactcagggccatatctatttacaattacattacattgccatagaaataataaaattctggccctggtcgggtcctacaagatcatgtactcttgttgacatgtgatactctacccctaatggctcttagtggggcactttatgttatttacaaatactrttttataatactgaatgaaaatggtaaattttaaagggatggaggaagatttaccaagcaaatggaaaacagaagaaaccaggattgtaatcccagtttccaacaaaacagactttaaaccaccaaagatcaaaaaagacaaagaagggcattacataatggtaaagggttcaattcaacaagaagagttgcattacataatggtaaagggttcaattcaacaaggagagttaaatgtcctaaatatatatgcacccaatacaggagcacccagatttataaagcaacctcttagagaccttcaaagagacctagattcccactcaataatagcgagagactttaacaccccactgacaatattagattattgagacagaaaattaacaaagatattcaggacctgaactcagctctggatcaagtggacctgatagatagatatctgcagaactctccaccccaaaacaacagaatatacattattcttattgccacatggcacttattctaaaattgatcacgtaatcggaagtaaaacactcctcagcaaatgcaaaagaactgaaatcataacaaatggtctgtcggaccacagtgcagtccaatagaactcaagattaagaaattcacttaaaattatgcaaccacatggaaattaaacaacctgctcctgaatgacttttgggtaaataatgaaattaaggcagaaatcaggaagttctttgaaactaatgagaacaaagatacaatgatccagtatctctgggatgcaactaacgcagtgttaagagggaaatttatagcaataaacgcccacatcaaaaagctagaaagatctcaggttaacaacctatcatcacgactaaaagaactacagaacgaagagcagacaaaccccaaagctagcagaagagaagaaataaccaagatcagagctgaactgaaggagacagaggcatgaaaaacccttcaaaaaattaagaagtccaggagctggttttttgaaaaaaattaataaaatagatagaccaccagctagactaatagaaggagagaagattcaaataaatacaatcagaaatgataaggggtaggctgggcgcagtggctcacgcctgtaatcccagccctttgggagcctgaggtgggtagatcacttgatgcaggagtttgagaccagcctggccaacatggtgaaaccccgtctctactaaaaatacaaaaattagctgggcatggtggtgcatgcctgtaatcccagctattcaggaggctgaatcaggagaatcacttaaatccaggaggtgtaggatacagtgagccgaggtctcgccactgcactccagcctgggcaggcgacagagcgagactccatctcaaaaagaaatgataaggggaatattatcaccacagaaatacaaataaccatcagagaatactataaacacctctatacacataagctagaaaatctagaagaaatagataaattcctggacacatacaccctcccaggactgaaccaggaagacactgactccctgaatagactaatactgagttctgaaattgaggcagtaataacctaccaaccgaagaaagcccaggaccagatggatttatagctgaattctacaaagagctgctatcattcctactgaaacttccaaaaaattgaaaaaggggacccctccctaacttattgtatgagtccagcatcaacgtgataccaaaacctggcagagttaaatcaaaaaaagaaaacttcaggccagtatccttgatgaacatcagtgtaaaaatcctcaaaaaaaatattggcaaaccgagttcagcagctcatcaaaaagctgatcaagcaggctacatccctgggatgcaaggctggttcaacatacgcaaatcaataaatgtgattcatcagataaagagaactaaagacaaaaaccacatgattatctcaatagatgcagaaaagaccctcaataaaattcaacatctcttcatgttaaaatctctcaataaactagttattgaaggggaacatacctcaaaataatgagagctatttatgacaaacccatagctaatatcatacagaatgggcaaaagctggaagcattcttcttgaaaaccctcgtaagacaaggttacttgaaaaccctcataagacaaggttgctctctctcaccactcctagtcaacatagtattggaagttctgcccagggcaatcaggcaagagaaagaaataaaggtatttaaataggaagagaggaagtcaaactatctttgtttgcattgcagatgacatgattgtatatctagaaaacctcatagtgtcagcccaaaagcttcttaagctgataagcaacttaagcaaagtctcaggatacaaaatcagtgtgcaaaaatctctagcattcctttacaccaacaacaggcaagctgagagccaaatcacaaatgaactcccattcacaattgccacaagaagaataaaatacctaggaatacagctgacaagggaagtgaaggacctattcaaggagaactataaaccgctgctcaaagaaatcagagatgacgcaaacaaagggaaaaacattccatgctcatggattggaagaatcaatattgtgaaaatgaccatactgcccaaaacaatttttagattaaatgctattcccattaaactaccattgacattcttcacagaattagaaaaactattttaaaattcatatggaaccacaaaagtgcctgaatagccaaggcgatcccaagcaaaaagaacaaagctggaggcatcaccctacccaactttaaactatactacaggggccaggcggtggctcatgcctgtaatcccagcacttcgtgaggccaaggcaggcggatcacttgaggtcaggattttgagaccagcctggccaacatggtgaaaccccatctgtattaaaaatacaaaaattagctcggtggcacacatctgtaatctcagttactcaggaggctgaggcaggagaattgcttgaaccagggaggcagaggttgcagggagccgagattgcaccactacactccagcctgggcgacagagcgagactcagtctcaaaaagataaaaataaataaataaaaaaaaataaaaataaactgtactacagtgattcagtaaccaaaacagcatggtattggtacaagacacagaccaatggaccagagtagagaacccagaaataagattgtacatctacagccatctgatctttgacaaacctgacaaaataagcaagggggaaaggattccctatttaataaatggtgctgggagaactggcagaaaattgaaattgggccccttccttacactatatacacaaatcaactcaagatggattaaagacttaaatgtaaaaccctaaactataaaagacctagaagaaatcctagacaataccattcaggatataggtaccagcaatgatttcatgaagacaccaaaagcaattgcaacaaaagcaaaaattgacaaatggtatctaattaaagagcttctgcatagcaaaagaaactaccaacagagtaaacagacaacctacagaatgggagaaatgtttgcaaactatccatctgacaaaagtctaatatttagcatctataaggaatttaaacaaatttacaagaaaacacatccccattaaaaagtaggcaaaggacgtgaacagacccttctcaaaagaagacatgcatgtggccaacatttgtaaaaaaaagctcaacatcattaatcattagagaaatrcaaatcagaaccacaatgagataccatctcagaatggttattattaaaaagtcaaaaaacaacagatgctggcaaggctgtggagaaaaaaggaacacttttacactgttggtgggagtgtaaattagttcaatcattgtggaagacagtatggcgattcctcaaagacctagagccagaaataccatttgacccagcaatctcattacttgatatatacccaaaggaatataaatcattctgttatraagacacatgcatgcgtatgttcattggagcactattcacaatagcaaagatatggaatcaacctaaatgcccatcagtgacagtctggataaagaaaatgtggtacatacacacattttctatgaatactttgcagcataaaaaggaacaaaatgatgtcctttgcagagatgtggatggagctggaggccrttatcctttagcaaactaatgcaggaacagaaaaccaaataccgtgtgttctcacttgtaagtgggagctaaaagatgagaaggcatggacacagggaggggaacaatacacaccggggcctgtcagaggttgtgttgtaggaggaaggagaagatcaggaaaaatagccaatggatgttgggcttaacacctgggtgatgggatgatctgtacagcggaccaccatggtcaccatgtgaccaaacatggcacatgtttacctgtgtaatgaatctgcacatcctgcacatgtacccttgaacttaaaagttggaaattaaaaaaaaaaaagaaaatggtaaatgtgcttttaataagactgcaagatcaacttagattactttctatgtgaatggtaccagcccactgtagttacattgactttgcctgctggccagaagctctaattaacagttatatgtttttgatatttaaaaaggataggaaattaatgatagatgtagttgttactaaaaatacttcaaaatgtgagatcctgggcaaatttaaaaagatcttattaaaaaactgctgtgcttaaaagtttagaaacaactgatatagttcatcccttctgttttacagacaatgaaattgaggctcagagaagttcctgggcttatccagtatcccacaggaagtcagtgagttcattaaagaaaaatacttgtacctctattagtagcagccaatttctagaatagatcatatttttttaaagagcacatcatggacattgttcatctagtgtttgcttcccttttccctttctcatatgtataccgattttcgtctggatatctgcttgttccccagattccttgtactttgggcaaagttgatcccagttgccaagctgggtcttggttggcttatacaagttttgcttagtatacttcattgcctgcaccagtagaactttctgtagcaatggaaatgttctaatctatactgttcagtactgtagccaccagccacatgtgactcttgagctcttgaataaggctgatgtgactaataaatttaatttttaaatcgtatttaattttaaatagctacatgtggttagtggtcactttatgagatgtcataacatgagaccattgcctcttcccataagcccatgacctaagcagtccagtcaggctgaatcctgcttggaattctgtggtgtaagtagtttcctgatggatatgaacaaggcaacacttattccttactgctattagcagctatcttatgacttgctaagtattatacatagaagagtaaagaaccagaagcaaatatgtgctcctacattagatctaaggccattagtgaaccttggatcaactgactctgaagccttgcctacctttgcacttccaaatacatgagctaatttgtcacctttgatgtgtaagtcagttggagttgaattttctgtcatttcagccaagagcaactaagcagatacaaaggcactgatagacttcatgttttatataaggcttttgagtttctgatgggcattgtcatgaacaaattttgtaattgagggagagggcttctttgtggtaaaagatgatgtgaacaacctctagttccactctgctgcttgcttgccaggtaacttggacaaatcaattttcttcttakatcccaaggttttcatggggctggaggccattatccttcagcaaacttcacgtaagtgaggattatgctattttacaactttaaaaataggggcctgagtgggtttatacacacaccaggctttatgttacttgctggggaaagaaaagtgaatacaaagtaaaatctggatactagtcttcgggtgcacttagtccttaagaggagagaccataacagatgtgctctggatcttgcctgctgtagctccttcagtgggaagtccccttactgaactggtaaatacagtctgctcttgtccccagggccttgcttagaccatgagtagactcctgtcccaaggaaaaccaacacattgactggccagtgatccactagatatttttcttcatggcttgagagctctggagctgagatgtcacatggagttagggctggaaacaaagttgttagggaacagaggctctagcaactgtagacagtggcatgtagacaagaggaacagatttgcaggcagaaggagggaccattcagagaggaagggggacaaggtaaaaggaggtatggtagaaaaagggagagaaaaaaagaggacaatgtatttcctgggccttgaagggtgagtagggcttgccaagtgaaagaggatgaagaatattcttggtatgaacagggtcacagagctggatgataggtagagtaatacctatagtgggattagtacaggatgcacagtggggagtctggaaaggaggctagaaaaaaaatgggctgtgatgaggttttgcagaattatctatggctgcttagagctctggattgtgaagagtcatccaaggttgttacagaaaggagacttgtcattagaaaggggagaaactggggcatggctgggaaccattaagactagagatgctggagacaaaaattatgcttcaaaagaaaaactataatacacctgttcctagctgtccttgagtttttcctacagcttggactatgtcctaaattctttgtgggctataagtctccaaatcaaagctttcaaatctttacttttaaaactgggaattgcactgctcattccactactcagtatttactttatagtatgctgttcccttatgcggtactaaaactataggtgacagtactaacacctttgccatgcaagtcttggaagtccagccaggcctgcatgaatatgcttagacagttgcaaagtggttccactccttttatcttagggtcyacacctattcccactatgcctctgatagcaggaagaagttagaatggtcttcaccctttttccatcttcattagccaacaccttaagattaaggtattataaaacccaaaaggagggattgaaaccaccattgcaaaattgtaactgagtcagtgaaagagagctgacctaaccaactccatcttgcctctaacctccaagctatccttgttcattcctgggagtgggctgaaccagctttgggaggaacttagtttacagtttaaaacaaagatgataacaaccctttcccaaaacaaacctccttcttgcctgaagactagattgcctttgtaggactaacaagttaggcacaagattagaaattatggtttaggagtcatgcagctggagctacaggattctgaccctccctaaactctcataagatcagtgcttgagatattttgcagacactgcacttgatggatcagctggcaccacacagattgataaactggcttatctgatcttgtggcctccactcaggaactgactcagggcaagaggacagcttcatttccctatggtttcatctcagacccaaccaatcagcactcttgactcactattcccttacccaccaaattatccttaaaatctctgatccctgaatgctcagggagactgatttgagtaataataagactcccgtccctcccattcccatccccccaccccaaagactagagatgctggaagacctgactaagagcaacagcgctggaataaagaggaaataatagatgaacaagacatttcagaactagaattgacatggttccacggcagatctgatataggacttaggcagagaaggattaattaatgagagtaacttggtttctagcttagcaactgtgtgatgctgatgttctttagtgaaaaaaataaaaaaataaaagaccaagggtaagaaggaccatggattcaggttgtgattatatgttgatttgagtttcataggggacattcaggttatgacatccagtgggcaattggaaatagaagtatagacccataggaagggtggtgagagttatacacgtgaatcttgtcaagctatgggaaatcaatgagattgttgagtaagtggactatgattgaattacccgaagtaatcattgtcctataataccagagcacaacctggaagatacagaaaactcaggcataggggagggtgtttgagaagtaaatctggtaaagattttgaaagccttgaagaaaacctagaagaaaagtatctggaagtgtcttagtctgttttctcttggttataactgaatacctgaaactgggtaatttattatgaaaaggaatttatttcttacagttatggagtataagaagtccaaggtcaaggggctgcatctagtgaggaccttcttgccagtggggactctctgcagagtccctaggcagcacagagcatcacatgcagagggagctgaatgtgttagctcaggtctctcttcctcttcttataaagccaccagttccaatcccatgataacccattaatccattaatggattaatccattcatgagagcagagccctcctgatccaatcacctcttaaaggcttcacctctcagtactgccacattgggaattaagtttcaccatgtgttttggaaagggacaaatattcaaaccatagcaggaagtaagaagaaagggatgattactttcaaggaacaaaggaatgcctctgtttcccttagcaggtgtcaggtgattgaagattttttwaaaaaaaaaagaaaaacaaacctaattctgacaattatttggaatcagtctgtcagccgcttttgcattcaatctttatgtcatacgaatgtattgaaagagaaaagttaaatttggtatttactgaatgaatgtacagtatactcaggaacctgagaatcagctccacgtgggatgttttatgtcttcattctcacttctctcttcctgagattctgaggctgtttgcctgtgaatgatrtggtttggctctgtgttcccacccaaatctcattttgaattgtaattgccatgtgtcgagggagggagttgattggatcatgggggcggtttcccccattctgttcttgtgatagtgagtgagttctcacaagatctgatgattctataagtggaagttcctctgtcgctcttctctctcctgctgccttgtgaagaagttttgccttccactgtgattgtaagtttcctgaggcctccccagcctacaaaactgtgagtcaattaaacctctttcctttataaataaccccatgtcagggaagttatttatagcagtgtgaaaacggactaatacaaggctggcgcggtggctcacacacaggattacagatcctagcactttgggaggctgaggtgggcagatggcttgaggtcaggagcacaagaccagcctggccaacatgacaaaaccctgtttctactaaaaatacaaaaattagcctggcatggtgccggacacttgtaatcccagctactcaggaggctgagacacaggaatcacttgaactctggaggtggagattgcagtgagctgagattgcaccattgcactccagcctgggcaacagcgtgagacttggtcttaaataaataaatraaataaataaataaataaataaataaataaaacagatgaatactattgtgaagttaagcttcaggtcttcagagctcaagaagggaaggctcgagccagtcaagtagctcttcccttttcatccctttggtcagcatatgctgggtttattcagttgagtaatgaagccttttgggtaactggtgttttacccgtgtctttaaggtttatgtattttttcctttgttagagaccctttcatggtcactatgtggaattatccttgcctacaagttcatcctactgtcattgattcttctttggatcactctaaataattcccgttctccttagagaattctcaactaggtttttcaagtcatgcaacaacatgccaagggaaatctttgcctgactaatagacttggagtaatgatggttataacctgttgagatttttaaaaagctattgaagagtctagccaagcctattggctaaaaactgggtcgtgtggctctgaatggggagagggaactgacagctgccctactctggctatasaatgtccgccattaaggacagatcttatttaacattttacaattgaaaactgtccctggttttcagataatgcttaaaacaaacaaaaaacaaacaaaaagaacaacaacaacaacaacaacaaaaaccccacccaactcaaaacattaaagaatgaatatgccacccctgttcctgtaagtggaaccagcygtccacgcttcatagcttttgtctagtcccttgaacaaaagttcagctgcactgtgaagtcccacatctctgctcctcagctagctaaccctcatgtggctgctccccttggctctgacactcatttcagccctgtttcagagcccctttggtacctgcttctgcactttagactactgcacccatgactctgcagttcacccaggcctcattgcaccttttcttccaggtatgaatatgctctctgggccgaccctggtgyagtggggccaggatccaaacctgcctggctagctctgttcacctctccatcagggaagggggatccaacaaaatgtggcagcactcttagtaggacaaaacagtactaaacaagagcttttgccagtcattcttacctcttagtgcttcattttccttatttgtatgaaaccttcataataaatacttgtcttggttacttcacaggttcttacgtaaatcagatgattcttgcatagatcaagtgaggtaatggaagggaaagcaccttaaaaagagtaaagcgtagcattttgttatgggaattttccaaaccattttttgaagcctgttacctcttgaactagcaagtgtcaaatgawtcttcctgcagaagttctcagaccacatggtgtcagtgatgagctttaatgactctctggctccccttgcccaccaggggcctcttccctgcctctccaacctttgctcttgcatctgcccattcagacctcagggccagcctaaccaggctccgtattgttcctgagcactccctttcctcttctgtccttgtgtggctgtgctttatcttttctgacatgaatgccacctagttcgccatctcctgtgaaaaggcctcccattcttcaaatgtaaactgtcattttagatgtgtattaggtatctctcactgtgtaacaaatagccacaaacttagtggcttcaaccaacacatttattatctcacagtttctgtaggtcaggaatctggatagggcccttctgggtcccctacttcagagttcctcacaaggctgtagtcaaggtgtcagttttctgaaggcagactgggraaagatctgcttccaggcttttgtgattattggccagatccagttccttgtgggctcttggactgatgacctcagctccttgctgcctccgctgcctgctccatgggcctctctatgtggccgcatgctttatcagatccagagagtcagctggcacgatggaagtcacggtcttatggaagctaatcatggaagtgacagggcatcatctctgcaatatttcgttggttagaaacaagtcccaggtcccgcccacactcaggtaggggtgatcatacagggcatgaagaccaagagggtgggggattattggggaccrtagtagagtctgcttgtcacagatggttcctctatcagcctttacttatttcttccaaccaartgtgtgatcttttccttttgtgagtcttctttataacaacgtattttttccagtttacaattcatggctggtgtttttacaattgacttaaaaacttttttctcatgtaaccgtttttgctcatctttaatcatccacttgcaaccccacaacagtcttgtatttagcaactgttgtgcagaaggcactccttctttccaccctttgaaactaaagaaggaccaagccagttgctctcatgtttaattcctgagtatttttctccacaatagccatatagcatccattgtaaaaccttcagatttgccaatttggcatcaaaagcagtgactcattcatgtctatgtaacctggctggagtggtccatgttagcctgatttgcacttagagctgaagcttgttaccttgtaaaagagaagcaattttccatcaaagatgcatcaaacattagctgtttctgagtagtgcattgttgtgtttttcctaggggccttcgtggatctcagaaatgatgctatctgtaaaaatgaatttattctcctttaatctatctagcttcttttcccttaattcacttggtagtcctcctgttttcaggtcacaccaaatgatttgaaaaagaggactggctcttggggaagtagcattttaattatttcccttttgtcgagtagtaggctggatatcattattgctgctggagatgttcaagagaatgaaatattgaatgtgctttaagaggcttggaacataagagagatatgatatgtatttcatatatgtgggcttgcagacccaatttgactcatctagtctagcttcccatgctttgaggctagtctctacttaactcgctcagatgacttaacaccttttttattttttgcagttttaatggataactagctagtccttagaagacgggtagagaaacacctgtcggactttagtaaacaccatatttctagtgttgacatgatcacatcacaggaagacgtgaagcttggcctctttcagaaaaattcagatggaagtctacttaaacttggaggaatcattcatctgttgagtaagatgcagaattagtcagttaaagccagctagagatggaagcatataagtgtatgtacctacattttgggtctttggggagccatcagactaaaagtcaattaaaacttcagtagagaaatttaaaagtggtttctcctgggcaagagaaagatttggagcagagagtgctcagggaaaagcagaagagtgttgaagatgtaattaatacagttaatagctgggaatgggaatcagtgcaaagccccatttgagaagaccctgtgagggactccagtttgggcctgaaagccacagtatccaaggctcaggtccaactcaggaatctgaagccactgcatggccagcttaaagaggagggtgaccaaatcttgccaaaatatgtaccacctttcttaatctcttaccaatctgtaaattagaacaatgaagggaaatggggtagtgaaaggatgtttttcctctcttattccttgggtatcagcttcctttgcattcctttattcatcttacgctctaatatgttaaggctttttttccccccagtctctgcccagtttatctactctcagatgatgttatcatagaattcatatacccagcctctaccataagatgtagaaccatatccctggcttgggcagaggacctcattatgcttatgttgcattgtgacaccaaatttgaaatgtgttcaaaataaagttgattgactcttgcagtatctgtcactcaggcataactcttaggaatcatgttttccattttcactcccatcaatgcygtttggattctgaaggtagtgtggcagcatggaaagaggatgaggtgctggcatccatgagatttaggttcgaatcctgccccagccacttccgagctggtcaccatgggcaagcatgttatttggtatgtgtgagcctttagagataagttcccttatctctaaaaccagcatgataatccctgcctaccacgtgggactgttggagaatattaaatgtggtatgcatgtaaaccacctaacacagtgccaagtgcaggtgacgggctcaatgacaagctaccaatggttagtttgaatgcattgagcacagtgcctggcatgttcaaggccgttgttttgggatgtcattcgctttcaggcctcccctggcattgtggaacacagagctctgcacatagtgggtcttctctaccttccctagcactttcaccagatgtgtttggctttgatgtttcagaggaaacaaaagctgacccctttgtgatcccctgcagcttacagccactagatttacaaatggcttatgtctaatctcctcccctcctgcatttatttcgatacaatgaagttggcrtttctctgtccttctgctggagttaacccttcccctgggttctggatcacatcccttcctgtccagggacccctccctttcctaattgtgcccacttcaaccacaccttctttactggttccttcccatcagcaattaaccatgtccaggcctcccttatcttaaaaaaataaaatattaaaagccatgtcatgatttctgtcctccccctacagcttccaccctgtattattccaatccttcacagccagacttcctgagcttcttccacaccctcattcccacagtctgcctcccactcaatttcccaggcacagcattctgacttcacttttccttcattcagattagtctcactagggtcacctgtgaccttgtcactaaggccacactgctgactacactttccctattgaaatactttctttctttgtcttctctgattccatattagcctgatttttctcctacctctgaccacacctcagtttcctttgcaaacttttctacttttgcttttcttaaatgttgatgttctccactattctgtcctaggttctcttcccctctaattctgaacaatctcccagggaaagagtctactcattcatttgctgtctgtacacaggtgactcccttatttctgtttccagcccagaccttcctttctttgaagtgccagatctaatatctgataccttaaactaaaaactgactgaatttatatcctttcttggttgcactgaaatactcttcctgtgatggctcctcatcaatctatagtggtggctcacacgccttagtgtgcactggaatcacctggaaggctcgtgaagctacagagtactggcccgcaaccccagaggmtccgagtctgtaggtcatggacggtgccttttattttgcatttctaagagctcacaggtcatgtctatgctgctggtaaggaagctctgttataaggaaatcaggcagtctttcccacaccctactctacctcatatacctccccacttccccactagcatctaaatattataattttgccagttttgccttctacatacctctctagccaggaccttccattcccttggccactagtctgatttagtgcagtgacctattaactggcctcctgcctccrgtctcacttttcctaaatctgttccctgttcagaaacctgtctaagcttcccaatactttaatcatgtcagccttttgccaccattctcctatagctccccattgcctttgtgataatccaaactctgtaatgtttaactggcctctgcctatctatgtagtaccttctcttgttcctccttactctgcacagcatacaccaggcacacagaaaaatatcagcaatttatatatataacaattactgagtgcttactgtgttttagcccctgtggcactttaacagatattaatttcatttaatcctcccattaactccttagggtaagttacattttacagacaaggaaatgtgacctattttgtaatgctgccattgtcctgtataccagtcctgtcctgccagttgtgtccaaaataacagggttggattcacttataactcgctacaggccaggcacggtggctcacgcctgtaatcccagcattttggaaggccgaggtgggtggatcacctaaggtcaggagttcaagaccagcctgaccaacatggtgaaaccctgtctctactaaaaaatacaaaaattagccgggcgtggtggcaggtgcctgtaatcccagctactcgggaggctgaggcaggagaatcacttgaacctgggaggcagaatttgcagtgagctgagattgcacccttgcactccagcctggtcgacagagcaagactccatctcaaaaacaaaaaacaaaaacaaaactccaagagacaacaacaacaacaacaaaaacattaatagtagctaacaattgttaaaaaatatacttgtgccaggacactacatgtaaacataactcatataaactatttccagtgggcaaaggaggaaattcagagacaaagagtaatttatttgtttggagccacatagctcaagctcataggatctaggtttgaatttagatcttgtgactccaaagctcatgctatctgtcatgcctatggatggaagcagtgaaattatataaggagagctgttgatcattaggcagcttctaaaatttaaaacccatcactgtctataactgaattataaaattttccacaaccctcccaccctaattggaacccacccacatacacccatctttcttccagatcccatcataccttggtgggaagagcttggacgtggagtcagactgggttctgatgcccctctactaaccatctccttggatgaaccctgggataagttagtttacttctttgaattgctggttgcttttcattaaaactcaggatattaacaagcaatgggtttctgaaagaaaaaaaaaccctaagataataatactttcctcatggggttgctgagacaaatgaatgtgagtacccacttctccatccttgtgccttaatgagatagtaccttatccgacagtgccttaatggaacattgggtattattgtaatggcttccttaccatctccttgcttgtgcttacactgtccccctcccctattcttacccccatcactgctccccatctatgctctacactgccacccgaaaaagatttctaagatacaaatcctagggactttccgttaatcgttatggtgggctattagattcaccaggaggaaactrctgaaaaccaaaggcagatacaccctcccactgaaacaactaaaaatatttggatttaaaaaaaatctcaaagcattaaagaactgacgggcattaccaggttaaaattggaattgataagacaytgtaggtttgaccaccagttgctggggacagaaataaggtccagactctttataagaagctggaaccccaaagggctacaccatcagggtagacatgaaacagcagctctcmcatggaaatgcagcccaggttcaagctgactgggtcaatcaaagaatctaaagtcttgaattggtttaaggactggtgcctctggatatctggcaaaatcaagtggaaattctttcaaaagaaaggtttcttcaacctaggcctcagattattcagtgaccagcccataaatataaccaggcatccaaggaaatcatacttcaaagacaagaaccataagaaaccacaaacaacagaagcagctcttcaaaaacatcatcaggtactagaatcatcacagtctaaaaaatgtctatttgaaatcagacttcaaagacaagaaccataagaaaacacaaacaacagaagtggcccttcaaaaatatcatcagatactagaatcaccacagtctaaaaaaaaagtctgtttcccctgtttaaagaaataaaagataactttgaagataactctgaattatgacatagcaaattggaaaagaaaccaaaaaatccttctagaaataaacattaaattaatgaaattaaaaacttgtggatgaagaaaagtgtatgtttgattaaatattttgaagagaaaaagtcagtggatagatttaacagcagattggataaagtggaagagaaagttaacaaactggaagacagtaagaaaaaaattattcagagtattgcaatggagagacaaatagaaaatgcagaggagaaggcaagagacatagagaacagagtgagaaggtttaaataagttgaattagagttctagaagaagatgagacagaaaatgggcaaaggtgaaatttgaagacagtggctgagattttccatagcaggcgagataccattaagcagattagtgactgcaagtctaatttttaaaaaaatatccaaatttagatacaccaggaggaaactactgaaagccaaaggcaaagagaaaaaagcagctggagaaaaaaaagtttgtcttcaaaggagcactagactgaccaggataaccttttctcattaaatataatttaaccatttctcattaaatataattctgatcatattattctcagaatttgcaatggttttccatcactaaaatataaaatagatactcttcagaatgtcatatgaggcgtttcatggtctggtccctacacctcatttatacacacacgkctttcctcctactcagtttactcttgcttgtgtgcctttgcacrctctcttctccctttctaaaatgctccctcgtcmcatycacctagctatttcctactcagcctttccattctcaactcaagagtttagccgctctgtcaaactgcggggctcccatctcattgcccttaggcacactgcttgccagcagtcatgaacagcatgtgctttcaaaatttgtttgcatttttgtctcccttccaacataggagcgagctccctgaggacagagcttgatactccatcaatattcaggatgctcactgggttgactccagcatttcaggaggtcccatgccatttaaataatatcttgatacaggttttcatggctcttttcatagtgcccagttcttgctagtgtggagaacaggtcaccactgtcaacaccagcrtcctgcatgctgtcattcactggctccccctcttcactactcctctttcctcagtgaagctggaataacagtacccactttacccatagtataagttgtaagttaaaagaggtaatataggcgagcatgctgtgaaaattctttggcatcatacattttcattagctctatatcagagtgaaatttgcttaggcctagggattttgtgaagaaaggagcttattggtgctcctgaagactgtccctcccaagtcttgccttgacaggagctagatktggggtcctagaatgatcataagcactcgttagcccagcaagcttgcagcatcacaaatgattattcacagtgtatgttaccttgcccctgtgaggacttgtgttttcatttctacatttcactgaagagaggggggcccataagataagttttcctagttggttttgagagatccagaagggacatattttcatttacaaatacatactgcattcttttcattgaactctttggaaattgtaaatttctgtggccctccattcagagattgaacragcttggatttgtcagctttggacttaaatcactgccattatcttaatttgggttctgattgtgtctcacctagattctaacctcagctttctaagatctctgctaccattgtctcttcattccagggttctatcaaattcatagctctaaaatacatgtgtgatatatagctcttaagagaagaattgccctggcatttataatgctttataggatagtgtcctagcttgtcagtttcattgtctgggcctgtatgttagaaagtatattccgtagagaatagcattaaatcctaaaatatcagtggcttaaacaagaaagaagttaatttctatctcacgtagaagaagatcagagacaggcaggccaagacttgtaggatagctccacagtcttcagctcattctgttgtactgctctgcagagtagaaaacacccttgacctctggcctccaggaccaggatgagcgatcaaggtccagctatcaaatccacattccagcccgcaggattgagaagagagagaaggctgggcctctgccttgtaaggttactcctggaagtcactaacaacacactttccccagaatcttgttgcctaaaatgtaracatgcagggatgtggctgagggatgtggccttttaactaggtggcagtatgcccagctaaaaattggagttctttttactaggaaagaagaggctggataattgggcagtgactagtccctcccacagggccattctaccagcgttatttcccccctattctagttcctccctacccagcactgtgtccccaacctgttaatagctacagtaaatcttttactgggcctttaccatggcaggtccactcacagatctaggtctttcacaagttctggcctttgtctggagtggccttcaacttccttatttctctttggaacatctatatctatatatccttcaaggctcaactcacttcctcagtgaattttcttcattaacagtgacagaacattatcccttacttttgtgtatagcagtgtggtgcactggaagagtttcatggatttaggggttgcatggacttgcatttcaatatcctctctccagcttgggctggaaagtttctcagcatataaactgtttgtaaagctacagcccaggtctgttttctgagttccagaccttcattttgaattgcttactcagtttcttcacttaaaagtctcatatgtgacctatcaaatagaaccacctccgaaatagaattattgatctttaccccttcctcttgtctttcctgtgccataagtgatgccactatcaacctaattgctagtgtcagaaagctggaaataatccttgacttctcttagctgataatccttaagctctcatatgtaattatcaccaagactattcaactccaaaatatatcttaattccatctccaatgcctgcatcacagctccagcctctcatgccttgactattgcagtagcttttaactggtctccctacacccactcttagcctgctcttatcttgccctgggcaatgttgctgtcttgcacagaatccttacccatcttgccgttgtacttaaattctggcttcttatgttctgcaaggcccacacctgacttggcacctatctacctctcattctcatctctagccatgcccattcttgctcactgtgctccagccatgcctcatggtctttgttctggtccttgattgtgtgaagaacttcctgcctttaccctttcctgtgtgccattcctrtcttgggtctctcattctcctcttcactcctgtatacactgtccttatgtctcaatttaaattctttccctgatctctaatctaaatcatatgtcctttcccccttctttttgggattattctttccttcttagcatttattacagtttttattttttttgagacaggggctcactgcgtcgccaaggctggagtgcggtggcacgatcctgattcactgcagcctccacttcctgggctcaagtgatcctcccacgtgaacctctcaggtagctgggaccacaggtgtacaccatcacacctggtggattttttttttgtattttttgtagagacagggttttgccatgttgcccaggctgatcttgaactcctgggttgaagtgatcctcccacttcagcctcctgaagtgctgggattacaggcgtgagccaacatgcccaccctataattttatatttattgagtgattatttatatgatattcccacattagtctatagggctgggatcatatttcttttaacactggatcttcagtgcattaatgtgttcaataaatacacatggaataaatgaataataactgatcttgtgattaaacaatgtagtagagtctcattaaattgacaactttgctaattttttttttttttttttttttttttttggagagacaggttcttgcaggctggagtgcagtggtgcaatcttggctcactgcagccttgaattcccaggctcaggtgatcttcccacctcagcctcctgagtagctgggactataggcgagcactaccatgcccaactaaattttatatttttagtagagacagagtttcgccgtgttgcccaggctggtcttgaactccaaagctctagtgatccttctgccctggcctcccaaagcactgggattacaggcatgagccacccaagaccagccgacaactttactattcagtgtggcaagacatggttgttggaaatgtattaaggtgattcaccttttcaacctggcattgtgtttctttatatccattgactgttatctrtgattctcacctgtaaggctttaaaccttggtttaatttattagaatgtaactttgtctgaacaaagcctcatttctgccaggatatccttctgaatatagaacctgaaaaggtcatgttcaggtctgatagaaaatcatgattgggcccacttctatggcttgccctctctcttaagatgtaatttggtataacattttgaacagccgacttgctgttgttgggatggaatctgaggtaacagtcatttgaagatggagccatcagtgatcatcacagaaagctgtttgcccaggawttaggctgccttggaaacccagtcctctcactgcagtgtcttgattggtagcatttgagaccaaactagttgtcaaatatctaagtagaggatacttattcatggtaattccacgctttgatttttttcctcagttactttgttctgcagagcacattggtgaggtatgttatggaacaaacagatcaacaacttgtgtggttttttttctctctacaattataaaaaatgttctaaaagcatttgatgattttggaatcctgaattatgggtttaaaagaaaagttgaaccttgctgatgtcctctttcactgatagagagggcaatctacgataggaaagtttgtgtttgcttttactttttggaaaacaatgaggattctgcattcagagggcacttcagtaggtagatttcagcatagatggaaaagcaaacagttgatcattcttaaaccccggtaggtcagatcatgtcagtgtttccagagtacgcccagaatggtaaaagttggctttaagctgagtttttgctaaaaggcagccagtcctgaaaaggattgatttatttactttggccttggcaacatctaaatgatgataagtgcaagtttctcttagctctctggagaggctcccacgtaaattggttgtgacccctagaatccagaatccctaacatagttggataagaatattttgtggggaaatctaatgtaacaagtaaagattcaaaattttaaatgtttagaagtgtgtaatttgctgcttttgttcatgagtgtttttaatacttctggtagagagcctaactgcctctttcctcaggagatgtggtttcagtttcttgggtgaatgtgcgttttgtaagttttttaagaaaggaaattaaacattaaaagactttaagtactttactctttatataatgtcactaagaaaaagccaggaaaatcagggttgggtttttaaatttatttatttaataaatataatctattttccaccattttgtttgttatggctggtaccaaagtacttttaaaagttaacatttattatgattttgttttatttcagcagatgtgcataataaattaacctatctctattcttcattttgggctggggcagcatttaacatctagttttttggaatttcgacacacaggctatttagtttaattcaacatagtttgatgctctccagttgtatgatatttatgatagtatgtgaataatgttaagtagataaaatgtggtctgctgaggctgagtgctcagcctgagtataatactggtatgtgacaggtccactggcggcctggggttcttctgtaaagtgagtagtttggggtaactggtatccaggcatctttctagattgaattttaaaatcccactaattgatatgcatctggttgatgactcctcttctctctttatctttttaatgtaggaagagaggatggtgatgcaccggttacaaaagatgagaccacctgcatttcacaagacacaagagctttatcggagaaatccctgcaaagatcagcaaaggtcrttgcctacagattttctccacgtgtccaaatggctttcacctgagctacttgttgaagatctcgtgtgattcagtcaggactgtatttggtcatttaatcagaaaagttagagcagagaatcataaaaagtgaattaaaaaaaaaaaactttaaacatataaatacgaatccatcttcctgcctttggataaggggtcaaggccttttctttgagtgtgggtatgttgattggagttctgtgttatctttcttgcttaaaccacacttgtaatgcagcatttatcactttgagttttggtggagtgagaatttagacagtggagaagcagtatgaatatagactctcttcagatttgtacagtttttgctccaatttttttgttgttaccatgcccatacctaatttaaaaataattttaatgtcttttttagtttttccaaagtattcaatttagttatagaaacaattgtttttatattcctatttcaccattttgcacaattcacttgtattctttaattatagaagctagtgtcattttcagatgtgggatgaaacagctgacttcttttttttttgttttgagacagagtttcactgttgttgcccaggctggagtgcaatggcacgatcttggctcactgcaacctctgcctccctggttcaagcgattcttctgcctcagcctcctgagtagctgggattacaggcgtgtaccaccatgcctggctaattttttgtatttttagtagaaatggggtttcgccaggctggtctcgaactcctgacctcgtgatctgcctgcctcagcctcccaaagtgctgggattacaggtgtgagccaacatgctcgactaaacacagctgacttctagctgtgcacatagctcatagtggcagaaatggtgaagggcaacgtataaagtggcataatggcatgaggctttatgtttcagaagcatccatcagtgtgtttcatatgggaatgcagtgtgcttactctaccaagcaagttgattaatagagtattgctcttgcatactgacatgaggaatttctaaattatactctatatatttgagtactaactgtgctccaggcagcatgctaagtgtgggagattagaatgaatggaaagcctggggatggatctggctcacagacctattttgtttgacctgtgcagtatttaaaaattttgacttcatggctttcagcaaaaaaaaaaaaaaaaaaaaaaaagagtcgtcggtgggcgggggtgggggtgttcacattaaaaattagacttttggcttctcttgtcaaaacaaaacatttggtaacactgggccaaatttctaaatgactgtagtcagagctgartagaggcagccctggaacctgtgttctttgatttgctactgccctccaaacatgttttccctctcccttctcccttttccctatctccctttcttttggataatgtttttaatggattcaaccaaaaattacaaggcaaacagcacttgcctgcgaaacttatgctatggtagagtcatttccatgacaattaacattatatgaattgcaagtaatgtagtaatgtcagcctactttatacgtttccgtgctgtcaaacattaaaacaagaaacaggaatttccagttcagacaagatggcatagacctattttttcttgctcctcccactgaggataactgtaaaccctggaaaaaacaagaggcaaccaaaggagaattctgaaaggtgaaaagaggaaggcaaactagttatgtcagtactagagaaacaacataacagcagggacctcacaacccccaccaacaacagcaacaacagaaggtggcccaggcctagtgtttctgaatgccaacctagcaatagagggtggcccagctagactaattctcacccatatctaacagaaatccctccagcaacatccacagcacctgtaaagagccctaatgaccgtaagtggttaagagaaggggtttccttcctcaccggacctgcagcttctctttcccaccaagagacatcaggtatctgagtggctccaacaagaaggattctagaagtggcccagaaagcctctttgtttctgtgggactgcgactctcrtctacccagaggcactgaacattcagagacactggacatctacccagaaaacaccaggaaaggggatctggccacaacatgcagtcaagtatgggaagcccctgtgttctcacaggcaagagaattttgcttcttcacccagagacaccaagcagctgggtggcattagcaagggagatctggtcataatgggtgtgtggtccaggaagcctctttatccttgtgggccagagacttccctctcccactcagaaacactgggcagccaggtagcaccaataaaggtgatcctgccacaacaagaaacccaaaatgggaagcctctttgtccttgcaggctggagatccccattccatacttagaccaggtggcctggcttggggaatttcttgccacccacataggcagtaccagtagagaccagcgggagccccagtgataccatataaaccaaacataccaagatagcactgcaaaggctattttccaaggaaattgtcattgaaaytacagcccacaaaagtaggtcaggacctgcatgttaaaccccaacagggtgtatgactgccttctaaaataaaagatttaaatgagacccagagtgtcttaacatgataaccaaaaggtccaggatacaattggaaaccaccaatcatatcaagaaccaggaagatcacaacatgaatgagaagacaatcatctgatgccaacactgaggtcttgcagttacccaacaatgatttaaaaatagccatcataaaagtgcttcaataagcaattaaaaactttcttgaaaccttggagaaaatagaaaatctcagcaaagagttagaaattataaaaaggccgggcacagtggctcactcctgtaatcccagcactttgggaggccaaggtgggcagatcaccttgaggtcaggagttcaagaccagcctgaccaacatggcgaaaccctgtctctactaaaaaaatacaaaaattagctgggcgtggtggcacatacctgtaatcccagctactggggaggctgagacaggagaatctcttgaacccaggaggcggaggttgtagtgagctgaaatcgtgccaccgtattctagcctgggtaacagagcaagactctgtctcaaaaaaaaaaaaaaattatataaaggaccaaatgagaagtatagtcctgaaaagtacaataacagaagtaaaaacactattggataggctcagtagtagagatgacacagcagagaatcagtgaacttgaggagatcagtagaattaacccaatttgaacaaagaaagtatagactgaaaaaaattgaacagagcctcagggagttgtgggacaagaagaagattgaacattcagacaactggagccctaggagaggatcaagagactgaagatgaaaggagagattgtgcagaatggggacaggtgaaaatatatcttcagagaatttaaggttctagcaaaagttgtataacaatgtataatgctgtccatctgtacaattgtaatttcttttctgatcaactctataccttgcgtttaaggttagagaatactggtggctgaaatgttgcaggactgagggtttttagggtggggttagtggaaggaccagaagataaggcatttgacagcttgggtaagaggacttgaggtgatagaatatggtggttcaaggccggatgcagtggctcacgcccataatcccagcactttgggaggccaaggcgggcagatctcttaagatcaggagtttgagaccagcctggacaacatagtgaaaccctgtctctactaaataaacaaaaattagccaggcgtggtgactggtgacacacacctgtggtcccagaaactcaggaggctaaggcaggaggattgcttgaacctgggaggcggaggttgcagtgagccaagatcacaccactgcacttcagcctgggtgacagagcaaggtctccaagaaaaaaaaaagtgtgcatgtggtattggtattgtgtgtgcgcacacacacacacacacacggtggctctgggaagggaggaaaggattcgaggcttagacgtagataacagacttggagaacaggcaagggttaaaggtgctagaagtcttgatgtggtgaaaaagcctgtggagtgcagcactggagaacaagcgagctgtgtggtggattcatcggagaggaggtgttggaattggaatagttccagatgatgctgaggtgtggccatgaggacaagttgctgaaatcaaatagaagtgaaggttgctggcgttgaagagatagggaaaggtgaggacaggatgttgactaagttactcacctggatggacgtgggagggccagactgtaagccaggtttcacagagtaaccaggaggccaggagatgataataataagatggggaccacctgaaccagaagagggtgcacatacatgcatgaggctggaagagtaaaggtctgggtgtggcagtgcagcatgggaaaacatggacacccatttcagaggctgtatgtgggaaaaggagcatcctcttcctaaatgggctggggaaggcagtccttaggagagacagttacatgcaagggagtggcgaaggggggtgtcccacagccttcttgaaagagggcacagcagtttgtttaaaatagctgtttttcagggaagaaggaagagttaagaggaagaaagtagagcatgttttgggactgagcttgcatgagaagacgggtgccctaaggtgctttcctgtggggtagtagctgggagtgactgggggagaggtgtggtgcactcaattggtttggaggtttcctgcagacaggctgagattccacatggagtcagggacatagagaagagcagcagccagctcaactgcaggctgaatctttgttcaggggtctggtgggatgtcggcaagctctgaggaagggatgagcctgcagactggctacggtagggaaaggaagcacttcaggaagaatgtgttgaggagggggtggtgagggagaagactcactttctcagagaatacttctctcttgatggaaatcacatgtgtatgtggtggagtggtggcctcaatcttcatctagtcaaattagagcttggrcttaatcttggaaagaaggaagatcaaatatttctcctttcagctattcaagacataattaagagaagtaatttatgtctgataacccttttacttttgcaaaaagcacctaccgtgttgtttgtgtgagatactagtattgttcatgtgagaaaaatataatgtgaaacaaatacctggagctgtacttccctgctggagtcccacatgtctttataagacacaggtcatggtaataaaagcactttgatttaattcatccatgtattgcataatttttcttggatatgtatgcctactaggtacttcttacaacttaaatatagattactaagtcacagatcatcactgagaggcacttattttgacctagaaaaactgctggttcctgctagttgatcaaattataacctgctgacctctcccaagtgtaattcagttctgcagataaacaacattgactatatctttggtgtttttaggtggtttacatcttggagaaaaaacattctcgagcagcaaccggcttcctcaaactcttggctgataagaacagcgaactgtttaggaaatacgccctgttttctccctcagaccaccgagtgcctagaatttatgtgcctctcaaggactgtccccaggactttgtggcacggcctaaagattatgccaacacactgttcatctgccgcattgtggactggaaggaggactgcaattttgccctggggtaggtgatctctggtaggaaaaaccacaggtcacaggcagaactcagtttaggtggtctttaggtaaactttttgtgtattttaattattatttctttattgaagcacggtttctggtgtattttggtcctgattcttcagaagtcactcttagctgccacctcaactgattgcctgtatgttccttgaattaccaggcagtcacattcttgtttttgttttttggcgtaaaacatgaacattccgagcctctacttatttagttatgtcatgtgtcctatttgtacttgtgtaccacagataattcattgcatcaaacaaccagtcctctccttgcagatgctagtgttaaaccatgcaaagtctaggcatattcaggagaccccaggctcctttgctttaaaatatgaacatgaaggtatatttaaatggcattctttttcggtattgattttgcctgtggcattaaaaactaccctattgtaagaaggaaaagggtatcatgtttttgtggatgctgtcagagatcaatctaacttaaatatacatgacatagtccaggagcatcatggatggccacttcattttcatctgaagaaactgctggacccagttgtttgaccaaatgctatgcctattttcttcttagaactggtattcatattgaaagaaaagcagtaagttttagctatgttaagtgtttattatagatgatgtctggtttatgcttcacaggaaatgactataaaggtatacaatctagaaaagagcctgttgatttacttttagtctagtttaatgacttgcttgttggtcatctaacttgtacaggatgcaccctcctgggaatgtcctatgggtaggagagtcagcactgaatggatggctacaatgtgctgcttttatcaggtttattctatacttagcttcttatgcctagcaaaataagccaaatcaaatgtgtgtgtcatatgtaagagtgtttcatatataagaaacactaccctgtgccactttttcagttatatgaagattggtgtgatttaaatgatctcatagctacttaggaacagttgtactttctttttttcctctcaagtggtgtgattgcaatgtcatcatttttaagcctaactaattatccaaaagtgatgtcaaccccttgagccctaaatagtccttcttacaagcttgcccgtttctcaccatcaaatcaaaaggcccagtaacggttgtgccacctggtcctgttgattgtgcagccacactctgtttggcagtaaaagaggaagactttcacatcaaaccaggaaatccagccttgttttttatctgcctttctgtcgtatcccattgtgtgtacttgattggactacttccttagttttcaagttgtaagggtgtagtcaggaaatcttcatagtatgagtttctcttattactttcatggccttataggtattttttaatttttattttttttatagctgagccattacttcatcaggaacccttttcttgaaggtaaaatacaacaaaaagggagtcaggtctttgaagcctcaagcacatttgctggatttaaagaaataatatttaaaaagtcacatattaatcatgtaattttcaaaataaaaaatgaagataatcatatttagatggaaacatcatgctttttctctaccttcttaatataaggatataaaaattgtcatttatggaaatatgccttttaaaatctttgtgaagaagagaaaatttattttaagaaataaaacatggtaggttttcctgatgaatttctcaaatgacgtctgttgtatgaggggtgagggctgcagctgttgagtatgttggtggtcgccttgccattttgttctggttatccgttactgatctttaagaactgaggtcactttttcttaatcagaacatgctgtgctatgactgcctaggtttcctcccttatctttgccaggctttgaccaggagtgtgacggtaatacctgctgtgggtgcgaaagtgttatggttagcttccacataaactatccctaaaaatcaagtttagctaaggtggcttccttctcaatttgttcccaactcctatacctctctccttaaaagtatcggacttcctttgcctatgtaattgcttctaattattcaagttcaaagtcattttcctcttctgtagttacatttagttcaccagrctggttttgatccaactatgtgtaaagcactatgctatattatctgagaaatacaatggtaaacaagttatggattcgttacttaaggaacttatagtctaatgcaaaaggatttttgcatgtatatatcatagcgataatttgattctaagaagtgtaatcccacttgaactaatttaaataaaagtagagattaatataagaagctggtgattcttttaaaaaccagagcaggaaatggaggaagtctcatgagaaaatcagaactaacaaggcaacaaaggaaccacagcttctctttcacccctgtgactagcccagccaccacacagtatcttttctttacccctttttgcacatgagctgtgttattctgcttctctctgcacagtagtcttctacctgcacaacagcacacgtggccccaaaatggcactgccagtcctatggcagttacatactaaagtctagatcataatacagaatttctatggtggaaaatcttactggtctagcttgaggcaggtgttttccctcgtcagtagtttcaagcagaggtgggggtccagagtcccatccaygactcacacccaatttgcagcgctgtgggactcctgggaaagagcgtggataaaacagatggcttgaatggcttatctctttgagttctacctacagtacaaaacagaatgttctaagttcttccatagaatagaataatttgggggaatttagaggaggtaggtaaagggggaaatccaggatcatttcttataggacagaggcctctttgctaaaagatcactctgactgagagtaaagaatagatgagaagggacatgcctagtagcaggaggtcataatacacaattgcagtaagacagatgaggtgggagaacctgaaataaagggttgcaatggaggaaacaaaagaaatgaaaagattcaggggagattaagaaggtaaattctcccagatgcgatgactaattagaaatagggcatgagggagaaggatggaatcttggatgaactttcagggctctgactagggggagtgggtggatgctgatggcatttaaccacaatttactgggagccatctcagttccttctgtggtcttcactatcgaaaatcaaacttgccatttcccaagctgagtgtgtatgttcatagttccaaacttttgcacattacacttcctttcctaacagtggctttctccttcctctagtgtttgcttggtgaaatactcaacttttaaactcatttgtccactcaaaaaaaaatgttccttgactcacaggcctcccttctggtgctcccatagcttctattagtactattattatatttctcatctgtttggtttgcaattgcttgtttgttttacttggccatgaactcctttaggacaaggacacttggtgaacatttgctagctggtcagatgagtagatggaaatggattgatgaccccaatgtcttgagccaggttgactaggaagatgttgcaccatgaatcaagctagaaaacacacaaggagtaatttggaacagaaaatgatgagaactaaggttctatgacttcaaagtccatgcttgacaatggcatacaacaagtataaaaactcaggtggagaacgccaaattgagaaggcacagatatttaacagaaggattgaatagaatgcacacattaatagaatatatgatgttagtagctttggaaggatccttaggtaggacatggagcttggcctcccctttgctgtaagcattgcttctctgacaccctagtgctgccttggggccaccatttaggggcagctcaaagagtattacaacattggagacttccagttgttataaagttattttctatcttgttcttagaattgtcatgagagatctcagttgaaccttgttcacctctctatacatcacatcgcccacatttttatgaatcttgttctgtaatgctatcaaaacccaagtgaacccttgctagcttttagggatcactgttttttgttatacattacaacatatttagtacctttaatatttagtactacactctagtccaggataattaaaaagccacattggtttcttcgctggaatratctgcaattacataatcagatttacagttttaagagcttcccaacctcttaaatcatctttccctttagaaactcttgcagtggaattcatgcctatattttctcagccctttgggaaatctggtatcctcagtctagagtttacagttccagcttctctttccgggatgtcttgagcgtagagatagcatggtcactttctcccagatttgtcatggtttcttcttgactatttaagggtaagtcttgaataaaatggaaacgttttayagcagctaccgtgaggaacttaatagtgtttcttggcaacactgaaggctagctgaagatatgtgacatgaatcgacctagagcaaattgacacatttatattattttatcaagcaaagtctggtggttttgaggggtggaggaggaggaggaaaaatgaataggtcattacaggctgagaagttcttggttgaacatgggattgcctaggcttaatgggaggctgtggaaatgagaaacagagaatgggtcacagtgctgctggctttaatgagtgtgaaggacagcaggttccattggagcagatgacggagtgaggtgaaagcagaggaagggaaattctgaccttagaggactgtggtagagatgggaagtagggggtggaggtctgttctggtatcacctttgtctcctagcttttcaccttgtggtggttgttagccagtcagcaatatttattgacccatggaagcaaatacttttacattccattcagttttgatagatactcagtttcttacagggtagataggaattgaagaggtggtcattaaattacattaaatacattgaattgtaattagtaggaaaattaaaccatgactagattgatagaaaaaacaaacagaagaaattagtttgtttcattgaagcataggctccaagattagcaaactgaaaaataactgtatccaatctttccctttgcaaaaggaatatttcacctttttgagagcatgttctttaaagatagctctgagggagaaaccaagttatataatgctatggactcgcattaccagatctatagagtttgtatgttcttttcaaggggtatggacctggccggctaggaggcaaaaagcaaatcaggctgaggagggggctctttttttgtgactgttgggctccacctggtggcctgtaaggatcagctttggaaaaagctgtgtcttcaacactgagaaaatcctggtcaaggcagagcaaaagttaaaggaatggaggagaatgatcctgatccaggcttaggttaccaaattgttcctttccttgatgagcactgcatgcagttttggcacttcttccaaagtcgccatcttcaactgcaatttctagtgcaccttcttgaaaatattatgatgttagaggaccttagataaccatcaacctcctcttatactcattaaatcctttcagcttcctctttgctttcttcatatcaacaccaattcactcttaaatttcaagaccttttcttaaataactcagtattgttgactcttacttcttttctccatgcttttatctattttcactgataaaaacaccgttcctgaagtccctattccttaagtgctactttctgctgtgtcatagtamtgagccataagaagcgaaaataactcgttccctctcctgattatagaaaataatacataaaatatacagccaaagacaagtgtatttgccacacttcgtttttactttgtattgttggaagtttgggccctcggtatagttgatgtttgattgttccccacttgtacattctcagggctgtgatgccattatatctgtttgcatggagtttccaacattggaccaacatgtatgagagyatgtatttaagagtagtaatacgatagtggtaatcactgcaagagtgcatgactgtcttctaaatatcgtctagttgtaagactaggagtttataagaatatttagtagaggaaagatgatgaatggctgagaacactaatcttgactatttaatgttcctgttttctttaaggcaaagaggccaatttgaaggactttcttgttatatttttttctgtctgtagctggtccctttcctcagtacgtttttaataggcatatcacccaggatagtagatctgatgcttatttatatagaatgtttatatgtttcccaaggcccccacctatcatatgtaggaagttgggaatattgttgcagtgccattcagattaattttacagtaggactcagttggaatgtcattctttgtgaatggcagcagtattcatggaggagctctagtgaagaaaaattgaagtggtgatcattataaataactctatggaggaaaactttctctcttacaactattattgaaatatcaaattaacaaacatttctaaattttattttttccaaatacatacatattgaatatttactgttaaatttattcaaatgtgtactattgaaaatgaaaatttcccagagtttcacccccggaaacgatcactattaaggttttggtatacatttgactaaaatattgttttaaaaatatttatcaactttaattacaaagcatatttcacaggaaaaagaatatatgtaacacttctataatttttgaaacctaatactaaaaccaacccatgaactcatgaaccagattaagaagtataacatcaccaatactgttcaagttccctgtctgttctcctgtatcctaaaccataattttttccccagaggtaaccaccatctcaaatatactaatgaaaatgtatttaaaaaaaaatttacccatatttataaccctaaatgttattttgttttgcttgtttttgaacctttacaaaataccgtgttatatatattcttctatcatttgccttttttcatttaacatgtttctaaaatatactcacatatttcactcattttagtcgataatatttccattttctgaaatataccataatttagcaatgtacatttgggttgaacagaggattttgctcctgaaaacgttccagtgctcattaactaaagtttttctagactctacttaaaaaggaaattactgaatcatacataggtacatgtttaactttacaactttctagccaaaccattcccaaagtgattgtacccatttttagtcctgccagcagtgtgtatgcagttccattgctccacattcttatttacacttgttagactcatttttgccagccaggtgggtaaaaatagtgataatcgttgggtgatttttgttatttttttcctaattactgatgaggttgaacatctttccatatactcatggtcatgtttcctcttctagacagtgttttcatgtttttacccatttttttaacagttaattttttatttagataattttgattacagaaattgcaaaaatggaacagagagttcctgtatatcttttaacctatcttctccttatgtttacatcttacatgaccatggaatacttatcagaagtaagcagttaatcttggtatgataccaagtataggtcttactcagattttatcactatttccactaacattctctttcagttgcagaatctgggtccagaatcccgtaatacagttagctgtgtctctgtagtctctccaatttgtgacatttcttactctttacttgtccttcacgaactttacacttttaaagagtactggccagtgattttgtaaaacgtttctcagtttgtgtttgtctaatgttctctcatgattagatcnagattagacattattgggaaagataccacagaggtgatgtgcatcttatcgggggcacataatgtcagtaagtaatactggtgatgttcaccttgatcacctggttaaggaggcatctgccatgattcctaacttactacttttttcccttgtaattattatactgtatttttggaaagattttttgagtctgtgtaatattctgtttctgcttaatttcacccattcattttagcatacattggtgcttttacccatttttaattgggctgtttgtcatttgatttttttggagttaaaaatacatattccagaaagtaatctttttagcagtcactgatatggaaattatcttctctccagtttgtgagttgtcttttcctgttattaatggtatcttctgaagaatagatgtttgaagttgtcttttttgtttgctgccagcatgtagaattacagttaatttttatacattatcctatatccagccatcttgccatatccccttattcatttcagtacttgagatgtaatttcctttggctcttctatgtagataatcacatcattggtaagtaatgagagttttatttcttccattctaatctgtatgacttttatttctttttcttatcttgaattggcaactcacaattggagaggaggtatttcccacacagtaactgataaaagttcagttttgaataaaagcaatagtagcaggcattttttttaattcctgattttttgatgtgttaataagtttgctaatgtggcagctaattatggtaggactggataatttactgaagtacttatctttgagttttatttgtttttgccatcctctgttttcttagctttcctttggcatttcaaggaagaatagtatgcctctctaataggtacaaagcattaatttgtttatttacatattcagtcaccaacatgtgttggacaccaaaggcatacaagtctcagtggtacacagaaataaagaaatgtttattctttttatggatgatcccccccatctattgataaggaagaggcatacctaaagcaccatgacacagctagaaagtggcacatgcaagaaagaggatataaccaaaggatagggacagtactgatgaggcagatccactctaggagacagggatggcttcctggccttgctgctatattccatgaagatgaaatgatctgggtatatgctttgtgggcctagttcaacatggaagttataaagggagcacctttaggatagaattatgttgcctaaggaagggccatttatggtattcttatgctctagaacccagcagttccatgtcagtgtgtagtgaatacctctacaagatctatgatgccaacagtactaagattttatttttggtagtaagagctttacattttctgttgcagagtgaatggagggaaagggaagtttgcttctcatggatgatctttttaaatagtttgtagtaggatgcttttagcagcaaattataaaaatgcctgactcagagtgacttaataagagaaaatattatctcatatagtgggaattcaaaggttgtgcagctgcagacccagtaaagtcagtgactggatgatgttatcaggttgccttttgctgtcctcagcaatccagtggtggtttctctatggttgtgaagatggctgccagtatgattaggctacctgctttcttgatgacatgtgacacaaaaagggagaccctgtctgccaacaatgctattgactacagtcaccaggggaggccatacactgaatttattagaataattagtatctgtcactggagctgaaggtgagatgtgtttcctgtatgaaaactagatttttgtgaggaaggaggaagacagaagtgaatgttgggtagcaaaccaatattgggcactctagtttttgttataattattttttgtataatttttaaattaaaaaacctccaactttgtgatattaaaggaagcttagaaaatagattaaaaagtcactcagaatcctctctcaaataattaacaccatttgtccctttcagcattttcataaatgtttttacttagttaaatcatactctacatacatcttcaaaattctttttstgaaatacataaaaaattgaaaaatatgacatggtttagtttatcatttatctgttgcttgacatctaaattacttttactccttttctgctccaagatttttaaaataaacttaattttaattaattaattaataaataggaatggggtcttgctgtgttgtccaaacaggtcttgaactcctgggctcaagtgatcctcccacctcagcctcccaaagtgctgggattacaggcgtgagctagcatgtccggcccataaaaataaactttatgtttcagaacagatttagatttacagaaaattgtcaagatagtacagttctcacctgccccttctctcctcctccaaaactagtttttttctcttaaccaatrttgatacattattaatggaggtccgtactttcttcaaactttcttgtttttaaaaatctaatgtcctttatctattccaggatctcatattacatttagttgtcttgtctctttagattcctcttgactatgagagcttctaagttatttttgaaggacatattttaatgcagaataggatgaaatgtggtttttaagagaatcaccagatattttgacataacattgaatcatagttgtcctaaagcagctgttatcttttcagacagtaagcagaagacagaaactacttagaaagttgtaacatttgaactacattacataaaagggaaagttactttcatgattcattttaaatagaatttacaatgaaattaaatttaaaatataaaaataaacccttctgcaagacaaatacacaatgtaaaagtcagttccctagtagaatttggctttgtttacctaccaaagaattctggttttcaaggtgacagaagagttcatgactaagtagacaggataggattctcttttctcttctcttcccttcccttccctcccctccctttcctcccctcccctcccctcccctccgctcccctcttttctcctctcctctcctctcctctcctctcttctcctgtcccctcccctcccctcccctcccctcttttcttttgacggagtctcactgtgtcgccaggctggagtacagtggttcaatctcggctcactgcaacctctgcttcctgggttcaagcgattctcctgcctcaacctcccaagtaactgagattacaggtgcgcaccatcatgcccagcaatttttrtatttttagtagagatggggtttcaccatgttggccaggatagtctcgatctcttgacttcgtgatccacccgccttggcctcccaaagtgctgggattacctgtgtgagccaccgcacccggccaagataggattctttytagggcatctaaggcccccaaagcatgagctctttcagcatgctgatctgttagatttttatctgccataagctgtccagtctatgctgctgtaaaatagatctccaatgaaagtccgtaataaatttatttaaataaggaacttgagaaatgttctctggaactcgtaaaataaatgttaattactactaataggaacttggagtcattgatcacatttggaaaccataactaaaatataattttgtctttatgagccatgttgtaatttgagtaaacaaattgagactctttggactcagagtataacctggtaaaacattgtgtcagaactttacaaagctccaaaaaagatgaaaaattttttttctccttaattttctttcttttttttttttttttttttttttacacagccttcttaatctacacatatggcaagctaataattccaaaaaaataatttctttcctttgtagccatttaaaactaacagctagaaatatttcttcttccaattattaaaaataagctgtttctgagtcagtgctgactacatttactgattgaagcagccaactccaaatataccatcttttagtattgacacttaaaataaaacttctccccagaaaaagagttctataaatgatggctgtagaaataggcactgtccaggcagttgttttgtggaagtagtgttgttattttctggtgttttccaagtcatctcagatggtgcgtgaaaatgagatgccaaagaaggcttaaaaaagataccctgcaccagcttcagaatgtaagcaaatctttcattccagcgcttaaaagttttttttttttttttattatattctaagttttagggtacatgtgcacattgtgcaggttagttacatatgtatacatgtgccatgctggtgtgctgcacccactaatgtgtcatctagcattaggtatatctcccaatgctatccctcccccctcccccgaccccaccacagtccccagagtgtgatattccccttcctgtgtccatgtgatctcattgttcaattcccacctatgagtgagaatatgcggtgtttggttttttgttcttgcgatagtttactgagaatgatggtttccaatttcatccatgtccctacaaaggatatgaactcatcatttttatggctgcatagtattccatggtgtatttgtgccacattttcttaatccagtctatcattgttggacatttgggttggttccaagtctttgctattgtgaatagtgccgcaataaacatacgtgtgcatgtgtctttatagcagcatgatttatagtcctttgggtatatacccagtaatgggatggctgggtcaaatggtatttctagttctagatccctgaggaatcgccacactgacttccacaatggttgaactagtttacagtcccaccaacagtgtaaaagtgttcctatttctccacatcctctccagcacctgttgtttcctgactttttaatgattgccattctaactggtgtgagatgatatctcatagtggttttgatttgcatttctctgatggccagtgatgatgagcattttttcatgtgttttttggctgcataaatgtcttcttttgagaagtgtctgttcatgtccttcgcccactttttgatggggttgtttgtttttttcttgtaaatttgtttgagttaattgtagattctggatattagccctttgtcagatgagtaggttgcaaaaattttctcccatgttgtaggttgcctgttcactctgatggtagtttcttttgctgtgcagaagctctttagtttaattagatcccatttgtcaattttggcttttgttgccattgcttttggtgttttggacatgaagtccttgcccacgcctatgtcctgaatggtaatgcctaggttttcttctagggtttttatggttttaggtctaacgtttaaatctttaatccatcttgaattgatttttgtataaggtgtaaggaagggatccagtttcagctttctacatgtggctagccagttttcccagcaccatttattaaatagggaatcctttccccattgcttgtttttctcaggtttgtcaaagatcagatagttgtaggtaagcggcgttatttctgagggctctgttctgttccattgatctatatctctgttttggtaccagtagcgtgctgttttggttactgtagccttgtagtatagtttgaagtcaggtagtgtgatgcctccagctttgttcttttggcttaggattgacttggcgatgcgggctcttttttggttccatatgaactttaaagtagttttttccaattctgtgaagaaagtcattggtagcttgatggggatggcattgaatctgtaaattaccttgggcagtatggccattttcacgatattgattcttcctacccatgagcatggaatgttcttccatttgtttgtatcctcttttatttccttgagcagtggtttgtagttctccttgaagaggtccttcacatcccttgtaagttggattcctaggtattttattctctttgaagcaattgtgaatgggagttcactcatgatttggctctctgtttgtctgttgttggtgtataggaatgcttgtgatttttgtacattgattttgtatcctgagactttgctgaagttgcttatcagcttaaggagattttgggctgagacgatggggttttctagataaacaatcatgtcgtctgcaaacagggacaatttgacttcctcttttcctaattgaataccctttatttccttctcctgcctgactgccctggccagaacttccaacactatgttgaataggagcggtgagagagggcatccctgtcttgtgccagttttcaaagggaatgcttccagtttttgcccattcagtatgatattggctgtgggtttgtcatagatagctcttattattttgagatacgtcccatcaatacctaatttattgagagtttttagcatgaagggttgttgaattttgtcaaaggctttttctgcatctattgagataatcatgtggtttttgtctttggctctgtttatatgctggattacatttattgatttgcgtatattgaaccagccttgcatcccaggaatgaagcccacttgatcatggtggataagctttttgatgtgctgctggattcggtttgccagtattttattgaggatttttgcatcaatgttcatcaaggatattggtctaaaattctcttttttggttgtgtctctgcccggctttggtatcagaatgatgctggcctcataaaatgagttagggaggattccctctttttctattgattggaatagtttcagaaggaatggtaccagttcctccttgtacctctggtagaattcggctgtgaatccatctggtcctggactctttttggttggtaaactattgattattgccacaatttcagctcctgttattggtctattcagagattcaacttcttcctggtttagtcttgggagagtgtatgtgtcgaggaatgtatccatttcttctagattttctagtttatttgcgtagaggtgtttgtagtattctctgatggtagtctgtatttctgtgggatcggtggtgatatcccctttatcattttttattgtgtctatttgattcttctctctttttttctttattagtcttgctagcggtctatcaattttgttgatcctttcaaaaaaccagctcctggattcattgattttttgaagggttttttgtgtctctatttccttcagttctgctctgattttagttatttcttgccttctgctagcttttgaatgtgtttgctcttgcttttctagttcttttaattgtgatgttagggtgtcaattttggatctttcctgctttctcttgtaggcatttagtgctataaatttccctgtacacactgctttgaatgcgtcccagagattctggtatgttgtgtctttgttctcgttggtttcaaagaacatctttatttctgccttcatttcgttatgtacccagtagtcattcaggagcaggttgttcagtttccatgtagttgagcggctttgagtgagattcttaatcctgagttctagtttgattgcactgtggtctgagagatagtttgttataatttctgttcttttacatttgctgaggagagctttacttccaagtatgtggtcaattttggaataggtgtggtgtggtgctgaaaaaaatgtatattctgttgatttggggtggagagttctgtagatgtctattaggtctgcttggtgcagagctgagttcaattcctgggtatccttgttgactttctgtctcgttgatctgtctaatgttgacagtggggtgttaaagtctcccattattaatgtgtgggagtctaagtctctttgtaggtcactcaggacttgctttatgaatctgggtgctcctgtattgggtgcataaatatttaggatagttagctcctcttgttgaattgatccctttaccattatgtaatggccttctttgtgtcttttgatctttgttggtttaaagtctgttttatcagagactaggattgcaacccctgcctttttttgttttccattggcttggtagatcttcctccatccttttattttgagcctatgtgtgtttctgcacgtgagatgggtttcctgaatacagcacactgatgggtcttgactctttatccaacttgccagtctgtgtcttttaattgcagaatttagtccatttatatttaaagttaatattgttatgtgtgaatttgatcctgtcattatgatgttagctggtgattttgctcattagttgatgcagtttcttcctagtctcgatggtctttacattttggcatgattttgcagcggctggtaccggttgttcctttccatgtttagcgcttccttcaggagctcttttagggcaggcctggtggtgacaaaatctctcagcatttgcttgtctataaagtattttatttctccttcacttatgaagcttagtttggctggatatgaaattctgggttgaaaattcttttctttaagaatgttgaatattggcccccactctcttctggcttgtagggtttctgccgagagatccgctgttagtctgatgggctttcctttgagggtaacccgacctttctctctggctgcccttaacattttttccttcatttcaactttggtgaatctgacaattatgtgtcttggagttgctcttctcgaggagtatctttgtggcgttctctgtatttcctgaatctgaacgttggcttgccttgctagattggggaagttctcctggataatatcctgcagagtgttttccaacttggttccattctccccatcactttcagagtgacaccaatgagacgtagatttggtcttttcacatagtcccatatttcttggaggctttgcttgtttctttttattcttttttctctaaacttcccttctcgcttcatttcattcatttcatcttccattgctgataccctttcttccagttgatcgcatcggctcctgaggcttctgctttcttcacgtagttctcgagccttggttttcagctccatcagctcctttaagcacttctctgtattggttattctagttatacattcttctaaatttttttcaaagttttcaacttctttgcctttggtttgaatgtcctcccgtagctcagagtaatttgatcgtctgaagccttcttctctcagctcgtcaaaatcattctccatccagctttgttctgttgctggtgaggaactgcgttcctttggaggaggagaggcgctctgcgttttagagtttccagtttttctgttctgttttttccccatctttgtggttttatctacttttggtctttgatgatggtgatgtacagatgggttttcggtgtagatgtcctttctggttgttagttttccttctaacagacaggaccctcagctgcaggtctgttggaataccctgccgtgtgaggtgtcagtgtgcccctgctggggggtgcctcccagttaggctgctcgggggtcaggggtcagggacccacttgaggaggcagtctgcccgttctcagatctccagctgcgtgctgggagaaccactgctctcttcaaagctgtcagacagggacacttaagtctgcagaggttactgctgtctttttgtttgtctgtgccctgcccccagaggtggagcctacagaggcaggcaggcctccttgagctgtggtgggctgcacccagttggagcttcccagctgctttgtttacctaagcaagcctgggcaatggcgggcgcccctcccccagcctcgttgccgccttgcagtttgatctcagactgctgtgctagcaatcagcgagattccgtgggcgtaggaccctctgagccaggtgtgggatatagtctcgtggtgcgccgtttcttaagccggtctgaaaagcgcaatattcgggtgggagtgacccgattttccaggtgcgtccgtcacccctttctttgactcggaaagggaactccctgaccccttgcgcttcccaggtgaggcaatgcctcgccctgcttcggctcgcgcacggtgagcacacacactggcctgcgcccactgtctggcactccctagtgagatgaacccggtacctcagatggaaatgcagaaatcacccgtcttctgcgtcgctcacgctgggagctgtagaccggagctgttcctattcagccatcttggctcctcccccctccttaattttctaaaggtccaataactggtatgacaggactgttttaacaactaatatcaggtccatcacttcacttgcttccttttgtcctccctcctcctcaccctcccaccactccattcatggatctagtgctcagcgccagtctttgtggaggaatttctccatctcttggtacacctcagttcatcactttgcagtttttcagaaagggcttatgagaactatattccctgagttcttgtatttagaaatctttatctttgaaatccagtaactccactagaatatatttcattggtgattttctgtaattttcttttctgagacttacctttctgtaaacctaaattttctttatttcagaaaagttttcttaatgatcttggaaaatgttttcttttcttcatctctagctccttccttcagttatgccgaaggaaggatctagagatgaggaatagaaaatgttttctggccaggcgtggtggctcacgcctgtaatcccagcactttgggaggccgaggcgggcrgatcacgaggtcaggagattgagactatcctggctaacatggtgaaaccccgtctctactaaaaatacaaaaaattagccaggtgttgtggcgggtgcctgtagtcccagctactcgggaggccgaggcaggagaatggtgtgaacccgggaggcggagcttgcagtgagctgagatcgygcccctgcactccagcctgggcgacagagtgagactccatctaaaaaaaaaaaaaaagttttctattccaaagaatcttagaaaatgttttctattcctcatctctagctctgtatttcaaggatgcctggaactccttggtctgcctttcacatctgtctgttttctttgttatctttttaaactctacttgcccagtttcattttcctcacttttctcaagattttactctatgatccttatggctttcaaatagtgtcagttcttcattaggtatttccagtatgactttcactttctgtgatagttttatcgttcttttctacttatttcctgaggtctaaaaacctagtttttgtttcctttcatgacttacttattccttatgcacttgcatctttgcttcaagctcttgttttataaagcttatatttttgggagttcttgagagtatctttggtcatttctgtggttatatgcttatagrgattgttttgtccttctgccatttctttttcttgctcctttttttccttttaaatgtgggttttttttttaatagaatgtttggatggttccttctactctccctccctggaatctttaaatagtgagttcttcctggactttagtattatatttaaaaaactggacattataaaatgctttttgtctaagtttttagccccttttctattttaggcataagacaatcatttaggtccgtattgtatcctggaggatagcattccaacttcactcactcttaacttcaaggtgagaatagtatggtcactgtgttctaggtcagcctcacaaacactgagactcccaccacatagaagaatttgtttcttttcgtattagtgtagttctctaataaactctatgtggtatatctcatttttatacttctcccagaagctatgtatgctatctaattaatggatggttagttattttatgtaacttttaatactattaggtagaatcagaagaaactgtgttttatatgttaataaatggtcatattggcaattttctgtgcctcaaaataatatattattaacttctttatattgttgttgccattcttgaattattacttctgagtaacctctcagttggcttgagttgcacataagttttttttgggaaggaaagtacatagcatattttctgccttttaatatcagtcagggttcttgtagtctcagattccaattcagaggaatcataattatgtccccagaggtactaaaacctttcaactgtagagatgagcattatgtaggcaaaactaaatattttatgtgtgggtcttaagtgtgatattgaaaggcctgactcctcccttgcattctttcttcccaaaccatgtacamtgcctgtaggatgctaaatcagagcaccaatgcatcctggaggatggcactcccccctcacaactgatgcctcctggttagtccaacagcttagtaagtcagatcattacatcatgccagtcagtgaaatgtatgggctttgcttcttccaaaaggtgaagtccttaattacaaacaatgttgagtgcgataatagcttaaaagatatttcgtaaatctgaggattgtggtgtttacataagcaatataggtagaagaaatgcagatagcaaacctagagtaagtgtctcttttagtggaggaattactgcctttcccatcctaaaagagctcactggatgcgatctgatgtgaagtagttgggggtcctcctggcatggctgtgtatcaggtgctcagagttggttgctgctgctggcaagctagcatcctgcaagaatggtattcaggtcagcattagtgagaagtgaatgttgtggagtgcatttcctgctgccttgtgctttgttcctatgtcccttgagcaagcactgcagcgatggggacatacacgggcgcaggccatcctgcctccacagtgggagcctttcactgtgcactctcatggagcacaaatagttataccctgtctggactcatttcagtgggcccatttcatccacatgtcttttccctagatgcccttgtcaccagtactccaatctttcttctttcaggtccctatccatctggttaaacttgtagtcactgcctatcagcctatcaggttgtccttcctcagctaaagtggaccacggacatagggcttgaagttctgcccactgggagaaagtttctgctatattgtcttttcagagaccatcccttacaatggatttaatgctatcgtgtccatttatgactcatgacaatggagggtcagttggaactaggcattcaaggtactcaaacctttctgcatcctcctttatatcgtgtgtgtgtgtgtgtgtgtgtgtgtgtgcatgtgtgtgttcgggttctctgaatcttactctgtctgatgagtgtcctacttttcacctaagtgacttaatgagaccttaaattcaatggtgtaatgattcatcaccctttcaatttgttttttctgtcttagcctggcagctacaagagattcaagatacttttttgttggacatactaagtccctaactttcagtcttagaaatgaggaatttagaatgaagaatttagagatgaagcatgtaattctttgtttctccccctttttctggctctcgaagcttctcactgtttctgtgagccctttgatatcctttcaagaaatttctttttttcttttccaaacagcactggtcttttgtgcttacaaacaagaacccagacagacagttaaagacattgatattaggagacgaatgtaggaaacagaacctcagggacctgtgagaataataaatgagttagatgggttggaagtaactcagattccattaattttcagaatacaaaataatttttaaaattactaattattacctgtcatcaccagaataaagttgtctttaacctaaacaacattgttataagtattcgtcttgtactcacagtgttgaattcctgtgtccttcaaatttcaaaggttgggataataggtcccccatatcttcagttggaacttcactctagtgaacacaggtaataatttagtcattttgaaaattaatgggacctgagtctttaattgtctgggttcctggttacaagcaagaaaaaccaactctggttgggaaaggaatttattgggaggatactgaagagctcactgagcaaaagacttgaatgacctgaaaagggatgtgaactaaggcagctctggaaagccaagaacaagaagcccaaccatcatcttttatcaggattagtttggctgtaatgccagttattctcttaccaccactcttgcaggacaccattttcactggatgctgctgccaccgctgctatcacgagaagccattctagctgtcatgagtgaatcctaagcagccttttgtctttgtgtttctgtctacacattcaaagtcttgagttgaggcagagtttaagtcacacacagtgtrctggattttggttctcacagagtgagaggaggcttgtataaagagaggccaggcattatgtagtaggaagctggtcacttccatgacggraattgtagtcctttgtcctgcttataggcaacgtgcaattcttcctttccagtttgtatgccccttctttttcttactttatggcattcactagtacctccagtacaatgttaaatagtattggtgaaaatgaacactttgtcttctttctgctccaagggaaagcatttcacttttcaccactaagttttacattagtgctaggattctcatagaggcctttaacsaagttgaagaaattcctgttactcatgtgctgagggcttttatcttaagtgaatgttgaaattttgtcaaatgctttttcttcatttactgagatgattatatgtgtttgttttttgtttgttaatatgttgtattgattgatgtttcattgttggacaaatcttgcattatttggtcatgatgtatcaccttttttatatattactgaattctatttgctaatgaccttgtaagaagttttaaattttctttttcartaactgatatacctttgtaagaattttaagtctatgagaggtattgatctcattaatcctttggttttgatatcaaggtactgctgtcttcattaaactagttggaaagtatgccatctacctctttattctagaagagtttatgtagaattggcaataattctttcttaaatacttggtagaattcaccagtgaagccatctgggtctggagttttctatgtgggaaggtttcaaactgtgaattcagtttctttaatagatacattagataaaatagataataggtagattaaataggaatattcaagtatcaatttattttaattatcctaggcagtttgcatctttcaaggaatttgcccatttcatccaagatgttgaatttattgtcttaaagtcattcattattcccttatccttttaatgcttgtgggatgtaaaatggtgtctcctctctcattcttgatattggtaatttgtgtttttccctccttgtttttcttgatcagtcaggctagaaatttatctgtttttctcttttcaaagaattagcttttgagccaggtgtggtggctcaaagctgtaatcccagcactttgggaggccgaggtgggcagattgcttgagctcaggagttcgagtcccagcctgggcgacgtggcaaaaccccatctctacaaaaaatacaaaaattagatgggcctcagctactcaggaggctgaggtgggagtattgcttgagcctgggaagtcgaggctgcagtgggccatgattgtgccactgcacttctgcctgggtgacagagtgagaccctgtctaaaaaatagaattagttttttgttttattgatttgttttcattattcattcatttttgtttgtttgtttgtttgtttttttgagacagactctcactctgttgcccaggctggagtacagtggcgtgatctcggctcaccgcaacctccgcctcccgggttcaagcgtttctcctgtctaagcctccagagtagctgggactgcgggcatgcaccatcacgcccagctaatttttgtatttttagtggagacggggtttcaccatgttgaccaggatggtctcaatctcttgacctcatgatcctcctgccttggcctcccaaagtgctgggattacaggcrtgagccaccgcgcccagcctatttgttcattttctattcattgattcttgtttcttcattatttctgtccttctccttacctggaatctaatttgttcttcagttttttaacgtagaagcttagatcactgatttgacacttttcttcctttccgatgtgagcatttaatgctgtaaattaccctccaaccactattttagctacttctcacaaatgttgacatgttatgttttcattcaattcaaaattcccttcctccctctctccattccttcctttcctttcttttttgagatagcatctcgctctgtcgcccagcctgcagtgcagtaatgccatcttggctcgctgcaacctccatttcctggatttaagtgattcctttgcctcagccacccgaatagctggaattacaggtgtgtaccaccacacccagctaagttttgtatttttagtagaaacggggtttcaccacgttggccaggctggtctcaaactcctagcctcaagtgatccacccgccttggcctcccaaagtgatgggattacagatgtgagccaccgtgcctgaccccagttcaattttttttttttggagacagtctcactctgtcaccaggttggagtgcactggcatgatctcggctcaccgcaacctctgactctctggttcaagggattctcctgcttcagtctcctgagtagctgggattataggcacgcatcaccacgcccagctaatttttgtatttttgatagagacggggtttcaccatgttggccaggatggtctcgatctcctgaccttgtgatccgcctgcctcagcctcccaaagtgctaggattacaggcgtgagccactgcacctggtccaaaatattttctaattctttttttatttcttctttaacctatgggttgttggatttccacatatttggggattttccagattgctttctgttaatttttctctcatatttttgctgtctggctttttgatgtgttttatgggagagaccacccatttgtggagaaagtactcttctgagtccacatcatatgggaggagcccacaggtcagtctgcaggctgccgagatcataggctggtgggcgggtgcacaagtagactgggctggtctctcttgactagtgtgagaaatggggccagccctgctgccatcactgctgcattccagtggcaaggctgaagattggaatttgttaaaagtctgcttatgaggcaaccacctcccctattcctctttaccactgtgcacataagaactccagcagccaagcatctacccttatttaggaaacagaacctttttcatagaaatcgaatagcctgagagaatgtcctgatgccatagctaaatttcttgcagaaagtgctgagggcggactcttggagcaccctggtagataagtagacttgtacmacagaggagatggccatttttggtctccgcaataccctctacaaaggcagccaaggcccataacacatttcctgttggctgcctgtattcaacgcacaaatttagacttgtgatctgtatgtggcatgacaatgcttatgagaatagagagctgtcaatttggtaaggagtgagatctgccttctgaaaggtggaaccctgttcataatgttagcattgtcctgttaaatgcaattttatttttaatgggccagtgccctaaaatgtgcatgggtgactggtttatggataattttaattttcttctcagtggattttgtgttttctaacttctttgcaatgaacgtatattacttttgtgtttagataaaatattttaaaattttaaagattaaaaactggtagagttgtgaaataggaacatcagaattaatctagtaagcatgacttaacgtacaggcactctgaaactaatgatttaatagcacactggattgatcataatatcaattttgacttctctgtgaagaacaattggaggggtcctaaggaaagccttctggctctgtttctcaagtcagaatgtcaaataaaaaaaggtgaaattacactgtagttaccgatttaacaggagaagagcattactgtgtcttctgctttcccattgccagtgatttacggatgatcatgtttctactggtggaagggcaggagrttttaaactttcccactactttacttttagagaggagacaggtacctatgttccatttgtttgctaacccagttattccgtttctgttctatccataggcagctggctaagagtcttgggcaggctggtgaaattgagcctgaaacagaaggaatactaacagagtatggcgtggatttctctgatttctcttcagaagttctagaatgtcttcctcaaggcctgccatggacaattccaccagaggagttcagcaagagaagggatttaaggtaagcacctgaaaccctttaagaacgtatatctccctttctgccttaactttcctaggggctaggcttagatgttttcatctttccacgaacattcaagttcagttcagttgggaataggtgcttctgtaccacagttggcaaattatggcccacaggctaaatctagcctactacctgtttatgtacaacccatgagctaagaatggtttttacatttttaaatggttggaaaaaattaaaacaagaataatgttttatgaaaattwtatgaaattcagatttctgcgaccataaagttgcattggaacatggccatgcttattcattatctatgttgcttatggctgttttttgccctacaacagcccagttgattagttgcaaccaagaccatatggcctgcaaagccaaaagtagttactgtcagccttttacagaaaaagtttactgatccctgttctagaccattctaacttcaaaagctacagtgcctatcttctcattgccatagatctggtcaagtacagactgttatctagtgagaagtgccttcctttaaatgggcctcttcaggcacagagcaaaggattcaagacttctgtacttggagcctcattttaaagccttacttttaggtctggaatttgttggaaagtactttcgtggtatttttataacaacatcttctttgaagatgtttcttcattgtgggatgttagttcttttctgatatttctcttcagaatttggtttcagtactggcactcattttggatgccacatggagatatttagaaccaagaaacttttcatacaacccactgaggctgtggaaggtttttgctaaggtcatcccatgtcaaagtcttttccaccacacttgctcgcttcatgcagctgaacttatgacaccttcagctctgggtgcctgttacccacctagtttgtgaatactccctctctgtaccttcttactattgtatcttttagtaatttactgcctttttcttttcttattgaggttaggcaaggaaaaggagatgatcattagtcccctttcctacttgttagtatctctcatagaacacatattacatttgaagtcagttaacccatattgcattgctggattttcataataacccctctatcactgaacccctgctagcacatgggtgtgttatctcttcaggggctccgaggtcttgggcccataacattaacctctctgaacctttgttttctcatatacaaattgaggggtttgttttctgaggtcatttcctgaatctaggaatctatctaatgatttartgggaaaagaatgctagaataaatggttgaacattattgtttagtagaatttagtgtagccatgctgcagtatctatcaacattttaaatgtacctactcctgcaccccaaactctactcgaagtgtacaaaaatatatgtacaagaatgttcattgctgtcttgtcataaaagttaaacattaaagacactgctaatgtcyattaataaaggaatggtttagtaacctgtgttatgtcaatatgatagcattccttgcagctctgcaaaaaggagctatatccatgttgactttcctaaaagaatagctataatatattattaagtcaagcaagtttcaaaacaatatgaatatgagcctatattttgtaaagtaatacaaaaactacataaatatacacatatacatatatgtgtgtatacgtatacacatcaaagtatatatgcatagaaaaaggcctggaaggaaataaactgttaacagtgactaccatggagagtggattcagtggagtggtaaggcaacagggaagtgaactttgacttttcattttgcatactgccatactattcaaattattattattatttttaagacagcatctcactctgttgcccaggcgggagtgcagtggtgcagtcatcgctcactgcagccttgaattcttgggctcaagtgatcttctgccttagcctcccaaaatgctgggattataagcatgtgcgaccacacccggctaattcttttattttacttttgtagagatggggtcttgctatgttgagcaggctggttttgaactcctggcctcaagagatcttcctgccttggcctcccaaagtgttgggattacaggcgtgagccaccacacctggtccaaatcttttttaaagtaacttgtataactttaaaaaattataaatgtgaaagtcacaaaatagaagtattccattttttctagccttttagcctactggtaaataataagcatgttagtagttatggggcccaatattgcagtaaattcccctctcatggctctatcttgccatttctttgacctttattgccttctggtttagaccatagaataagaggtccttagtgagaccctgtctctacaataaataaataaataaataaataaataaataaataaataaataaaatattagccaggcacagtggtgtgtgcctacttgggaagctggggcgggaggattgtttgagcctgggagtttgaggctgcagtgagctataatcatgccgctacactccagcctggacaacggagcaagactctgtctaagggaaaaaagaaaagaaaccttgctctgcagaaagcctttgttaaaatatatcttaaatacacacaccacacacacacacgcgtgcgygcgcgccctgtgaaaggatccaaagacagaaggagtttgtagggtgctctctgctattcatgaagtaacaaggattttttaaaaaattacttttgggccgggcgccgtggctcaacgcctgtaatcctagcactttggaaggcggaggctggcagatcatgagatcgagaccatcctggccaacatggtgaaacctcatctctactaaaaatacaaaaattagctgggcatagtrgtacgcgcctgtagtcccagctacttaggaggctgaggcaggagaatcgcttgaacccgggaggcggaggttgcagtgagccaagatcgcaccactgcaatccagcgtggcgacagaacgagactccatcaacaacaacaacaaaaaattactttgggctgggcacggtggctcacacctataatcccagcatttggggaggccaaggtgggtggatcactcgaggtcaggagttggagaccagcgtggccaacatggtgaaacctcatctctactaaaaatacaaaaattggctgtgcatggtggcaggtgcctataatcccagctacttgggaggccaaggcaggggaattgcttgaacccaggaggcagaggttgcagcaagctgagatcatgccactgcctggacgatagagtgcgtctcagtcaaaaaaaaaaaaaaattactttaaccttaaaataggttatccttgcccattatcctcaggattatgtttctaaaattcaaatctgatttattttactcctttgcatttaaattttttctaatgtttcttaatgcctaaagtagtaatgtctgaagtttagaaattactactttaggcatcaagaagtaatatagtaaattaccactaatgcttgtctttattttaaaactatacatgaatttactacattgatagtctattaygtacattataaatgtaagtgaaaatagaaaaataaaaatgtaatgagaaataaatttttaaatattttcattttacttacgaaaagtatagaaaactgtttatatagtaattttacttttggtgaaagcagtatggttgaataatattctttatttattaaaattttactttaacaactaataatatggaaattcagagatctgattctaagttctgtatgttttggtacttggttttgatgattatcataattgaaaaggatatatgtttagaagatgtgagctgtgcttacaaaatcctaatactcatttctcagtcctattcgccaattatattccaattcattttgaaattcagctagtaaatttccatcttttctgatgtcagttcttgtggattcattgaaaggtgctgcgtttttagattaaaaaaatagatttataatctccagttactctttagttgttatctttaaaaactagttaaaaaattcagccaggcacattggctcacacctgtaatcccagcactttgggaggccaaggtggacagatcacctgaggtcaggagttcgagaccagcctggccaacatggtgaaaccctgtctcactaaaaatacaaaaattagccgggtgtggtggcagscacctgtaatcccagctgctcgggaggctgaggcaggagaattgcttgaacccggaggcagaggttacagtgagccgagattgtgccactgaactccagcctgggtgacagagcaagactctgtctcaaaaaaataaaaataaataaaaataattctattaggaagtttaagtctatggatatgaatgtttttgtagtttatacacttacatcattttagtccccaaataatataacaatggaagtatttcaaaacatccatttaaaaaaatgttatctttaaaattcgagtatgttattttgttttcaaaatgcaataattttttttcttattgttaaaatatcacctttaccttgaagggacagattaagcatgtttaattttcctaaagtatctgataggtaacatatgactgatagccattgttttgaaattataatgtggctggagatgaattcatattagacacagaagaaatgtcagtgttgccatttttctagtgttaatgatactactaggagtattagtggtttagtattatcttcaatatatggactttgcagtaatctttttttagccagttgccttttttttgcaaggattagtttagctaaaactagacaatatccataaatccatgtatctgggcatgagtaaagacccattatttgcacttggcaaaagcataggaaccaagagtgccactgtcattgcctttgtgttgcagaacgccaactttttcatctgtacacctcacctaccacctgacccacacatagtgagggtgccagggttaattcatgtagttatgtagtgtcagttaattccttatttttaacacacataaagagaagccataagtgtgtggaatgagctccagtgatgtagttggttagcatgcagtactgtacagcagtaggtaagcatgtggaggtatttggatctgataaccttttccttttctttgactggttttatgatggagtcattcagtttttataccaaaaatatttatggaacaccaaccatgggcactgaggatacaacagtgaacaaaaatagatgtattcactgcccttgtggaactctcagtttggtggcagaagaacatgaatgaaactatyaagcagtagtcaaatgtggaattgtaatgaaggagggggtgcttggtgcaagtgtttgtgatcatgtgatttcttctgctctgaggtccactgctttcaaagagtttttaaaaacagtattgattttcctaggaatgtcaaaagaagtaagattgagtcccagcacatgctgaaaaatatgtgctatattgaataaattaatatacattttrtaaactaataaaatcaaacctttttcaaacatttatttgcacatattgtttatatatagtatatgtcatatatgccgtatatgtcatatatatatatatacatatatgccaagtactgagttagccactgaaaatgcaaagacaaccaagggccagcccctgttcttcaggtagacagattcgtactcagataaattacagcagacaatggcaagtgctgtaatataggtatgaacagactgccagggtcattggtgcatgaggtgagatctgagaaatgagcaggtatagagggaaatagagtgactaaagttgtcttcattttagtgatagtccatgtctgcagaaaggcagtatgttcccttcagactctaagatccttctctaacagggcttgcaagtcctatggtttggtcacttaatcccctgtcctgggtcatcctgcctcagagcctgcagtgttactctggctctagctacataagaacttctacatacccgttyaggtttggtatttgaacaattayatttggaacagaaaagttccatcaatctttaaacctcataatccaattatgtcagtaaaattccagttttttggtccaatggaattggggtaatattttgcaaactgaagttgagagaaatagtgtttattttgaaaagaaaaatggtcggttagcaattttcaagaagttaggcttgcatgaactcctaggggcgatatagccctcctgattggggtcaccatttttctggaccttcagctctagtctctggagagtccctgcttgcatggcctagacctgtagctgtctttagcagggcatctgaggctttaaaaaagaaaagcaacataagtactgcagaaatttgaggatcaggaagataatatgtccaaggaaactgcttaaaggggggttgcaccaraagctcaagaaacccagaagttatttctgagactggctccagttatttcaaatttcattcatattgttttgtttcctttgttgctaaactggaacaggaaaccaaagcctaaaagctcaattaaagtggaaaatgaaaacctaaatattggagggggaaaataccacactaaaccgatctttatgtttctcctatagttagtattattatggaagtttgaatcatgtcacttttcagtaaaactatgagtttcattgaagtggaggtggtttctatagctttttacaagagaacttgtgggtatctatttccttactattccctcaataaaaaggaagcccagtgacctccaccagaccattacaaatgtgaaacttggcacttaaaattgcttgctctaaattttccaattgctttctctctttttttyccatttaatgtcgtcctgccaactagtgattttattattataaacaggacattgtattcacttttaagaagaaatatgaagctggaggtaaaattacaaactgcagcttctcggctgccaaaatagaaaacaatgagctaaaaatactaagcacagaaagggggttgtggtaagaaatattgaaaaatcttcaagatggagctgttccaaagagacagaaatttcctgtcactccaggtaaaaccaaccttgaaatagcaacttgaaaggagagtcatataatactaacctctttcaggtcaacccttttgtgggaaagctttcaaacataactaacattaaatgactaatgatcttgctgttcatcaggaagtccaatatgattaaattgcctttagaagaaggttcccctggtaagacagtgtggtagcattgaaggagcgctggaagttagtcctagttctccccagggcctagctaggtgattttaggcaaaccagttaaatctggggaagtggagagccgtgagcaattttatcttttgtgaaatggatttttgaccagattaggatttttcaaaacatgttactaggtcatgaataggtgtcatgcagaaaaaggatctgtgggcaagtatttttggaaaacagtgtgttaatagatttcttagagtttcttctcatggattatcttgtggaactagtattccttagaatacattttgcaactttctgaactaggtatttcaaacccctctagctctaacagagcatgactctgtatttgaaatgtcttttctgagttatttagagctgtctcattcttggatttgaaagaaaatggtatcccatcagtgattgtctgccgcatttatctgacaaataactatcaactgtgccccaccatggaccacccaggraagataattacgcaggaaattcaagggttgtgctttaaatctcagttcttcgatggccaagggaaccccttcttcccttagctggagggaagcaagattaaattgtttggcatcaaatggggaagctgtcattgtcatttgaaactcctggcagtagtattcctttcatgtaaatcccaactcactgtgaaattacaagaaatgcatagatagtaaccaggatgaatgggccctaaagtagatacacaactggacyttcttaattgtaagtatttagtacttcatcagcccataaaattcatgttgataaatagcaccactctcagaaaagacaaatactcaaagatcaatagatttttgtctgaaccaggaggaaaaatgcctactggcaaaagacaatatttgaatttattccctagaaatatttttatagcactgtagaaatatgagtgcatgggaaagataatttctacatcttctaaataaaatctgtttggaaattatactataatgatatttaaaaatttcattttgtggtatagatggtctaagatttggaataaactggagtatagagataactaaatgtcagggtggcaaagtctgttttttatattgagatattcaaataccacaaaattaatcattttaaattcagtggtttctcgtatattggtagatttgttgaaccatcaccactatctaattccagaacatttttgtcaccccaaaaatcaattccattagcagtcactcctcattccctctccccccagcttctcacaactactcatcagttttcagtctctgtggatttccctgttctgaacatttcatataaatggagtcatacagcaagttgcctttggtagctgacgtggtttacttgacataatgttttcaaggttcatccatgttgttaaatatatcagaacgtaattccattttatagctgaataatattctgttgtatggatatttcacattttgtttattcattagttgatggacatttgggttgattccccagcttgactattatgaataatgctgctatgaatatttgtgtacaggttttggtgtggacattcagttattttgggtatacacctaggagtgaaattgctaggtcatatggtcagtctacttttagagtaattgtgaaactgtttttcaaagtagctgtaccatttgcactccctgtggcaatgtatgagggtctcagttgctccatatcctaacacttgttatctgtatttgtgattatagccatcattgtaggtgtggggtagtatctcattgtggttttgatttgcatttctgtcatgactaatgagactgaatgtattttgatgtgcttattggtcatttgtatattttctttgaagaaaaatctactcagatagtatctattcagatcctttgccatttttaaaatggattgcctttctattgttgagctataagtgtagtttctgtattccaaacactggtcatttatcagatatatgatttgcagatattttctcctacttgtgggctggctatcttgcactttcttgatggtgttcttagaagcacaaagtttcaaaatttgatgaagacccgtttagtctgttttttctttggttgcttgtgtttttggtgtcatatctataaaaaccattggcgaagatcacaaagagttagacatatgttttctttttgtttgtttgttttgagatggcgtctctgttatccaggctggagtgcagtagtgcgagctcagctgcaacctctgcctccctggttcaagcgattctcctgcctcagcctcccaagtagctgggagtgcaggcacccatcaccacaccctgccaatttttttgtgtttttatagagatggggttttgctatgctgggcaggctggtctccaactcctgacctcaagtgatccaccagcctcagcctcccaaagtgctgggatcataggcatgagccaccgtgcctggccaacataagttttcttctatgaactttatactgttagttgttatatttatgatccatttttagttaatctttgtaaatggtgtgaggtatgggtcaaacttcatttttttgcttgtggataaccagttgtttcagcaccataagaaaaacttgttgacaagatgattctttcttcatgaaattgtcttggcatttcttgtcaaaaattatttgaccataaatgtattggtttatttctggactctcaattctgttccattgatctgtatatttgtctttatgccagtaccacactgtctaaattattgtaactttgtagtaagttttgaaattgagaagtgtgattcttccaactttgcttttttttctttcagatttttctactattctgggttctttgcattgccatatatattttaggatcagcttgtcaatttcaggaggcactcaggattttcataagaattgctctgagtctgtagatcagtttggggagcatttccatcttaacactgttaagtcttccaacctatgaacatgggatgtctgtccattaattaggtctttaatttctttcaatgatgttttgtagttttcagtatacaaggcttctttgttaaatttaatcctacatatttattctttttgatgctgttgtaaatgaaattgttttcttaatttcatttccaaattatttattgctaatgtttagaaatacattttatatttatatatatatctggtatcctgcaaccttacaaaaatcatttgttggccgggcatggtggctcatgcctgtaatctcagcactttgggaggccaaggctggtggatcacttgagatcaggagtttgagaccagcctgggtaacatagtgaaaccccgtctctattaaaaatacaaaaattagccaggcttggtggcaggtgcctgtaatcccagctactcaggaggctgaggcaggagaatcgcttgaacctgggaggtggaggcagcagtgagcagagatcacgccactgcactccagccagggtaacagagtgagactccmcctcaaaaaaaaaaaaaaaaaaaaaaattgttagctctgtttttcgtggataccatggaatttcctgtatttagaagttcatgtcatctgcaaatagggaagttttacctcttcctttctaatttagatgccttttatttccttttgttatccagttactcaagctaggaccttctgtacagtgttgaatagaattaatggaagtgtgcctctcttgtcctgatcttgaggaaggaaagcattcagtcattcagttttttttttgtttttttgttttgagacagcgtcttgctctgttgccaggctggagtgcagtggtacagtcacaactcacaattccaggctcaagtgatcctcccagctcagcctcttacgtagctgggacaacagggcgtgccaccaaacccagctaatttttgtattttttgtggagatagggttttgctgtgttgcccgggctgctcttgaactcttaggctcaagtgatctgcccgccccggcctcccaaagtgctgggattacagatatgagctaagcactcagcccagtctttcaatattaattgtaatgtaagctttgggggttttgtagatgctctctatcagctgaaagcttttccttctagtcctgatttattgagtggttttctcatggaagagtgttggattttgtcaaatggtttttctgtctgttgagataatcctgtgatttttgttctttattaatctgtttcattgattgactatcatatgttgagccatcacattcctgggataaatttcacccttgtcatggtgtataatgatttttacattgctagatttggtttactggattcctttttaggatctttgcttcgtatttttaagagatttcagtctttagttttcttgtgataactttggttttatrtgaggataacactggcctcatagaatgagttttggaagagtttgtgaagaatttggggtatagttttttttctttttttcttctagcttttattttaggttcgggggtacatgtatgtacgggtttattatatgagtaaattgcatgtctctatagtttggtgtacaaatgattttgtcacccaggtagtgagcatagtacccaataagaggtagttttttgatccttattctcccactctagaactcatcagtaaagccatctggccctgtgcttttgtgtgtgtgtcggcgatgggtgggggggtggtttgtttattaattcggtatcttttttcttatagatctattgaacttttccatttttaagtcctctgcagtttatcttcctagaattttttattttttatttttagacggagtttcactcttgttgtccaaactggagtgcagtggtgcgatttcaacttactgcaacctccacttcctgggttcaagtgattctcctgcttcagcctcccaagtagctggaattacaggtgcccaccaccacatctggctagttttttatattcttcatagagacagggtttcaccatgttggccaggctagtcttgaactcctgacctcaactgatccacccaccttggcctcccaaagtgctgggattacaggcgtgagccaccgcacccggcttcttcctagaactttgtcttttgcatcttggttatctaatttcttggcataccattgttattagtattcccttataatccttattgtttctgtaagattgttagtaatatttgctctttcatttgttagtttagtaatttgaatctctccccctctctctctgttttggtcagcttagctcagggtttgtcaattttgttgatcttttcacatagccaacttttattttcttcttattctttttatttccttctctttttttttaaattctctttttcatttatttctactctaatctttgttattttcttttttctgcttgcttaggtttagtttgttcttctttggtttcttaaggtggaagtttatgttattgagttcagatctttctatgttttgtttttgtttttttcttgagatgggagtctcactctgtcgcccaggctggagtgcagttgtgcaatcttggctcactacaacctccgccttccaggctcaagtaatcctcttacctcagcctaccaagtacctgggaccacaggcatgtgccaccatgcccggctattttttttaattttttaattaattaattaattwatttatttattattattattattttttaaattatactttaagttttagggtacatgtgcacattgtgcaggttagttacatatgtatacatgtgccatgctggtgcgctgcacccactaactcgtcatctagcattaggtatatctcccaatgctatccctcccccctcccacctccccaccacagtcaccagagtgtgatattccccttcctgtgtccatgtgatctcattgttcaattcccacctatgagtgagaatatgcggtgtttggttttttgttcttgcgatagtttactgagaatgatggtttccaatttcatccatgtccctacaaaggacataaactcatcattttttatggctgcatagtattccatggtgtatatgtgccacattttcttaatccagtctatcattgttggacatttgggttggttccaagtctttgctattgtgaataatgnnnnnnnnnnnnnnnnnnnnnnnnnnnnnnnnnnnnnnnnnnnnnnnnnnnnnnnnnnnnnnnnnnnnnnnnnnnnnnnnnnnnnnnnnnnnnnnnnnnnnnnnnnnnnnnnnnnnnnnnnnnnnnnnnnnnnnnnnnnnnnnnnnnnnnnnnnnnnnnnnnnnnnnnnnnnnnnnnnnnnnnnnnnnnnnnnnnnnnnnnnnnnnnnnnnnnnnnnnnnnnnnnnnnnnnnnnnnnnnnnnnnnnnnnnnnnnnnnnnnnnnnnnnnnnnnnnnnnnnnnnnnnnnnnnnnnnnnnnnnnnnnnnnnnnnnnnnnnnnnnnnnnnnnnnnnnnnnnnnnnnnnnnnnnnnnnnnnnnnnnnnnnnnnnnnnnnnnnnnnnnnnnnnnnnnnnnnnnnnnnnnnnnnnnnnnnnnnnnnnnnnnnnnnnnnnnnnnnnnnnnnnnnnnnnnnnnnnnnnnnnnnnnnnnnnnnnnnnnnnnnnnnnnnnnnnnnnnnnnnnnnnnnnnnnnnnnnnnnnnnnnnnnnnnnnnnnnnnnnnnnnnnnnnnnnnnnnnnnnnnnnnnnnnnnnnnnnnnnnnnnnnnnnnnnnnnnnnnnnnnnnnnnnnnnnnnnnnnnnnnnnnnnnnnnnnnnnnnnnnnnnnnnnnnnnnnnnnnnnnnnnnnnnnnnnnnnnnnnnnnnnnnnnnnnnnnnnnnnnnnnnnnnnnnnnnnnnnnnnnnnnnnnnnnnnnnnnnnnnnnnnnnnnnnnnnnnnnnnnnnnnnnnnnnnnnnnnnnnnnnnnnnnnnnnnnnnnnnnnnnnnnnnnnnnnnnnnnnnnnnnnnnnnnnnnnnnnnnnnnnnnnnnnnnnnnnnnnnnnnnnnnnnnnnnnnnnnnnnnnnnnnnnnnnnnnnnnnnnnnnnnnnnnnnnnnnnnnnnnnnnnnnnnnnnnnnnnnnnnnnnnnnnnnnnnnnnnnnnnnnnnnnnnnnnnnnnnnnnnnnnnnnnnnnnnnnnnnnnnnnnnnnnnnnnnnnnnnnnnnnnnnnnnnnnnnnnnnnnnnnnnnnnnnnnnnnnnnnnnnnnnnnnnnnnnnnnnnnnnnnnnnnnnnnnnnnnnnnnnnnnnnnnnnnnnnnnnnnnnnnnnnnnnnnnnnnnnnnnnnnnnnnnnnnnnnnnnnnnnnnnnnnnnnnnnnnnnnnnnnnnnnnnnnnnnnnnnnnnnnnnnnnnnnnnnnnnnnnnnnnnnnnnnnnnnnnnnnnnnnnnnnnnnnnnnnnnnnnnnnnnnnnnnnnnnnnnnnnnnnnnnnnnnnnnnnnnnnnnnnnnnnnnnnnnnnnnnnnnnnnnnnnnnnnnnnnnnnnnnnnnnnnnnnnnnnnnnnnnnnnnnnnnnnnnnnnnnnnnnnnnnnnnnnnnnnnnnnnnnnnnnnnnnnnnnnnnnnnnnnnnnnnnnnnnnnnnnnnnnnnnnnnnnnnnnnnnnnnnnnnnnnnnnnnnnnnnnnnnnnnnnnnnnnnnnnnnnnnnnnnnnnnnnnnnnnnnnnnnnnnnnnnnnnnnnnnnnnnnnnnnnnnnnnnnnnnnnnnnnnnnnnnnnnnnnnnnnnnnnnnnnnnnnnnnnnnnnnnnnnnnnnnnnnnnnnnnnnnnnnnnnnnnnnnnnnnnnnnnnnnnnnnnnnnnnnnnnnnnnnnnnnnnnnnnnnnnnnnnnnnnnnnnnnnnnnnnnnnnnnnnnnnnnnnnnnnnnnnnnnnnnnnnnnnnnnnnnnnnnnnnnnnnnnnnnnnnnnnnnnnnnnnnnnnnnnnnnnnnnnnnnnnnnnnnnnnnnnnnnnnnnnnnnnnnnnnnnnnnnnnnnnnnnnnnnnnnnnnnnnnnnnnnnnnnnnnnnnnnnnnnnnnnnnnnnnnnnnnnnnnnnnnnnnnnnnnnnnnnnnnnnnnnnnnnnnnnnnnnnnnnnnnnnnnnnnnnnnnnnnnnnnnnnnnnnnnnnnnnnnnnnnnnnnnnnnnnnnnnnnnnnnnnnnnnnnnnnnnnnnnnnnnnnnnnnnnnnnnnnnnnnnnnnnnnnnnnnnnnnnnnnnnnnnnnnnnnnnnnnnnnnnnnnnnnnnnnnnnnnnnnnnnnnnnnnnnnnnnnnnnnnnnnnnnnnnnnnnnnnnnnnnnnnnnnnnnnnnnnnnnnnnnnnnnnnnnnnnnnnnnnnnnnnnnnnnnnnnnnnnnnnnnnnnnnnnnnnnnnnnnnnnnnnnnnnnnnnnnnnnnnnnnnnnnnnnnnnnnnnnnnnnnnnnnnnnnnnnnnnnnnnnnnnnnnnnnnnnnnnnnnnnnnnnnnnnnnnnnnnnnnnnnnnnnnnnnnnnnnnnnnnnnnnnnnnnnnnnnnnnnnnnnnnnnnnnnnnnnnnnnnnnnnnnnnnnnnnnnnnnnnnnnnnnnnnnnnnnnnnnnnnnnnnnnnnnnnnnnnnnnnnnnnnnnnnnnnnnnnnnnnnnnnnnnnnnnnnnnnnnnnnnnnnnnnnnnnnnnnnnnnnnnnnnnnnnnnnnnnnnnnnnnnnnnnnnnnnnnnnnnnnnnnnnnnnnnnnnnnnnnnnnnnnnnnnnnnnnnnnnnnnnnnnnnnnnnnnnnnnnnnnnnnnnnnnnnnnnnnnnnnnnnnnnnnnnnnnnnnnnnnnnnnnnnnnnnnnnnnnnnnnnnnnnnnnnnnnnnnnnnnnnnnnnnnnnnnnnnnnnnnnnnnnnnnnnnnnnnnnnnnnnnnnnnnnnnnnnnnnnnnnnnnnnnnnnnnnnnnnnnnnnnnnnnnnnnnnnnnnnnnnnnnnnnnnnnnnnnnnnnnnnnnnnnnnnnnnnnnnnnnnnnnnnnnnnnnnnnnnnnnnnnnnnnnnnnnnnnnnnnnnnnnnnnnnnnnnnnnnnnnnnnnnnnnnnnnnnnnnnnnnnnnnnnnnnnnnnnnnnnnnnnnnnnnnnnnnnnnnnnnnnnnnnnnnnnnnnnnnnnnnnnnnnnnnnnnnnnnnnnnnnnnnnnnnnnnnnnnnnnnnnnnnnnnnnnnnnnnnnnnnnnnnnnnnnnnnnnnnnnnnnnnnnnnnnnnnnnnnnnnnnnnnnnnnnnnnnnnnnnnnnnnnnnnnnnnnnnnnnnnnnnnnnnnnnnnnnnnnnnnnnnnnnnnnnnnnnnnnnnnnnnnnnnnnnnnnnnnnnnnnnnnnnnnnnnnnnnnnnnnnnnnnnnnnnnnnnnnnnnnnnnnnnnnnnnnnnnnnnnnnnnnnnnnnnnnnnnnnnnnnnnnnnnnnnnnnnnnnnnnnnnnnnnnnnnnnnnnnnnnnnnnnnnnnnnnnnnnnnnnnnnnnnnnnnnnnnnnnnnnnnnnnnnnnnnnnnnnnnnnnnnnnnnnnnnnnnnnnnnnnnnnnnnnnnnnnnnnnnnnnnnnnnnnnnnnnnnnnnnnnnnnnnnnnnnnntatgtgtgtctctgcacgtgagatgggtttcctgaatacaacacactgatgggctcttgactctttatccaacttgccagtgctgtgtcttttaattggagaatttagtccatttacatttaaagttaatagtgttatgtgtgaatttgatcctgtcattatgatgttagctggtgattttgctcgttagttgatgcagtttcttcctagtctcgagggtctttacattttggcatgattttgcagcggctggtaccggttgttcctttccatgtttagcgcttccttcaggagctcttttagggcaggcctggtggtgacaaaatctctcagcatttgcttgtctgtaaagtattttatttctccttcacttatgaagcttagtttggctggatatgaaattctgggttgaaaattcttttctttaagaatgttgaatattggcccccactctcttctggcttgtagggtttctgccgagagatccgctgttagtctgatgggcttccctttgwgggtaaccygacctttctctctggctgcccttaacattttttccttcatttcwactttggygaatctgacaattatgtgtcttggagttgctcttctcgaggagtatctttgtggcgttctctgtatttcctgaatctgaaygttgggctgccttgctagattggggaagttctcctggatratatcctgcagagtgttttccaacttggttccattctccccatcactttcagagtgacaccaatgagacgtagatttggtcytttcacatagtcccatatttcttggaggctttgcttgtttctttttattcttttttctctaaacttcccttctcgcttcatttcattcayttcatcttccatygctgatascctttcttccagttgatcgcatcggccaccatgcccggctattttttttaattttttaattttttaattttttgagacaatgtctcactctgtcactcatgctggagtgcagtggtgcgatctcagctcactgcaacctccacctcctgggttcaagtgattctcctgtgtcaacctccagatagctgggatacaggcgtgcatcatcacacccagctaatttttgtttgtttgtttgtttgttttttagtaatgatggggtttcaccatgttggccaggttggtctcgagcgcctgacctcaggtgatctgcccacctcggcctcccaaagtgctgggattacaggcgtgagccaccgtgcccgggcgcctggctaatttttgtatttatttgtagaagtgaggtttcatcatgtcacctagggtggtctcgagctcctggattacaggcattagccactgtactttttataaaggcatttacagctactccctccctacttccctgattgctttagctacatcccataaattttcataggttgtattttgttttcatttatatctaaatattttaaaatttcctttgagatttcttctttgacgtattttttatttaggagtaggttgtttaatttctacatacttrtgaatttctctaatttctttatgctattaatttctaattccattctattttggtcagagaacatactttgcatgattttagtccttgtatatttattgaaacttgttatatggtgtggagaatgttccatatccactttagaagaatatgttttctgctgttgttggatggagtgagtgttctgtagatatctgttagatctaattgatttatagttttgtttaagctttctattttcttgtttatcttttgtttattttttatctctgttactggatgttgtgtattgatatatattacagttgaattctacatttctcccttaagttctgccattttttgctttgtgtattttgtggctttgttgttagatgcatgtgtgtttataattgtttcattttctagatggattgagcctatcattgttataaaatattatcctttgtctttagtaacactttttgccttgaattctattttgtctgctattagtttggctactccagctctcttttgttactgtttgcatgacacctgcacatgcatacacacacaggcacacacacacatacaattaaatactattaaatagtaatataatgtggcagctctggaaatcatcttgcctcccttcatttccaaggtttgctgttattgctgtttgttctttctgctgttcattttctgacttttttgaactaagtcttttgagtctatgctgtgatctgaatgtctgtgttccctctaagttcgtaggttgaaactctaacccccaaattatagtttaggaaggcagttaagtcaagggtagagccctcatgaacgggattagtgcccttataaaaagaagcatgagaaagaaacctcacccctttcaccatgtgagaacatagtaaaaaggtgccattcatgaggaagtgggccttcatcagatattgattctgctagtttcttgatcttggactttccactctccaaaactgtgagaaataaacgttataagctacccaatttatagtattttgttatagcaactcaaacaaacagagacagtttgtattctttgttatttgaagctactgaaatctctgcttggctagcttagtggtcacctaatgaataaacagagatttccttaaatatttgaaaacagtaagtctcttagcgtttgttaagaggctctgtgtcgactaatacctttaatgcttaggcatgcactttacaactctgccatagccttcacttcctgctgttgcagagcttcagggtcagccagaagtaagagtgtaagacccttcttaagtctttcttgggcatgtgcacagccctatgcatgagtgtgaccatctttatccccaggaatgtgtcagaccttttcacagccctttatagatgcctcattctccagcttttccttttaatgtttttggtcagttcttgttgaccagtactttagctcactgttatcaccatctcagatagctgccatgttaaataaatactgctgaatgtttttgatgaacacccctggggctataaggctgtttgcagtgaacaaggtttgatgaaggtcaaattaagcaaacccggtaaatgggggttttcagggaactgctggataggtcaaataatgacatttctcctgtgatgctgtttttagggtgctgtaaacctgttctkgccactccagtgactgctaggccactggttttcaccacgattacaatgctgttgattttaaggctggagagagagatagagctggaaagggggatgtgggaatatggaaagtaaactttgtaagtaaaactttacaaagttcagtgtccttgttgatatktagccatttttcttgagtaattgcatctcagattgttaaaagcctgtggttaatttccagagttacactaaatttgattttgacagttttgtccagtgttgttgttacttatatgaagtagtagcttttcagaggaggyctctactttgcgagtcccactgatgtgactctcaagtcttttcacttttattgcttgagttggagataaaagaagacagtgtcctgcagaaaagctacaagctttcctgggaaaataacagaaagagtgaaaggaagatagaatttgaaaataaggtcgggtgcgtggctcatacctgtaatcccagtactttgggaggtccagtactttgggtggattgattgagtccaggagttccagactagcctgggcaacacagcaaaaccccatctgtacaaaaawtacaaaaattagctgggcgtggtggcatgtgcctgtagtcccactactagggaggctgaggtgagataatcacttgagcccaggaggttgagggtgcagtgagctgtgatcgcgccactgcactccagcctgggaaacagaacaagacactatctcaaaaaaagaaagaaaaagaaaagaagcatatagtagtcagtaattgtgtgggcaaattattcctaagattagtagtgttgggtagcctgacattcgtattagggcaggtcaaaaatgaaatggtcaactctgttgataataggaaaagaggaaaataaatttcttagcttcttatacaatatcctgttctgctttcagcccttcatctttcctcagtcttgctctgtcatagttctctgtcttacctatgccttgcattgtacttcatccattttccagggcccgtcttgaatgctgtgaattttttgtcttctcactctagaagaattagccttgcccttctctgttctcccgaggcagtctgctcacttgccataatgtacctaatttacttaaatatgactctgtctctctgatgggtagcaaagttctcatcaagagcaaggactgggtgttacttttctgtttctaggtgctaactcagtacatggcatccagacccaaataaagtgatcatggaatattcaccaagatagaccatatcttgagtcatcaaacaaacttcagctcatgtgaaaatgaagtcatatagggtatgttttctgaccatatggaactacaaactagaaatccataacaggacaatagtaaaatatctagacacttggaaattaaacaacacacttataaataattcactggttaaagaggaaatcttaaaggaaatttttaaaaaatatgtagaactgaatgaaaatgaaagcacaacatattaaaatatgtgagatgtcgctaaagcagtaccgaggaaaatttatagctccaagtgcttacattaaaaagaaaaaagatctcagcagtgagctatgtttttaccttaggaatttagataaagaagagcaaggctgggcatggtggcttatgcctgtaatcccagcactttggaaggcctaggcgggtggatcacttgaggccaggagttagagacctgcctgaccaacatggtgaaacctygtctctactaaaaaaataaaaacaaaaaaccccaaaattagctgagtgtggtggcttgtgccagtagtcccagctactcaggagggtaaagcaggagaattgcttgaacctgggaggtagaggttgcagtgagccaagattgtgccactgcactccagtctgggcaacagagtgagacttcgtctcaaaaaaaaaaaaaaaagcacgatatgcccaaagtaagcaggaaggaagaaaatataaagataagcacttaagtcaataaaattggaaattggaaaacggtagagaaaattggtgaaacaaaaagctggttctttttttttaaaactttgacttaatttttaaaagagacaggatctcactatgttgcccaggctgttcttgaactcctggactcaagcagtccacctgcctcagcctcccaaagtgctgggattataggcgtgagccaccattcccagccaaaagcttgttcttgaaaaaaattaataaaactgataagcctttagcgagattgatggataaacggaagacacacatcacattagaagtgatatgggacatcactacagatactgcagccatttaaaggataataaggaacatacaaatggtttttcaagaagttaataattcaacatcttagaagagatgagtcaaagactacgaactttcatcattcaaccatgtcacatagacaatctgaatagtcacaaaactattaaaaatattgaattcataatttaaaagctcacagaaaggaaatcttcaagcccagatggtttcactggagaattctagaaaacatttaaagaagaattaacagcaatttttacacaatctttgcttgaaaatacaataggagagaacatttcccatctgattttatgaagcctgatacccaaaccagacagagatcatatcacaaagaaaactgtggaccaatatccctcctgagctcagatgcagaagtattcagcaaaattttagctaatcaaatccagcaatgtataaaaagaattctattgctattacagaagtgtctaaaaaaaagtgttctaaactatgacctagtatgatttattccaggcattcaagactggttcaacattcaaaaccaattaatgtatcrtgtgtacaaattaatttaaagtggatcgtagacctgaatgtaagggctaaaactagaaatctcttaggagaaaacaaaagagtaaaccttagtgaccttggattggccaaggaagaagtgacaaaataaaaaaatagacaaattggacttcatcaaaattaaaaattttgtgctttgaaggacaccatcaagaaagtgaaagcataaccctcatgggaaaaattgttttgcaaattatgtaggttaatatatctagaatacataaagaactcctacaacttaacaataaaaaagacaattttaaaatgggcaagaattttaagacacacaaatggtcactaagcatataaaaaaaagctcagcatcattgatcattacaaaaatgcaaatcaaaaccacaatgagataccactgtacattcactaggatggctgtaatttaaaaaaatacagataacaagtgttggtgaggatgtagtgaaattggaaccctcttatactgctggtgagaatgtaaaatggtgcagccattttggaaaatagtttggcagctcctcaaagggttaaacatagagttaccatatgacctagcaattttactcctggagaattgaaaacatagccacacaaaaacttgtacatgaattattattattattttttaaggtggagtcttgctctgtcatcaggctggagtgcagtggtgcgatctcggctcactgcaacctccgcctcccaggttcaagcgattctcctgcctcagcctcccaagtagctgggactacaggtgcgcgccaccatgcccagctattttttgtatttttagtagagacagggtttcaccatgttggccaggatggtctcgatctcttgacctcgtgatctgcccacctcggcctcccaaagtgctaggattacaggcgtgagccactgtgcctgaatgtttatatcagcattatttaaaaaatggaaacaggccaggcttagtggctaaagtgaggcagagggaggaggattgcttgaggccaggagatcgagaccagcctgggcaacataataagatcctttctttatttttaaaaaggcccagcactttggaaggctgaggcaggcggatcacttcaggtcaggagttggagaccagcctggccaacatggtgaaactccgtctctaccaaaaatacaaaaacaattacctgggtctggtggtgtgcgcctgtaatcccagctactgtggaagctgaggtgggagaatcacttgaacctgggaggcggaggttgcaatgagctgagatcgcgccatagccctccggcctgggcgacagagcaagactctgtctcaaaaaaaagtggagggggagggagrgaaacaacccaatcaactgttgaatgtataaacaaagtgtttcccctctgtgcagagaagggaaaacatggaatgattgccatgggtatggagtttcttttcttgggtaatgaaaatattctaaaattaggtagggataatgattatacaactctgtacatattctaaaaacttgtgaattgtatgctataaaatgataaattttatgtaacttttttctcaataacagaacagaatagagaatccagaattagatccacacaaatatgcctgactgatttttaacagaggagcaaacgcagttcaatgtaggaaggatagcctttcataaaatggcattagaggaatttgccatacataggcaaataaatgaacttcgatctaaacctcatgccttatgcaaaagttaactcaaaatgggtcatgggcttaagtataaaatgtaaaagtataaaacttaatagaaatgagcatagaagagtacttacaggatgtaggactagagaaagagttcttagactttgacatagtacagtccacagaagaagaggttggtaaattggatctcatcagaattaaaaactttctgtctatgaaagatgctgttaagaaaagaaaaagatgagctgcagaaaattctttctgcagctgggagaaaatatttgtaaaccacatatccaacaagagactagtatctagagtacgtaaagaacctttaaaaccaaagcaatccaattagaaaatggacagaagacatacactgaagaggatatacaaatggaaaacaagcaaattaaaaaatgtttaacatcacgacccattcgagaatgcaaattaaattcacaatatcaatacacatcaatcagaacatctaaagtaaaataatgaaaaggccaaattggcaagaagttctaagcaataccaagtgctggcgagggtgcagagaaagtggatcactcaaacgttgccggtggaaatgtaaaatggcacaaccactctggaaacactttggcagtttcttaaaaaactaaacacaacccggtaattgcactcctgggcatttatcccagaaaaatgaaaacctacattctcaaaaaaacctgtacatgaatttctatagcagttttacatagaatagcccaaatactagaaacagcccagatgtccttcagcagatgaatggttaagcaaattgtggtacatccatattactgaatggtacttggcaacaaaagagtgaactgttgatatgcgcaacagcttggatggatcttcagtctcaagggttacatatgtactgtatgattctatttaatctttttgaaagtacaattttaaaaagtcagctgagtttaagattcagaaaaggcaaattttagaaccatagaacagattcgtagttgccaagattgagggaggcaggacaggaagaaattgggtgcaattgagggatccttgagacaatagtagtgttcattatcttgattgagtggtatttacatgaacctacatatgtaataaaattgtatagaacttatacacccaaatgagtatgagtaagtgagaaatctaaataagattggtgcatggtatcagtgtcaatatcctggttttgatattgtactacagttttgtatgattttaccattggtaactgggtaaagggcacacaacatctttattatttcttatacttgcattttaatctacaattatcgcaacataaaagattctaaaaaatttaaaaggaaccagattaataaagatgggaaagtaatataatgtgaggcacttggaaactttggagcaggtgaagtttgaactcggctttgaaggaggaataggattttagtatgcttttgtcttaatttttaaaaaggggctgagcacggtggctcaacgcctgtaatctcaaaactttgggagactgagacaggaagattgcttgaatgcaggagttcgagaccagcctgggcaacatgatgagaccctcatctttacaaaaaattaaaaataaaattagccagatgtggtggtgcatgcctgtggttcccagctactcaggaggctgagatgggaggatcacctgagcccagaaggtcaaggctgcagtgagctttgatcatgccactgcattccagcctgggcaacagagtgagaccctgtctcaaaataggaaaagagaaagcagttaacatggttacctcatgctccgagaaaacctctcagttgggggatatgcctacgtggtccttgaattgcgtcagtaactatagaccaaggtgaaattcagaagactgagattttgctttaaagaacatgaacgacacaatttttggattgggaaagatgagtaaaatttggatattttgtgcttaggttctcaaaaggagatgagatgagagagagagaaagaagagagagagaggaagagaggaaggaaggaaggaagaaaggaagaaagaaagagaaagaaagagagaaagaaagaaggcaggcctggcattcagggaagaagtctagattacagatacctgtttaggtgcctgaaggtagtagttacaggcaccaaagtgaatgagtatacatagggtgagcatataatctgatgagggaagaggaccaaggatagactgtgaagagctccagaatgtaaagggtggaaggaaatttcttaggaaaaggtggtgttgggggcacagaaaggcagatattagaagagttaaagaaaagacaaaggcaaagttggtgacaagttccaaacaagggtgagttaccctgtgctctgctgcagtgaggtcagctgggacaaagctagaacagaagtcactgtgtttagccatgaagctcttttctttgtcctttggatatctcaagagtcatgtcagtgcagtgagtggagcgaaagccagattatagtcaactgaggaggtgaaaaagtggggatcctaaacgtaaacatctcttttaaggaggtttgctttgcagaggaagtgagagggagcttgaaagaagcagggtcctgaagatatttgtgcaaattggagagatttgagcttgctggcaagtggtgggtgaggagccagtgggcgacatacacatttttggactcctttttggaaattgccttcagagcctgaggcacattttcaacaatgggaaatcttcatctttcgagggtggatttaatttttggaagcagccaagttaattcagagccaagggtggtaaatcaggtgggtgatcaagctggataacacaacttcaaaaaaaattataattataaagtagtaacactgattttcttgtgaagctcatgaattggcttagaaagtaatccttaaaaaatcacaagaaccatttgagcagttgtagcattctctgaatagtaggtgtatggatttgtaactttgaggacactcatttgtgtggaagttctattatatatgaagaaattggcctagttacattgtgtttactcctagtgctcaaatgtaaagttgccatgtagtctttttgcctgagaggtgacttagtggagttataagtttatatatgggagaatcaagagtttcaaattgtgattgtttaaacagttctgtggtcttacagatgtaattagaattcctaggataggagtgttcccacaagcataacagtactttaaatgtgtgttcagttatccctttctatagtcatatttcatcgtttctttttgaaatagagttattttgaaaatattaagtcgctactctaatcttgaatgtctgtcagacctgagacagagctgggcacatagtaggcactcaccgaacatccctctcctgtcttctctaccctagtgtttgttatataccaggggtcacactaagagaaaaatcagttcatagctagtagatcatcttccatggtgtttggccaaaaatatccagcataaagaaaacaaatgtgtacagaagtttgatgtttttacttatctttttgttaatggggtatatatttatataccaaaagatatttttgaaggcttatgttatacctttatatacatacttatcatctcctttaatcattgaaataaccttgtgaaacttgtccttatttttcagataaagaaactgtggctctgagtagtaatctcttgcctgaggtcacatgactgagggggaagaactgggacttgatttcaggtctgcagttttggaatctctaactcacggtcctcatatgtctccaccttcttaaacctatgcccttaattttaaaaaaaagttgattaaaaaaataaatcagaagcacttcatacttcccccttcctcatactgagaaaatagaagttagagcctgtcttctttaagctcctactggctaaaagacttgatagcattgtactttatgtcattctaattaccaaagcaatagtttttaaacttctagaaagtcgcggcaccctccctctgcctccccacacctggagctctctgagctcccccaggggacagtgtggaagtggtgactgtaatgtcctgtcgtasctttcgataatgataaagtgttagagaaagccaggacgagttagccattctaggaaactttccacagctgttgcattaattaagacttttttggtcccaagtaacagaaaccactggaactcacttaagcagaaaggggaatttgttttaaggatgctgtggtgtctcccagaatccaagggcagggaaccagggactgcagtgaggcaagaaacccagaaagacttctttcttcctctctgcctctcctacttcacacactggcttccttcctcccctttactcagactagctcctttgcttcctcctccttagtgggatggctgctatctacagctaccacggtgctctccgggcccatccaaccaaagggagactgatttctctttcctccctgcacactccttccttgtttcccatcctttgtcccaatttccaaattctaggcaaggatcagattattccgttttgactttacatgctagtttgggtgagtgaatgtaaggacagacaacctaatgtgactagcacagttgcattcacttctacctttgggagttttaaatgctgctatcacaggagtgaaatacaagaacacaggttttagaggcaaattctgccacttactaggtatataatcttgggcaagttttagctcctgtgagccctactttctttaataaaagggatatacagataatgtctttctcatgaggttgtggcagagtttaatgtaataacaggtatagtgcttagcacagggtctagcatacattatgcttgataaaatattgcccctttatttctgatgattattaaggcacattgccttaacaaaaagatgtttaagtcatatgaggagtaaaaattttaaactgccttttggttcaaatttctgcttcctcttgcctcttttatgtccccatttcatctatcattgggtattaatatattcataatccaaaggactttggttctaagaaaccccaaaattctctaggaaatagttggaggtcccaaggtatcacccaaagtagtttcacaaataatgttggtacatagactattaggtgaaaaacattcatggctctactagcctttttttccagtgattggagttggaagaccccaattaaagattcaattcacggcgaggcccagcagtttgggaggccaaggcaggcggatcacttgagaccaggagttgaagaccagcctggccaacacggcaaaaccctgtctctatttaaaaatacaaaaattagctgggcgtggtggtgctcgcctgtagtcccagctacttgggaggctgaggcatgagaattgcttgaacctgggaagcagaggttgcagtgagccgggatcgtaccactgaactccagcctgggtgacagagtaagactctgtctcaaaagaaaaagaaaaagaaaaaagattcaatttagtaaatatttgttatctctactatatatatcttagtatatattaataggaatgtatcttgcaaatattaatgtatatagatatatatgctgcttctatgtgtgtgtatatacatgctaatatttgcaagatactgaaatagatattgttggaattaaaaatatgtataatatatatttacataaataattaagagaaacagtcctttcctttaaaaagagtaaagtctagaagaaaatactgtgaatctacaaaaatcatgaattcagggtgttttggcagaactggtttaccaaggtcccatgttaatgaagctaagtcacattaagtaagaatggagaaatagtttgaagccaaatcatggaggatactggatgccaagctgaggattatagttcaaagatagctagaagccagtgaaggtttttgagaaggagagtataaygtaattgtacgttctaagaattgactttgtcctaatagccaagtggtaaaggacttgaaaggcaggaaagaaagagaggagackggagtccatttgaagagagctgctttagtaggaatggaaagtgggctttatgaatttagcgccagtccagggcttggtaaggactgggctgtgggagttgggctgaggtagagagtgtgtgctgggtgacccgcaacctggaagcacaggaggaggtgtaggttgcatgaggggtcacttgggactcctctcctgaagttggtgggagtagagaagtagcactccattcttcactatgttccaattcttgatttggaaactctctgaaacaaacagttattatgagcatatttttgacctagaatctaagtatttaatattaaaatcagccaggaagtcattttcagcctgctatttaaaaacaaaacaaaaaactatagaacaagctctgaatgatacaacagagttttggcccaaaatgagtacttaaaagacatataattctaagcttggctttctccattaatgaaaagaaggacattcatactttcttctgttaaaaattacaaagtcatactcaatttaataatagaatccccgattatcctgaaatacagctgaaatttgttttgttttgtttttgagacactgtaacagcccaatgggttcttcttgcccattgcccagatagagccaattagtcaagacaggggaattacaatagagaaagagtttaatacatgtggagctggctaaaacaggtagagttttattatttctcaaatcagcctccctgaaaattcagaggctagggtttttaaaagatagtttggtgggcaggggctagggaatggggaatgctggttggttgggttggggatgaaatcatagggagttgaagctgtcctcttgtcttgagtcagttcctggggtggggtgcggtggggtggggtggggtaggggtggtgggtgggggtgccacaagaccaggtgagccagtttacagttctttttattttaaatagagatggtgtcttgctgtgttgcctaggctggtctggaattcctgggctcaagctgttctcctgcatcagcctcccaaagtgctaggattacagggatgaacccccactccctgccttgagcatgagccttaggtttgataataataatgttatccataggagcaattgagaggtggggaatcttgtggctcctggctgcatatctcttaaaccattattttaaatcttgctaatttattagttttatgaaggcagtctagtccccaggcaaggggggagtttgttttggggagaggcttttatcatctttgttttaaagttaaagtatgaattaaattcctcctaaagttagttcagcctatgcccaggaatgaacaagggcagcttggaggttaaaggcaagatggaatctgttaggtcagattcttttattgtcaaacttttctcactattagaatttttataattataaattttatactattatacagggtcttgctctgtcacccaggttggagtgcagtggtgcagtcatagctcactacaaccttgaactcctgggctcaagtgatcctccctccttggcctccaagcactgggattacaggcgtgaaccaatgtgcctggcctggtattttaaacatatattcatgttattattctttattttcagcagcaaatttatttaattgtttgtatggatcttgtacacaagtcacttatctctctaaactgagactctagtaaataatctcaatattttataaaacggtgccaggcctgttaaggcctattatgcatcatttatgatgcttcaacaatagtatctttccacatcatcatcttaataaaaaacattcattttgagaatacattttccaggcagttcctttgcctccagggggaatattttgaggccwmccagtgaccataggattaaaagacttgacaggaaagccctagaattcttgaagagcaaggcttttgaaagattcattgttgtggactctccctttgaaagagaccactttatcttgctcctaaacatctataggacagacatagcattttctgaaaagaaattctgggtaatgtagaagaacaaatgtaggtaggtaatctagtatgggtagtgtgtaatgtgaagaatgatagttccatttttatggttgccataacaatcatacagttgtgcaaaaaatgtgtatagcttttatagaagggagctggcaccattgtaatgcttcttctcatatcagaacaactgttttcagatctgaaaaataggggtggcttaacccttccccagttagctcagcatgttccctgagaagtctctttggagctccagggctgttgaaatgcattcaccacttgcatttgcattttagcctgataaatggattgagaattaaggatgatgatcytttcaacagcaggttctgaattcctaacttgggaattcaaaggatgagaaaagaaatacattgttcctcaaatagaaatctaggagagatgtctagacatagtaaattccttgactttgtgactcttcttaattctgtccactagaatttaaatccattaaatgctgtcatttaccccactgtgcttagtctcagataaagtcatattaaaatttggttacaatttctgttttatttttacatattaactatgtcacttctggaaatcaagaagcaaattttaagcgtagtatatttaagtgaaaatatattcacatatattctttctttcactatcgttttcctatttttatatatcctttcctaaggaaagtacttggtacttgactttctcagtcatactaaggagtatctactgtgaagaaactatatcagaactctggatggagattttcaggttgaggatgggaagttttcaggtttggatggggtacctaaaatgaagtcattgtcaacctagtcaaccacagagaaactttttcttgtagagatttgggataagttattacttttgccaaaatacatccagagtttttaaatcttaagataaagtctggaattctggctgggcgcggtggctcaagcctgtaattccagcactttgggaggctgaggcaggcagattatgaggtcatgagattgagaccatcctggccaacatggtgaaaccccgtctctacaaaaatataaaaattagctaggtgtggtggcacgtgctcctagctacttggcaggctgaggcaggagaatcacttgaacccgggaggggaggcggaggttgcagtgagcggagaccgcaccactgcactccagcctgggcgacagagtgagactccatctcattaaaaaaaaaaaaaagaaaagtctggaattaagggtagaagtaggggagatttcaactctcattgaaatagaacttggtctaattgacttgtttggtgaattcctgtccctttgagtcatagctctgcagttctgtgaccttgggcttctttgaccttgagcaagttacttaatccgtctgggcctcagtttccccacccacaaagtgagagtaaaaataacacccaccattgttataattctatccccttaagggccatctctaggaaatagagaaaaaaaagtgtttttaatgagaataagatttctcgtatgttgaagacctctcctatgtttataaaatctgagaagattttatagattgtatagaactttttatactttaactcttaacactttatatttaggggcttaggtatttgatccttctgtggtattatttcctggaagcttacagcccctttgttttgtttgattttaaaacttaatttgtattaattagtattctcataggctgttttaaagtaactgcaatctgatattttaaatctggattataggtaaactactaccagagataaaagaagaaagagatgttcagagagagcttcggatagagagactttctggcctggtgggactcggctgccctcattgcacccttaggcatggaaagctgcattctgaacaccagcaagcctagctataaatcttcttggacaggaaataaaagagtcagagaccaagccatctctgccctgcatacaaactctcttggttgagttgtgcccagtagttcagtgctttcaggtaaactaacttcgtggattctgggcctttgcccaagttcttcttccccagatagcccacgcgttacttctacacctcctttgagtcgtsttcacatgctatcttctcagtgaagcctaccctgtatatcctattcataattgtaatcagtactttcagtgccccttactgyattctaatgtttcttttttttcctccatagcaatgaatttcagcactgtttattttctgtctcctccccgtggaaatctttgtctgttctcaaatgtgtcccaaaccccgaaagcagtagatagccactaaatatttgttgggtgtagcatttcttgtctttctcttgacctctgatatcttcttcacattgatgttctactggttcctacaacttggacttgttcttgacactaagtaagtgaaattttatgaaaaaggctacaattattcacagttataaacagtttagaaaagaaaggaatgggcatatttcttgaaaaaagtcatgtttgaagagctgtatggtatcagagggagtcagctaattctttgtggccatgaagggcctgaattttgaagtttctcggagtcagatttcagttcagtgtgtaaaggtgattcctaacaggtagagctatctaattattgcctaatgatgcagtgaactcttcctctcacctccccatcccagctttcaagatgtgggtttatctgtgtgcttggtttttgtttggggacattcagaggataagatttggagtagggtaaccttccaatttgattattctgtgattctggtccctgaactgatacagagtgatttccaggatttattattaagtgcaaaaagcaaaatgaaaagagaagtaatagtatttgattatttgtgtaagaaagaagagaaaatgagaaaaatgtatctatctatatatgtatgaaaaaggaaaacaaacacagaaagggtaaaccagaaaatgatgaaaataattatttataggggagaggtaagagctgggggaatgatagagatgggaatgagacttcttttgagtatgctaacttttgaaccatttaaagttttaaatattcagtaatataatctaaaaggtggtaaaagcaaaatttctaaaattgaaatcaagcaaaaacaaatgggcctaatgtttttcaaatgtatagcatcagcacctacagaaaaaagaattcaagtaacttttaagcactcgaactatatacccatagtgagtatattctaaggataaaccaccaaagaaatcaaacttaataggtttgttgttgtgagtggtgttggcattgtaattctgaaacagttttgaatatcaaggccattgggaactggaaaaagaaagatataaatatggaatgggggagataagaactttatggtattagatttcagttggggatgtcaatatgaactcatgatttttaaacagcatttaggttgaaccacatgaaattgccagtttttaggccacaaatagtcaaatattaacaatttcatgtgattcaacccaacattttctaactctgctagctgaaagggcctggaggcaatgagcatatcttatgccccatcctggtttctaaatgccattcccaccagaaggaatttgggctccttagggaagtcggtaattataaacctggggcagggattgtacagcttgtgagacttgccacagggatatagaggctcacttgaaagggctcccaccagcctaatttgggaaaatttatgtatcaaaaagaatagtagtggtagtcgtggtaatggattataacacagtgaatttttttaaaaaatcaatgaatttgtaatgacactaaaaaaaaaaattgggggcaggaaaaaacttcttttaatagaagatagccagcaaatgtaggagatattataggattagcaaacattttataatttacaaggctatgattcattcaggcaaaagtcaagtcatctagatgctgaaaccattgaccaaaaggttttttttttttttttttttttgagatggagtcttgtctgttgaccaggctggagtgcagtggcacgatctcaactcactgcaaactccgcctcctgggttcaagcaattctcctggctcagcttcccgagtagctgggattacaggtgccgaccaccacgcctggctatttttagaagagacggagtttcaccatgttggccaggctggcctcgaacttctgacctcaggtgatctgcccgcctcggcctcccaaagtgctgggattacaggcgtgagccaccgtgcctggccccaaaagggtttttgagagcaggatattcacatgatctctaagtctcattctgtaggtttcttattatttacaaagggtaaaaggtagccttaacatacacagttctagctattagcaccttaaccaagtaatccaacctggcagcctaacattttgtgccttctgaaggtatgcacatcatcacctgtgaaaatttgaggccagaatgttcaccatgaatctagtcaagcctttttacccaactttccatttataggaaatacagaggagatgaattttgtcacatttgatttatttctgtctatccctttcttcctccttctgtgaggaaacaatctaataaatccagaacataagacgctttacaagacaactgacctggactcttcagaataaaaaagcaacgttatatttgaaaaacaaaagatagttgagcaagaaacaggctaaagagacataactaccaaatacattgtggaaactttgattagatcctggatcaggaggaaaactaaaagcaaaagagactttttaggaacagtcaaagacatttaaacgtggtctatgaattgggtgatatgaaagtattaatcttgactgtggtgttagtgttgtggttctatggaagaatgcccttagttttggacaatgcatgttaaagtatggagagggaaagtatcaccatctctgtgacatacttcttggtaattcagatgtcaaaaataaacacacaaaacaaccagctagacacaggaagggagggatggaaggaggaaaaaagataaagccaatatggaaaaatgttgaaatttgatgaatcttgatgaagggtatatggatgttcattttactattctttcaactttcctgaaagtttaacattcttcaaatgaaaattaaggggaagaaaatgaatttgaacatattttctgggtttaaaccatggctttcctggcccatcccttgatctctggctcccacagtcccagacccgtcctgtcctttgtcctctgcttcaggatgttgtttttttaaagtataaaaagaggcgtgatggctcacgcctgtaatcccagcactttgggaggccgaggtgggtggatcacgaggtcaagagattgagaccatcctggccaacatggtgaaaccccatctcyactaaaaatgcaaaaattagctgagtgtggtggcacgcacctgtagtcccagctacttgggaggctgtggcaggagaaccgcttgaacctgggaggcggaggttgcagtgagcagagattgcgccactgcactccagcctggcgacagagcaagactccatctcaaaaacaaacaaacagaaaaaaaacatagaacgatgagaggttcattgaaccggtgagtagaaccaatgagtaaagggatgtaacatggcagaacatttcagtttgtttggattaagtttcatcactatcctttaaaaaataacagaacttaataaacacattcacttggtgtagaattctgctaacgcttgagttgacctttctgaggacccgaggttagaaacacctgctccagtgaaaagggcctgcccacagtgctgcatcatttctttctrctggccatatggcctcattaagtgtcactttaccactgagtgtggtgaggctggggaagtggaggcaaatggaccaaggtcactttctgctctaaatagaccatagacttttcctgttgtgaaaaatttgtgttttgtgtctgcttcttagcatcttttgtgtgagtagaagtgcgtgaaacagtattatgatattggcaactaccrtcgaaaaaaagaaaaggcgcagccccactgagcaaggggacagacctaggtttgaatgatgatcccagctctgtgaaatggaggcttagatgaattcagcatctgattgtactggaatgtcacagcacccatctggctgggctctctgcaatggtacaattgggaacacatccctgtgggtgaatgatccagctcttcagttgtttttccttctacagtttacataaaatttgctgatttctatataaactgtgatgccatctaatctaagaaagtgttggactgaaagttttattctttatccacttaaggttatttcttaattttttttccattccttttcacccattcttcatcattgacccagatcctcctccccagaattgcttgctagcacggagacagacccagagtcacggacagaggagggcctctataaattttgctaatctggaagtggtccctgaaccacagtttgtaaaacactgttttatgagaaaagaagatgggatgaagacagaaaaggacacccttggaaacaataacactgtggtgtgaccacaggattgaatgccaggaagtcatgagttctaatcctaaatgtatttcccaagacacagtggcaaaattgagtggaaaagtgctccacaagagccctttggtcgttttttcattcatctgtccatcagctattcattacatatgtgccttcaatgtgctggaagggatataaagacagtccaatctcattaccagacctgatactggctcccagcctgtcacagcgataagacatgtccataagtggccaccaacatgccagagacagtggctgttgccatcagagagaggcaggttgcaggcatgggtagggcgcatgggggagagatagcttctattctttggggctgtgagggtttactggaaaaaagctggcattgcaggcaggcctttaactgcaaggtaggtcttagacattggagattggtagagttaagtagcccactataggaacagcacaaacaacatttcagaaagcagagggtgtagagaagaatttagcacacgagggacatagcgggagcatgcagtctaactggaaaagtacaggttggggctgggtcatgaagggctttaaatcctaagctgactttgtatttttctcggtaaggagttgatgaaggtttttgaccaatgcatgctttaagatgcttaatctggcagcatctgcgaccttggggagaacagtttctgtgatgtggtaggggccatgaccaaaatccagtgaggtgaataatgacaaagtggtgagtaaatgttgctgtggcgactagacagcttcttccagcttaaaggaggtagagatgttaataccttgaggaggctgagggtgcagggtcagaggaagagtgtaagtgacaaaggaacagaaattatttctaagcttttgttatttcytagggttcttggcgaggttttaagggattatagaagacttactcttcatgtgttcattcccagaccaatggctttgggtaaaacacaatcttagaagttttctgtctctttaaaaagttcttctaagcccttcagtcacgtgccttcagaaattttggttacataacattgctctgaattggaattctgcagcctcatgaactggagtctcattctttccctcccccacctggcactgtattttctgcgggtcagggttaacttctttctaaccattgttgtggaactctttaaatatttggtctcacaggttctaaaagctggcaggccaggctgctccctgcaggttgtgagaccaaagccttccagaaaaggagccagtaaaatcccaagcatgttaactgagtgtaacagctgcacagtgcaccgcctccatcaccctcaaccccaccgcacggggctgggctcccaagtgctgaggccagcagctcctagccactgcggcttgcaagcagaaggagccctcatgcagcacatcgtggcaggctcgtaattgcggtgatgacaacagattaaatcactggctctcagcactgaggactggggtttgtcagggtcactcaccgttcctttgcttctcccaattttccatagtgagagaggaagcttggagtctgctgctacagtagaaatactttctgagagccctctgagttttgctgtcragaggttcgttctcttagtagtctaggctgcatctttctgtcttccagcatcccctcaacacatgattctggaatgttgtaatctctcaatatacatatgtatttagttataccttgcttttatccaaaaatatttgaaggcagtttacatatatatatatatatatatataaaatgcagtgaattttttgttgttgtttgttttttgagacagggtcttgctctatcacccaggctagagtgcagtgtcgtgatctcagcttattgcaacttctgcctcccagactcaagcgattctcccacttctactactaactggaagtaatagtagactactcctacttctcaggagtagtctcctgagtagctgggactacatgctcatgccaccacaatggctaatttttgtatttgttgtagaaacagggtttcaccatgttgcccaggctggtcttgaactcctggactcaagcagtctgcccaccgcggcctcccaaagtgctggaattacagccatgagccaccgtgcccagcaagtgtttttttaaaaattaggaaatgaggtaaaaggaacacgtgagtaggaaaattaggcacagccaggataagggttagttcacaaagtgcaaactataaataaaatctcctagaggcaagttaggaaggttttctgagtttcctagcagccaaagcaaaaaggaaaactttttaaagtttatttattttattttgtacagcagacagttcatatagcataaaaagggaagccatcaaggataaaatttgtgtgtctgtaagatacagattgtcacaagtagagtgtttccttatactgcatcaacttcccccataagtgtactctataaaaggatactacatggtcaaatgggcccttgttctccctgcttccctacagtgatagcatagtcatttggttgacttcttgcagtgtcccttggggtaggcttggtggcaaagccccaagtaggacaagggcaccatgggaggcctgtgcagggcatttcagtgcagttcttcgcatctccaaaggtgctcccttgaggaatcttggttctgggagatgctgtcccacaaagaagtgccaggagcaaatgagttggtcaagaactgttgataccggcatattaaaggctcctcgaagtcctacagttaagaaatcagcccagtatttcccaaactgatttaatcataagatcttttttaaaaaaattaaaacacttaattggcacattcagaaacgttgatctaaaacaggggtcagcaaacttcctgtgaagggtcacataggaaatatttcaggcacaattaaaacagctgtctgtcacaactggtcaacactgccattgtatagaaaaagtgtggctgtgtacaataaagctttatttgtgcgtagtgcaatttgaatttccacaatcatttttgtgtcacaaaatagtattcttcttttgattttttattttttagtcatttaaacatgcaaaaactgttctcatcttgcaggtcactcacaaacaagtggcaggccagatttgaccagtgtagtatggtttgccaattcctgatcaggaataatgtttggatggcttatctttccagcaagcaagccttcctgagtactgtttgtcaggttccattttaatttagacttttatgtttctggtttaagagcagatttttaaaaagtgttaaaggtaatagagagttggtttgagtccttacaggctagtctaggatttttcttagaaagcagttgtgggggctcccaaagaagacatttacaaactaacaaagtcttacacggtcacatatggtgggatcaacttcaggctggaaatgtctaaatgggaattatcattcatgcactggatccatagaaatgaaagtctcaaagcamccagagacgtttaattttaagaaattaaaacttcctagtcaaccctccaagtaacctagtaaacgatggcttcccacctccaaccaagctaatggagttctttttgattttgactaggggaacatttttttggctttttatgatgtcattatgataaaagaagaagacccaaacattcctactaccatgtctgactttttagtttcagttataccagtattttttattgagtactcagtgtatataaaacatttggttagattttatgggagatatcaaaaggagaaagaagtggacacttccttctttaccttgtgagccaagttcaagatcctcatcaattacagcccattgctgtggtgccaggtctgatttcacctcctgggcacttcctattaccatcaatctgttcattcaacaaacatgtctgaggtgcagcctctgttcaaggctctgggaacacagccctcggagcacgcattccaggagatcagtgtttctcttctcctctggcactcttgcttacaacctcttttatatagtggaaccaaaattacttctgtatatcttgaggcttcaaccttcatgttgcctacactgtgtgtgactctcctcgaaatatttagagggagagtgggtctcctgattaatcaccctttctgggatctgcactctaaatgctctcgttccctccacctgaatggcacctacctttccctgccctattttcttagtgtccagtagggacacagtttttaccagatccataatcttaaagccattaactatattaagccaaatgcatcttgtaacaaatgttacaagatagctaaatatatgtacaaacaatatatttacaaacaaacaataatacatatctgatcaattgttttttgattaaggaagattctctatagttttgattttttccatttacaaaagtaatattcaattgcagtgaaaaattttaaaaatatgaaaaagtacacattaaagggaaaaaaattaatccataaatctagcacccgtcgatcaaccctatgaatatttaacatatatgttttactcttcttgatttgaaagtcacatgaattttttaaaaaaatagtaaacattaaaattgaccttcttttgctgtatgtaaaattctgtgaattttaagacatgcatagatttagttccactccccctgctgcccccgcacaagcgtacctttcccagttctggcaaccactgatctgctctctgtcttatctctgttttcattccgttccgttcctctcctcttcttctcctctcctcttcttatcccctctcctccccccacccttttttgtttttgtgtttgagaccaagtcttgctctgttgcccaggctggaatgcagtggcacaatcttggctcgctgcaaccgccacctcccgggttcaaacaattttcctgtctcagtctcctgagtagctgggactacaggcgtgtgccaccatgcccggctaatttttgtatttttagtagaaacggggtttcaccatgttgsccagtctggttttgaactcccgacctcaggtgatctgcccaccttggcctcccaaagtgctttgttttctttttgagagtggctcttttcacttagttcaatacctttgagattcatccaggctgttgcatttatgaataatttgttaatttttgttgctaaatactgttccattttgggggtataccacagtctggttatccatttaccatttaagattactttttgggttgggcatcgtagctcacacctgtaatcccagcactttgggaggccaagttgagaggatcccttgaagccaggagtttgagatcagcctggggaacagagtgagatcctgtttctacaaaaagttttaaaactactcccagtgtggtggcatgcacctatactgtcagctgcttgggagtctgaggtgggaggattatttgagctcaagaggttgaggctgcagtgagccatacaaaaaaaaaggttattattattttttaaacatttgacatttctgaaattctgaagtatcttaaaattaatgtatatatttaatgtggtggggtttttatttctccaaaagctattacagaattgatggcgcatcttataattaatactctcttaggatggaagtattgtggttaggattagagagggctgttgggagttactaggagtagggtaagtggacagttaagagtcggatagagaaaggtcccaagagcttgtggcaggccagcattagagcagcttggcagcctctgaagacagggtctcgctctattgtccaggctggagtgcagtggcccaattatagctcactgctgccaaggaggttttgaacagaggagcaacaccagggaagaagtctttaagaacaaagcctgtcttaccatggttagtacaagtatgggcaacatcatcagtgttgatgaatgaggaaaagacagagaaatggtggcagtgcactgctagtactggatgragtggaggaagaacctaggaagcagtgagcaccgactagagtgtggcatgggggcagaagggcagttgctgcagaataccccaatctccaggcagtcctcgggcaggaaaggctggaggtatggagagccaaggacagctgctgccaagatctttaggtgtttacatggtgggaatgggtggattgagtcaggcatgctatatgggaaactgtaaaacagaatgagaatgtctgggagtttcacagggtaagagtgtgatgttcgtaaggatattgtgcaaagataaatgggcacatggtgtacttggtatgagcttggttgaaatatataattattctgtggaaacaaactgtgatttgtgctgtttccaggtagacttctattatggttaactctacggcccaaagtttttttgcgaagcttattgttgggtcccatccccctgtatcacaagtcactggagaaggatattttaccaaagtgtaaattgaagagtaatttaccaaagtaacttgcccctcttgttggccaactcttcttgagaagcctcgttcatggaagcagcctgattttcacccactcacatctcttctggcttggggtgaaggagaagtaggtgccagttcacacagaggaagagaaagtcactcacccatttgtctcttctcagtctcacatttaactaaagatctcattctcgtagaagttatttttcactttccctaacagagcacatatgcaaaattcactgttctttaaagctgtactatggtggggtaaagttgctattatttgtggcattgctaattgtttcttcactctttcctagaaaagactgtatcttcaccattgacccatcaaccgcccgagacctcgatgatgccctctcctgcaagccactcgctgacggtaggatggaaatttctatagcatcttgggtagcaggcagtctgcatgcctgtgtggttagcctggctgccctgtgctgcctaggcagcatactgtgcaaggctaggtttgcttcgtgcctgaacttgccataggcctctgagcctttacaactatgtgaccttaagattgtgttcctgtggtgacattggtgagggtgagaatgagaaatgtcctcccactagactcttcttgggcttcagaaggggcaacagtgagtgctaaagaatgaattccaagccttggcccttcagatggttccagtgttggtgtaaggtatcacagaaagaaagcttgtaagggctctgcttgggagagacatagggttctttacctgaatttaacaccaaataacgtgattgaaggggtactcttcaaaggcatgcttctcggtgggtagcaggaacaccttccctgagaactgcctctctagggctgagctggagaagcttgggctactcccagtaggttttcatctatccagcaagttgagaaaggcaaactgataagggctctttaaacattcttttgggatgttactgagcaggtaaaagtgggattgaggctagttgtctttggaaattatagttggaggaagggaatgcagcaattgactctcaaagaaaaaatgtgtaggatatgagaaaagtgaacccttccaatccctcctcctcctccacctccccctctccccctcccttcccctcccctcctcttctcaacagagtcccactcttttgcccaggctggagtgtagtggcatgatcatagctcactgcagcctcaatcttccaagctcaggtgatcttcccacctcagcctctcaagtagctgagactacaggtgtgtgccaccaagcctggctaatattttgtatttgtggtagagatggggtttcaccatgttgtccaggctggtcttgaactcctgggctcaagtgatccatccacctcagcttcccaaagttctggcatcacaggcgtcaaccaccatgcccagcacccccaatcccttttctaatgccccagatgtgctgcttctagtttttacctacttcttgcccctctctagggtggcttctgggtgactgctttggctttggtcatcctcagagatggccttggcactaacatggcctttgacatttgcccaatgtggacatccacccttgcagtttcagtctgccaccaagcgttgatggcctagtggcctagtgttttaaaacattgcaaagatgttcatatttcccactgacacagaacgccrtaggttcagtatgtaatctcttctctactataatagatggggaagcttagtagatagaaggctgagagatagaagacattgcctaagactggttttatcttccttgaaactatgggcaagattgctcaatattttctttttaaaaattaattaattaatcgatttttagagacagagtatcactctgtcacacaggctggaatgcagtggctcattgcagccttgaactcccaagctcaagcagtcttcctgcctgggcctcccaaagcacgagccactatgggattacaagcacgagccactgtgcygagcctcaatattttcaactaaagaaaactgaaagaaacaagagaaaaggtcccctggaaattttagagaaattatatctttttaaaatccaaaattgaagcagcctacttcaaaaagcaagtactggcttgatttcttacattcttagcaatctctgttgcatgcagaggcttaggcatacctgctcggcatatagacaccacttccctgagccacagtgtggaaagtgcccctaggctgaaagccaggtgaccgtggacctcattcctcatatttgccttacctctaggttcacacctctactgtttgtgtaatgcttagacacaattgcttcatttgttttgtccattttcatagttgataatagcagacggatacatctactacctgttcctctgtctcagctggcctggaaccctgcaccttgcagggtctccagggagcaggcacatgtcctgccgtactcactgcatacactgtggttttatgtctagggcccaagtgtgtcagcagaggtttcataaaggaagtggtcaaagatatgataggaaagatagattggggacaaactcgggacaaattttcagaccaaatagtgttttttgtttgttggacaatggaaaggcaagcagatgttgttcagcaagagagcrttcaaaaagaggaaaataatttagcattgcaaggaaaaggagagaaactagaggctggggaatgagtcagagaaatattgcaatagttgtggacctggactagatggtagcaaaatcaatagggggggttggagtgggaaggacagatgtgagaaagggataatgacagaagaatctatggaaatgaatgttggggttgagggagaggagtccaagatggtgccaaggtttcaacctggatgactgggagatggaacccrtaagttagaaatgggaatcaggagtacaagctggtttgggagagagtatgttggcatggagttgtctgtctgatgttatttatgttagttgctgcaaattctttgtaggggagctgaggtgtgtataaacaagctaaatagatgcagtccgtggaactatatacaaagagcccgggaggagaggaagcaatgcaccaaaatgcagtgatttcattcgaatgatgggatcataagtgattttttttcctttctctagttcccaaatttttataatgtggcaataatagttgtataatgaaaaaattttgtaatacaaaaatattatgaggtgccagaaatcacaggccgctcagtagcctactgcaccaggtgatcagataccttccatccacttagtttttcttgcattcctgaggagcagtttggcagagcagcaggaaaaggacatggaaaaggagtcagggaagactctgaaacggcctgagttggtcaggcaaacagttttatggtggcacttctacagttggcctttgtgacaacagtttytgccagggccatttatccaaggagttgaaaagggaaagtcaattccagtttggattggggtgaggttggctaagttcaggttgaggtagttaccagttcatgtcaattcttgcttagggggaaaaatgttcaatgcttcaaaaaacaaatagtgttttctcggtctatttatatcatctgtagttttttttttttttttttttttttaagtgtaaagtttaactttcctttggtttcattaaaattatctgaatgaccattctgtgaaaagcagacaaatataacatacctagtccttactttcccttttggtagagttcagatgtactcccaggacttgttaccagtgtctgtcaggtgagacactccagtgatcaattcagcaaatcacagtgaccacctgtctaccaatagatcataattaggttgcaggcggaggagagggtgccacctatcttcatgaaatctcagcttggaagggattctactggtttccaacctggtaattctccacttttcttatcctaaaaacacacttcaggagaacactcccatgagcattacccagcaatgtagagtttttcacctttgttcaagaaaatatttagtaatgtaagtgaataggagtggcgttatagtgataacccagaatctggagacagtaaatcgtgtgcctcagtgttttattattgtacagatcacttgcagcatacctcacagctgacctcaacgctgaagtgtgggaatgccacagttgtcagatcactctctggttttcgaattacctccactgcatccacttatggaatgtccagactgcatttgaactttctaccttagaggcaattcattctgccttaagattgcttgactattaggaaatccttccctgtaatgatctgaaacagtgctctcttcctgtaattttccactcattagtcccatttatgcctctcgggcccctatagaacaaatctagtgtctcatttgacaacctatcagttactagataacagttatcatgtgtcttctgagtcaaaaattctcaacttagcatcctaaatattctttggtgtccagtgggttatgaggtgtgagcccatctcccatgtcatggagtcacttctgcttttatgaagtctgaagtacatggctacctgtatccagactgcgcctccctggctatcagggcctactctctccttgccagttcctccttattgggcaggactgggttcagagtaacagctacccattctsttcaattagtcaagcattgtggctttgccttagtctctgagggaaaattgtcagcctgacaagctaggacctttattcgcttttcgttgattcaggctcccagcagatcctgcaggaaattgaacttcacttctccagcatcttgtttctctaaagttgtattctctaacatgtactctgctgttgaacttacagggttaccctagcccggccttagaaatgaatgaatgggaatggggaatgatggttaatgggtttcagtttctttttgggtgacgaaaatgttctggaattagataattgatagttgcacaactttgtggacataccaaaaaccactaggggaaaaggagtgaatgaataaatgaatgagaagaaataaacatatccacttatccttgaggctttctggaaattggagtttacaccttaaccacagtttagcagaggtctttatggaatgcccagctggctatcatagtcacatccctcgtgtccatctctcctccttgctgctttcctctctgaaccatgaaactacagccccgggtgcacagccctctgctctgctgcccgctcacatttcccatccccacagagtgcagccctctgactcaaaaaaagaagggtctgtcccactatctgcatagaaaatatttggttaagttagaacagcatccagcctaaggggcctctggggtggacattacctactgtgctcaaggaagcaccagtcttcctgcctggattgtctctgcagcctgcctggttgcatgacattttttggggaggatggagcagacagctttgttcctgggagcccatagcaataagggaatagagtgaragtytaggagcagtgcctgtaaggatttcagagaattcctaataaactctctggctccccaaatggctgtgtttgtcacctgctgagaatttcctatattgactgatcacctttggaggcagtgaggaagtaggagccagaaattcttgtgtccccctgtgtgccaggctttggctagaaaacctgagggataggatggggtggtagttgttttaaagagcaaagggctgagatgaagtcactggacctgctactgggaagaaacgggacatgtgagagccctggggcttctgagtgaaaaggttcgtgcatgtctytagcagccaggccagaccctcttcctgggctcttttctcacctctgggaagactcttccccagcaatcattcaccccagcccctttacatttccctttgccctgcttcctcctcttgctgtaccacctgaagtctccctcatcctataaaaccttcctgtactctgctccagctctagaactttcacttgtgtctgtcaggacaccttggaagagttgtctttacttgctgttgctttctcacttcccgttgctttctcacttcccgtgtattccttatcccttttacagtgtggcttcagaatgctggctgcaacaggttgccccascctcagttcactaagcatctctacagcacttggctctttagtctgctattcctccttgaaattcactcactcttccttggactcaaaggaccctgcctgctcttggctctaaatgtgggcttttcttctccagtcgcctttttaactcatctttcactgcccagcccttcaggcatcagtgcccctctcatgctctacaacctttgcacttggtgtcccctgtgcctggtttcccctttccctgcaaagccacatggctgacctctccctttcaggtttgattggtcaccttctccgtgaagcctccctagccattctgcctctgattccacccctctcacctagccacctttccattttttttttctcaccactcatcacttgctaactaacataggtcaaaggtggcttttttctttgcttttaagatgcaagatatttgatatgtttatgttgagaactaggagatgacagagaaggaaaagttgaaaacacaggcatgagaagagttgatcgttttgcagggtcttgaagaagaaggtgggagatgaatcagagcataagtggaaggtaaggccaaggaagaacacctcctctccttcctcccctcccctcccctcccctcccctcttttgatggagtcttgctctgtcgcccaggctggagggcagtggtgcaatctctgcacactgcaacctccccctcctgggttcaagtgattctccttcctcagcctcccgagtagccaggactacaggcgcctgccaccacacccggctaatttttgtatttttagtagagatggggtttcaccatattggccaggctggtcttgaactcctgactttgtgatccgcctgcctyggcctcccaaagtgctgggattaaaggtgtgagccaccgcgcctggccacaacacctctttctatgagacagagaggcaagacatagttgatgggtccctgctgatgagggatcacacctggccatacctgcttccactgtgaagtagaaagccraatgctgctgagagggctgacggagtggtgaaggagatagtctgagtgggaaaaaacaacacagactgcctttcccctgctgccaccctgcaacaatcaacacagaagactgctatgaccaaatacttgggtgcttttttgccatacaccaagcaagcaattagttctgcagcatatgccagcaggttgtcctccaattcagttctgatattctccgcctggagatagcatcagattccaaagattgagcacctggtcccacaagactgcctcacgcttctgatgccaattgcaggctccagggtggtttactggtgattctgactgaccagctataagtttgggatcctgcaaccccctccttgagtttcataaatttgctagagtggctcacggaaaactcagggaaacgcttaagtttagtggtttattataaaagatattgcaaaggatccagataaacagttgcctagggcgaggtatgggggaagggatgtggagcttccatgccttccccaggcatgccaccctccaggaacctgcatgtgttcagctctccagaacctctctgaaccctgtcctattgggccttttatggaggcttcattcgataggcatgattgaagcatggacacccatgtagaaatgtgattgggcaaaaagcgtttgatctcagtgacagactgaatggagaaacccagcaaggcctgtgcagatgcttcttggcctctctgtgcagcattccctcttccaggatatagggcaggaccccttttaaaatggaagtcttccaacccacaatcaggcaaggtaggtcagagaacattttaatgggaagaggggaagattagagtcctgccttggggagaaaaagaagcgggtgaaaggagggcaggagaaagtcagagagawtcagtggcctaaagctctccaacattttaacaaaagactgtaataagggctgtaggagtcataagcgaggaaccgcggatgaacacgcatgctcacacacacatatatgtccatgtcaygtgcacatcacagatagtatagagaactgaccaggaatccatcagacaaagcattggcaaacactgctcaggtatgtctgggtttgaatcctacaaagtctggaggataataagatttttcttcagtaattctcascctccgaggtgtgggaacagaggttgcagkgatccattcttggaggtttcaggccgggtgtggtggctcacacctgkaatcttagcactttgggaggccgaggtgggaggatcatttgaggccaggagttcaagaccaaacttgggagtttcctgggagggagagctggaggggcagcaggacaagggtccctctgagcctgtttcttctccgcctcttgcttttatgatggcatcagctgrcgtctaatcaaccaaggttttacaaagtaatcttggaatcacatttgattccttttcctctccagactgttgtcatggtcttttcagtaatttccctccctcctcactgtctcccgtccaccttgctgtctagttatctttcctacgtggcacgcacaaggaccagatcatgtagcttttctgtttgaaaacctgcttgtacctatgggttaggtctgcagttctttagcagacctttgttaccaaagccctgtaagatgagtcctcagcctcctctcctgccaccccacttcccagcgctgcttcccttaacacacgcacagtgggggctggtcactgcaggctctgctgatctcctgtgccctttcctgcctccaggcctctgcctgctcctttccctctgcttacaaggtcttgcctccctgcctccttctgtcagatgaaatcgccttctaagaacaacataaacctccgcagaactttcctttcctcctagcagaatgcattgtttctgtttctcctaccagcaagtattcttcatgtcttggatatagcaataaccatcattacttctggatttaattcccttttttgcttatttcctaagagcagggtgttccttggatatctctacttcctgagtaccttggatatctctacttcctggttgctaccctgcattttaaaattgtttggtctagtcagatctagccaggcaacctattgcataccttcagtgtttcactcctttttctggttcttgccttgcccctttatttccatgtacttctgtccttgttttgtgggttgcctgtgggtttatatcctgacatataagtctcatccactttctctcctaaaataagtctgtttctttggaattgggcatacctttcccttattccattcaagtgtttcactccatctgtcatgtctcagtggtacctataagatcactgggtttatcttatgttcatgctgctgttacttcagctctgtgaattggcccacgtgaggctcacttccttcctcttatttccttgccaggtgtcttgcgtggtctgcactgctcttcccttttcatccctacaggcttccacagcaactcatgtcttcattttatcttgtcatttcctccacctccctcctgcctgtatccttgctattttcaaattcaataagtgctgattttctgataaaattaacttcctgaatgaaccctaacatggtagtaaaacaaaatttgtgatctaaaagccaaatgttttttccctttagttatattggcaaatagtcttactagttaagaaatgcctttaaacaccaagtacagtgctagctgcagtggcttacacctataatcctagcattttgggagaccaagataggaggctcacttaacgccaagagttcaaaaccagcctgagcaacgtagcaaaacccagtctctacagaaaaatwaataaataaataaataaataaataaataaataaataagctgggcatagtgatgtgcgtctgtagtcctagccacgtgggaggctgaggtgggaagaccacttgagcctgggggttcaagcctgcagtgagccaagatggcgccactgcactccaggctgggcaatacagtgaggctgtctctaacaacaccaagtatctcttggtgttgttaaataataaataaataaataaacaaacaaacaccaagtatctcttcagtggcagtgctcacctataagttgggagaaatagaaatttgagggcggggtgcgatggatcatgcctgtaatcccaacactttagggaggccgaggcgggcagatcaccagggcaagattcgagaccagcctgaccaacatagtgaaaccccatgtctactaaaaatataaaaattagctgggtgtggtggcacgcgcctgtaatcccagctacttggaaggctgaggcaagagaatcgcttgaacccgggaggcataggttgcagtgagccaagatcgcaccactgcactccagcatgggtgacaaagcgagactccatctaaaacaaaagaaaagaaatagaaatttgatagtataaaaatctaagtattcctttggtagcagatagatcttaatgccatgttggtgagacattggaaattagagtttatttttaggctgggcatggtggctcattcctgtaatcccagcactttgggaggctgaggcgggtggatcacctgatgtcaggagttggagaccagcctggccaacatggagaaaccccgtctctactaaaaaatacaaaattagccggtgtgctggcacatacctgtagtcccagctactcgggaggctgaggcaggagaattgcttgaatccaggaggcggaggctacagtgagccaagatcgtgccactgtgctccagcctgggtgacagaacaagacttcatctcaaaaaaaaaaaaaaaaaaaaagtttgtttttaattttcatctcttgggaatgtagttgggaggttaaattggtatatggagataatgccaagggaccggaattcagaaatcaggtgacagtttaaaaatgaaagtcaactttatatgtagattttaagcatcgttttttgttaaattaaatggtgcatgtagatcttatttttaagctacatatgtttatgtttccagcagctaacagattaaactttcctaattaaatgtgaggtgcttcccatggtacagtcttcaattttcaggaagggcatccttttgaaatgcagcatttcaggattcagctcactgaagaggataaaatctgcgctttgtattttagaggggaaccctgatcactcatcagtagatcttggaaaagaaaaattccagctgggcacagtggctcacacctgtaattccagcactttgggagaccaaggcgggtggatcacctgaggtcaggagttagagaccagcctggccaacatagtgaaaccctgtctytactaaaaatacaaaaattagctgggcatggcgggcacctgtaatcccagctactcaggaggctgaggtgggagaatcagttgaacctgggaggtggaggttgcagtgagccgagatcgcaccagtgtactccagccggggtgacaagagtgaaactccgtctcaaaaaaagaaaagaaaaattccacttcagggcaattttctgcttggatacatttctgggttttgtctctgacatcttcatgatgcccagtgcttcgaatgctgttactcctatgttcctcttccatgcgaagtcatttcatttcttttcttttttttttgagatggagtcttgctctgtcactcaggctggagtgtggtggtgtgatctcggctcactgcaacctctgcttcctggtttcaagcaattctcctgcctcagcctcctgagtatctgggattacaggcacacgccactgtgcctggctaatttttgtatttttagcagaaacagggtttcaccatgttggtcaggttggtctggaactcctgacctcaggttatccacccacctcggcttcccaaagtgctgggattacaggcgtgagccaccacgcccagctttgtgaagtcatttctaatccccattttgaaatgctgaatattttcctcttgcagtattttatgtctcaggcagatcccaggcaactcaagtacttgatctcagtcaaaccttatttttgtagtagggcccttgataatgaacctgggaagagaaatgggaaattctgtagatctgtcagctcataaggaaatgcatgtcttcttcattcatctggggcactgacaagtgaacaatttttttttttaagactgagtcttgctctgtcgcccaggctggagtgcgatggcgcartcttggcttactgcaacctccgcctcccagcttcaagtgattctgctgcctcaacctccctagtagctgggactacaggcacctgccaccacatccagctaatttttgtatttttacaacatggtttcaccatgttggccaggttggtctcgaacttctgacctcaggtgatccacccgccttggtctcccaaagtgctgggattacaggcgtgagccactgcacccagctggtgagygaacaattttaactgtccttgttgtatgatcattttttactgaattgtaccttgactcaaaaaatccaaataactgaatagtcatgcgagggctctggcatggaagtgggcttctgggatgcttgccaatgagttcctttttgaggacacagaatctaagtggaaagattaagtggagaggcagctccaccctctaagtcttattcctatgttccattcaaatcttgctagcttgatttctgtggggtctgggctttggaaattctctttttcatggatgtctcagtgcaccttgttaaaccgaatttggactgttgtgtgttcatcagcttccagctctactgattggttccagtttccttgctcatgaaagccaagataatctggcacccaccagtcaggcatcctcaagtatctggcaccaaggtaaacctggaagccagttaagaagtcccagtgatccaacacactcactgcttgatgagagacagttgtggtacaccagaaagagcactgcaataggagcaggagaactgggttcttgtctcatctttgcctctactgcatcatggaaatttgggcatttctgtgatttctctgaaattctctttcctcagctataaaatggtggtttgaactagacagtttctcaagtgtcttccagttccaaattattgagtatatgaaaaactaaaagagctaagcttcatttatgcctattgttgcgtaaacacaacttagctttaaaaatatttacagtaactacctcaagttgcatatacttctgatccttttccacaaaagtagtttgtataacaacaaaatgagaagggacacagtccgtattccagaggagagaattaacctcttcttacctcaatgttccctgacatcaagggggataataatatctaactcagaattatggggaagactaaatgagataatccctggcacttagaatggtgctagacaaaaagtaagtgtttagtgaaagttattattaatataaaattagaaagattaaaatttgcatgggccacagtggctcacgcctgtaatccaacactttgggaggacragatgggaggattgcttgagtccaggaatttgagaccagccttggcaacatggtgaaaccccatctctacaaaaattacaacaattagctggatgtggtggtgcacgtctatagtcctagttactcaagaagctgagaggtgggaggatcgtttgagcccaggatgtcaaggctgcggtgagccatgatcgcaccacactgtcctccagcctgggcgacagagtgagaccaaaaaaattgccatggaattgtagtaagggttatgctgaaataataaatgttcagctgctgctcagaagtcaaggtaagactagaatagagaatacagaaacagacccacatatatatacaaccacatggtttttagcaaagatgttactgctgtgtagtgaggaaaagatggttttatcaataaatggtactagactggttggatatccatatgggggaaaaattggttttgacccctactttataccacacataaaaatgaattccatgtggctcatagatctgagtatgaaagtaacacattagcacttctaaagataacataagaaaaataaccttatgaccttggtgtaggcaaagattttttaagtggagcacaaaaagcataagctttaaaggaaaagactgataaattagattttattaaaattaagaacatccattcatcaaaagacatcattaagattgttgaaaagggtgcagtggttcatgtccataatcccaccactttggaaggtgcaggcaggtggatcccttgaggttaggagttcgacaccagcctggtcaacatggtaaaaacctctttctactaaaaatacaaaaattagccaggcatggtcatacacgcctgtaatcccagctactcgggaggctgaggcatgagaatcatttgacctgggaggtggaggttgcagtgcgttgagattgcaccactgcattccagcctgggcaactgagtgagactctgtctttaaaaaaaaaaaaaaaagaaaaaaaattgttgaaaaggcaagccacagagtgggagaagatatttgtaatacatatatccagcatatgactcttaccaatatattatataaagacttgaagaggcacttcataaaagaagataaccaatggtcaaacacatgaaaatatcttaagtccagggggaaaatggagatgaaaaccacaataagatactattatgttcccaccacaatagctaaaagtttttaaagctgacaatgttagggagggtgtggagcaattacaactctcatatactgctagtaggagtctaagttgccacaactactttgggaaaccattgtacaatatgtaataaagctgggtggattcataactcatggcccagcagttttagtcttaagtatataccccatagaaaggtgtatatatgtacaggaacgttcatagcaccatcactcataatagcaaaaaaccaaaaacaatctaagtgcctgataacaataaaattaataaattggggtatactcttacaatggaatattatatagcaacagagtgaagcaaattcaaaacacaacatgatgaatatcaaaaacgctgtgttgagcaaaataagccagacaaaaaatagatatataccatatgaatctagttatgtaaaatacaaagaaaggtgaaactgatcagtgattatatagaggtcagaaaagtaattatctttggtgagtgtaaagactgggaggaggcatgagaaaagcttctggaattctgcatacattctatttcttggaactgggtggtggttacctaagtatatttactttgtaaaacttcattgaactgtatgcttaatgcttgtatactttatgtatttcatgccttaataaaaaattttattttaaaaaaatgaaggagtacaaaaaaaatggaaacaacccaaatgtgtctgcagccaatgaatggataatttaatatggtatatccatataatagaatattattcattcataaaaagaaacaaagtacacgatacaacaggggtgaaccttgaaaataaactaggtgaaagaagacaaccataaaagagcactttgtatgattccattaatatgagatgtcagaacaggtacatctatagagaccagaaatagattagtagttgcctgcggctgggaaggttgggaggaagtagggagtgactgtaaacagatatgggctttctttctggggtgatgaaaatgttctaaaatttattgtagttgtggttgcacaactttgtgcctatactaaaaaccattcagttgcacactttgagtgaactgtgtggtatgttaatgaaatctcaataaagctgtcatgaaacaaaaagttaagagatactggtaactgtaataatgattgaaacattgttaatcatagtcagccttaggaaaaggctgcaccaccatatggtcctttggtatgataggtgagcacattgttactggagtcagacaatgttctaatcctggctttgccatttactgactgtctgacattgggcaaatcatttaacctctctgagtctgaatgtcttcatctgtaaaatgtaaatattaatagtacctacctcatagaacttttgtgaagattattcatttaatcaagaaatagttgagtgtatttatatgccagccacaatgaataaaactattgttatcatccaggagctatggcatctgaagagtcttaactccattttagtgagagaggctacaagtgaacttgagcgtgtgtcatgaggacaggacatctttcccctactataccacatccatatctattacaaaatacaaaagtcatgttcaaggccaggtggggtggctcacgcctgtaaccccaacattttgggaggccgaggtgggaggattgcttgagcctaggagttcgaccccagcctgggcatagtgagaccccgtctctacaaagaattaaaaaattagctgagcatgatggtgcttgcctgtagtctcagctgctcaggaggctgaagtggaaggatcacttgagcctgaggaggtggaagctgcagtgggccatgatcgtgccactgcactccaacttgggtgacagagcaagaccctgtctcaaaaacaaacaaataaacaaaaacaaaaacaaaaaaaaacccaggaaattgagttataactaactgatatatggacagctcagaaatagaaagtgaccagtagttaaaagactacttgacaaggttttcatttcaacaaatatttattgtttctgtaaaggaattactttcagtcatgttgaaaatcatactatgtctacttacttgttctacttgtcaaaatgtttgttctgcagaatgaatgtgtaatcttttaaaattaaattgagagcgcttgtagtctacaggtgttgaaaaagaagcaagtatgagtttgtcaagaacccgatgctgaggggcgagtctccataatgcagtggttaggagctccagttttggagtcagaccttgacacaaggtgtctgacctccctgggtctcagtgtctttatctgtagaaagagatgcgtctcatagcattggaagattaaatgaattaatataatgaagtgctttaaaaagtaagcagtcaatatgccgttattatgagaccaccagtatggtggattctcataccacaggcatacataaattatgtatataatttcttgttaacttttgtgacgtcttggggaktcagaaatggtttccctttcatgcaaataaattaataagtgaaactgagtgattggatccaaaagagctaattgggcatggtgagaaaataataacccaaaaggtatctccagtgtgagagaaaagccactaagggtttttgtcaccggaatataaagcagtgagcttttgcctttcagaattctaggtaaatatgaaagttgtttcaatttctgatgtaaggaatgctgggattggattaagcagttaacagttaacgtttagtttataggcattttaatacacatagttgttttatatttctttaaaacattgaaaattatatatctcttgtatatttggctggtagagactagtaattatgtcttgttaatagagggactatttttgtttgtttgtttgagatggagttttgctcttgttgcccaggttggagtgcgatggtgctatcttggcttacggcaacctccgcctcccggttcaagcgattctcctgcctcagcctcctgagtagctgggattacaggcatgcaccaccaggcccggctaattttgtgtttttagtagagatggggtttctctatgttggtcaggctagtctccaactcctgacctcaggtgatccacccgcctcagcttcccaaaytgctgggattataggcgtgagccaccacacccggctgggacttttaaaaaatagaaaagtccacaaatgaatgaaaatatgctacaattctgtttttagacctagacctgggggaaaccattctgctgggattccacacacgcattccctgcacagcctcagacataagaaagactaggtccccatgctggccgtacgtgccgaagcccataaaagagatgacgacacatgccatgacctgctgcctactgtagttacatttctggcatgaaaatagttgtttcctgttcagaaggagtatgcccagttctctgctacttcatttactaagttcacctttatagagcttgcctgcaaagtgctttagtcaccatartccaccaggagaattgaccaataagctggcatcaatttactgcctcctgctcaggctggccrgtagtgctgtttcttggtgtgtgctgggaagtcaagaggtacacaggtggctggggtggacatagcattttgttggtgtgttttattctaaaaatccaagactctttaccaagtaacacacttattattcaagaattaaagtttacatctaagcaaaaagaaaaattcaaaatcctatcactcaaaaccattgttaccttcttcatatatttttctccagatattttaaagcagggtttgcattttttattttatactttttatccttattgcttttcctgcctttgaaaactgaaaacattacaaaagtgtgtaacggatgaaggaacaatccctgtatctgctgcctctaaagatcatcactgaggacatttttattctgctctttcttagcagtaaccttcaacttctgcctctattggctcgttgttgttttaaaactttgagctagttttacttaactggatttgtccttttcaaacttttttcttttcttggcttcagtcctgcctcttctctttttttttggatgaagaattttgaacatgcacaaaagtagaaggaagagtataatgaaacccattgttcccatcacctagcccctgtatccctcattccacagccagtcctgctccattcccaacccacctgtaccccagcccttattactttgacctgctcactttgtaatgaccttctagggtccttcgcagtccctagggcttcactgtcttttggctttgagtaaggaccaagtgcctgccctgctgctctcagagcttctctggagcctgtgctctgtcccaggcttgaccggctgacctgggctttccccactcactgctgaaaagcctggaaattcccagacgttgagtgcgccagcctcgcaagttcagctcctcattctctttcctgttaatgaagaaggccattgctcaagtcatttggaagagaaaaagtggaatttactacctgggtgttcctcatmcatgctgttcatataaatttaaacttagatgcctgagaattacattgaacatgacaaaaattgctgtgtgggcagtttagttgagtacttgcagattgatagagcccttagtaataatgaagggaaaaggttcttgaasctgctctgttccagaagatgagctcaccagttaaggagtttgcaactaaaggtcctcattaacctcttgctggatggcaaagaggaaaaaagaagaagaaaatccagactcttcaaatcctgacctttggggagacctaagaagtcatcctatgctaccccctcctcatggtgggttcctgcatttcattcagatttacttaccccagatttttttttcacttcagcttctcttaagtttgtaaaatatcctcaaaccatcaccacgtcatggccatggagtgctgccatggcttgctatactggtggtcagcttttgtgtaagattacataacgaataccacatggaactggaagatgccagcgtttgagttgtccctcttacctagcaacccaatcagtgtttctcagagggaatgtgcttatcccaagtaaaaggtggagtttattgtgtggccacaaggtgatccaagcccaattgagtctgtctccaaaattcagtaggatcatgctaaggccagggcccgcatcctggctgcatgagctgccctaagtaaggcccctcatcgctggtgccgtttgaacagcggaacatccctttcgctcagcccccttggttggattaccctttctgagcttccagaatactgttttctatctctgttgaggctcctatgttgggaaaactggccacagggtcaagaggggtgacccaagccagagcattgtgttcccatcatagactgggtggaaaccaacctgagggacaggaagtccaacatctgttctatctgtcaaggtgtccagcaggttgtacttctgattgtggtcttgaggctctttgtttttgttcagtatgactgcagatggcattaatagagccatggtctgcagagtgggtgaggtggcaaagtgagaaagtgagtatggtacattcaagttacctttccacttagcgctccctggtggcttcccattgcacttgaagtaaagaatgcctcatcctgacccagcagggcagctcttctcagggcccatccacctcactagcctccctgcttccacttcttccctgctttccagccacagctgtgtccctagacacagcaagcttgcgcccaccccccatccttcgctctggctctcctgcctgggatgctctcccccatgtcawcacgtgacatggtcttttttagacccacaggtctcagtctgtttcctcatagacaccttttcattactaatgaactctaaaataggctccagacattcgctgttttattttctccaaagtcctttttactatctaagtaatcttgtcatttgtttgtttgctcattgcctttctctccccactagactggaagcttgacatgagaagggaccttgtcagttttcttgtatgtctacagtgcctagaaaaggactggtacatagtaggagcttagtaagtatttgttgtgtggctgattgaatgaatgaagatggttattaggaagattatgaggtaattgaaagctaaaccatgtggttgtttagcctgaagcagaaaagtcccaggggccatatgctggctgtctcagtaattaaagctggtgctaccctaaaagcacctagccctgcttcactcctttctcttggccagattgctgtcctccaaggagatgggcttgttctgggcacccttatgagccagaactggagccaataagtgaaaactctagggagacatattttggctttaaaagagagaaaaaaataataataattgccactttacctgaggacgtagtgggcttcaccagacagcagtgaattttaagtcacctgaggtatgcatatgcaggcacaggctgggtgctctcttgcagacctggtatggagagggctcagcacctgcatgggcagttaggcagggtttacaatcctttcagcccagagcagcagggcgcctgccctgtattttttgttactttctttttcattcagtaaatgtcaatcamtgcgggcccagccctttccctgcccatcatgctgattacagagagtcaggaggtagttcatgatccgcatgtagtaaatgggggtgaaagagttgagaagctgtaggaagacacagaaggggattgagcctggtctaggtcatcagggcaggcctgccggaggaagtgactttaggtggtagtttgaaggaccagtgggggttgccaggaagaggaatagagagaaccgcggggagacccctgggtgtgagcatgggagccccatcacagtgtcttgggggtgtaactgtcatttaagggataagggccaggaaagtcaaaacatgcacagagcagacccacatgatgagcagttgggttggtatcagcttcttgtgaartggtgatagaggatggtgtgcaggggaggagtggaagaaacaagaccatgggatgggaggggtgggcaaaagccaggccaggcaggccacagaagccaggtctgggctgcgtgctcagggcagcagggcctctggagggtgtagatggtgaggcgacaggcagatttgtgtttggaaagggcactgtcttcactatggaaaatcagtttgagaaatggcagggagagcaataggaggttgttagatatttcttagaagaagccatggtggtcttggccaaggtgacaatggtgggaaggaagacatatgggcagatgtgagagacgtatggaaggtagagtcagaatgattgatcgacacaggcctgagaaagtcccaggtttctttttggtttaggcaagcatgggtatcacttttggtttagtggaggtgatcccacttcctgggacaggaaacacagggagagaaatggttttgctgccagtaggggcttatggaggtatgagtgtgatgtgaccgtgggacagctgagtgacaattctcagtagactttgtatacatcaatctgaagctcagagaagtctaggctggtgatatacaattagaagaccaaagcacagaaatgaggtttgaatccctggaagtagatgagacaatccagagagaaggggtagaattagaagagaaggcagcctggggcagagcacggaggcttggcacgccacacttaagggacacggagaggyagagaaacttgaagaggagcagacatggagcttagacacccagagtggggcccagagctaaggaggagtgtctcaaggtgttggggtggggagggcacagaatcaccargcttcagatgctgctataaggtcaggcctacaaaggtttggattyagtgcacagaggttattagtgacctggacaaagcagttattttttgctgatgaagtatattaaaaggctttccaggcatcacatgtgccttagtccattcaggctgctataacagaatactgtagactaggtggcataaagaactaaaacaacggatttattcctcacagtccttgaggctgggaagtccaaratcaagatgctggcagrtccagtgtctagtgacggcccacttcctggttcatggaacagcaccttctcattgcgtccttacrtagtaraaagaatgagagagctgtctggggtcccttttataaggcactaatcctatttgtgagggatctacctctgaggcctgataacctcccagaggtctgcctcctgatgccatcacattggggattgaatttcaacctgtgaattggcagggagtggggagactggggggagcaaatatctatcacaacacataatattgttttatgtgaggagtgtcctgctgatgtcaagaagagcctctgtcaccactgtgaccactgtccagtctcagcaatgggtaaaagtgaatgaagtgacccaagtctggaaggccttatctcactgctggtaagggaaggccccacctatagtaggtggccaccctggttgtgctcattcctggcacaggcctcttgagtcgttcagacagtctctgtactaccagctaaaaatgactgtaagctagaaatttaggagtggtttagattttaaagagcttgttcatctaattaaatagaactggagttaatggcttagtggttgttctataatcaggccctgctacaagtggttaaggagactgacaacgggaaccaaaagagcctgcaggracaggagtgaacatggctggaaagagtctctgccaggacttctgaatccagagctgagaatgtggcttccttggagttatgagagatagggagggattttgagctgtggcccactgagatgaaaaattgggttgtatcatcttgttctggagttgcagtgacagtttatggcgaggggtaataaaaggagcaaaggatctgaacccaacctggttttgaatctgggatttctcactttttagccaagtaactggaaaagtgactgaaaaactctctgcatctcagataattcatctgtgcaaaacgatatgcatagctgtagtcaaagttagcttgtgtgtgaagcccctagcacagaggagacatttaataaatgttcactcctgctatctgtattattattgttattatttttcttcttcttgagacggagtctcactcttgctcagggtggagtgcagtggtgtgatcttggctcactgcaacctccacctcccgggttcgagtgattctcctgcctcagcctcccaagtagctgggactacaggcatgcgccaccacacttggctaatttttgtattttttagtagagatggggtttcacccatgttggccaggctggtcttgaactcctgacttcaggtgatccgccaacctcagcctcccaaagtgctgggattacaggtctttattatttttatgatcatcatagtctatgttacatttatgtagttgttatggatcacaaaacactttcagatgtcctcactgattgcagttcagcttactgccatatacttgagttatcacacgggtgtatgtatgagccccattagaccgagagctccttaaatggatgggtccccactcacagatgtctagtgcgggcataaactagaggatccatgtgaggaagcacttcccctaccagagctcttcagaaagagagcaggtggcttcaagaagatgtcagcttcccactcttgaggatatagcaggggccacctggcagggacactgtggggaagtggctgcactggttggaaggctggcttcaaagagatggtttctgaatcccgctttataatctatgttttaattggatgaagcagttctcatgtcccgtcaggttcattcaaaggagtgtttgtactcatctaagtttgtggaccctaggcaaagtgagccaggcccggctgcccgggggatccttcctctctctgctctaaatgctctttaaacacacaggctcacctactccctggcagatgaaagttttaaatttaaaaatattttaaaagaatgctttcatatgaaagccagtatcttttaaaatatcaaatttgtcttaaacattttggcagcatatgccatgtgacttttggatttatagtttctctttcatagaatraaaagttcagtgccaccacctcaagagttctgcaagttcacattatgtaaacatatataataaaatatttacttagggtttccataaaaaagatccaaagcagagaataagagagcttctctttgcyggtttcagaggctctgctgggaattctgaatgaaatttaagcctcttgaatatgttttgattggccttcttcatattttatctcctgtaatgaactctttgtcagtttgtcaattttgactaaggacagaaagttcatgtgcagtaacacagagactgaatttaaaattatggtttatatcatgatgtaataatcctctcttttgtccttcagtcaatatttacctgttaggccaatatattataatgctgacttcaaaagaagacactttattttaccttctctaagtgttggttttagatacttgaaatatcaaaactggaagttgagccatctgagactcttggctgaattcacataaagttcagttcctcgatcgcagggcaggtttcactgctcccagtgacccagcgacacagctgcgtgcctgtcagaatgaggcrgctaagcttggagtcatgctggttcctctcagctttccagacagccctctcctctgtgggaaacagatctgttatgttaccccatagcagccaggatctcttaagtggacttaagtattcctttatgtattacagctacaggattgggcggaaaaacctgaagaatgccctgtaggaaggtggtctctgagtgtcacaccagatgaagaatagggaatcttaaattcttttccttgcctgaaccccttttttcaagcatcccacgtttaagcatttttccattttaaaaactgagggaagaattatcccccagtgaaggagtaggaggataataagtagctacacagtttgcagataaaatgtgtgataccttaggactgatcattcaggttaccaaaagagcagatggtactgtgttaataagttcttctaagccaacttgggtatgagtcaagactctgtcagtgagtcataatggaaagggaattgatccactcattaactgccaagtccacaggtagactagtttcaggctcagctggatcctgaagttcaaatgaggtcataattcttcttttctttcttagactattattttctgtattggcatgattatgtagcatagatgtttcctggcagctccaggtttatgtggtccttagtgcctrggatcccaggagagagaccctctttcctgaagttcatatcatttatcaatacaacaagttgtattgttcaactgaagcaaattcagcactatgcttgtatcttccatgtgcttctctctgcccattgtatatctttaaactgtatacttattttattttattattttattttttcgagacaaagccttgctctgytgcccaggctgaagtgcagtggcacaatctcagctcactacaacctctgcctccaaggttcaagcagttctcctgcctcagccccctgagtagctgggactacaggtgtgtgccaccacacctggctaatttttatttttagtagagatggggttttgccatgttggccaggctggtctcaaactcctggcctcaagtgatccgccagccttgacctcccaaagtgctgggattacaggcatgagccaccgtgcccagcctatatacttattttacatgtatactctttttttgtaattggttcattttctrtattttcatacacacatacatgtatatgtatgtacgtatgtatatactcttgtatgtatgtgtatatttttattttcacatacactatatttgataggtgatttacagtatgttcaagaataaatcttaagtttataacctaactaccctccctcatttaaggtacagttctaacagccttggtcacctgaccaactctctggtaaacctggtagggagggcagggcctattaaaagacagctccaccaggaagggaaggagcagttctaaaaggaaaaagaaagtgggtcctttaccagagggaaaagacagaccgactgttgattcattcattcaacaagtacttcttgaggacctattatgtgccaggtactcttccaggccttgggtaacagtgaacattacacaaaaggccttatttgctggagcttacatggtagggagagagacagataacaaacacacaagccgatagagatatgccgtgatatctggtagtgatgagagctctgaagaaagaccacggtaagcctcaacaggtgtggagtacgtgctttacagtgcagatggaggaaatggttgggggcggggtggtggggagttggaggagacagacaggtggaggaaatggtgggaggggggtagaggaacctcttcttgtttggggattctctttcagttgacccaaataaagtaaggaagattttgataggcagatcctgttaagactatcccaagcataggaaaaagtatgagccaagccaacatctaaatggcttgagggaagatctgttcaggaaatggaaagaggtttcccatgacagctacatacagagcatgtgaaggatggggctgaggttgcttggggtgtgaccctgtaaggacatgaataacaggctaagagtacctttcccagacccacatttagaaagatcacagcaaagtgtggagggccaggtgaggggggcacagaggcgaggtagggcagccaggtgtgggctraatagggcaatggccagagggaatgggaaggaagggcagagctttcagaggcttcatctgtaggatttggggattaattcacttctagtgacctaaaaggatttgttcatcacccagaatgagccatatcttcttatgtttactcaaagataagaagcctttagaaatgggaaacatcttgggaaagtggttaatcttgtttattcacaagaacaatttcatcatcttttgctatacaatgaggaaagtgacagtagtgcgggtcacagagggaggtggccaaggaaggaagcaagcaagactagatgtgtcacctaactgcaggtcctgtggcctctgggagtgacatacattctaggaaaggactcctgggagagaatgctgtggccttccacgccagcctgatagtccttctcgtgcatttacaggcaacttcaaagtgggagttcacattgctgacgtgagttactttgttccggagggatctgatctggataaagtggctgccgagagggctacaagcgtctacttggttcaaaaggtaaaaatccatctctagtttcttttttcttgctttgtttatttgtttgtttccctggaagagtgtgtgctctctgttattacatgttctcyggaaagagaagccaaaggaagacacaggtgttcatctgaggcctcatcccagagtggccctgctatataagtaactgacagatactcagcttcagaaagaaaggaggcaaaatacctgctttcaaacgattgttctaaagcagggctcggcaaactcagcccacactagcgactagtttttgtaaggttttattggaactcaggcacatgcatttgttcatgtattgtggctgctttcacactacttcagcagagtggcatgacgatttcctattactgtaagccctttaaggaaatgttttcaacccctgttctaaaaggtgggagccaatctggtcctgacctgcccattacaagatagctatgggagtctccgagatggaaaagcgaagggagataaggaggagcctgagcttttccctctcatcctgactgcaccactcttggttagttactaagtgtctacagacctccctagactcatctgtgaaatgaagggactggacagattcatctcaaaacatcccttccattctgtgtacttggacctggcacattcaataggtaaccatgagaatccattcctttaacacatatatattgagcaccaattatctgatggtcactgcagtaggcctcagagaaaggggttaataagagaccaagcatgagtaagttctgccctccacactgtggttcatgaattctgccaggtttctttctcttctttcccttctctgatcctctgctcatttgctcatcttccttcttcggccatatctggacttccacttcctttctagctttttaaaatttggcagtccagtttgggattctgcctatactagcttgagccttcctgcctcccaagcccatgccctaggacatgattctggtatttgctcattgactgccctaaggtcagaggaatatccccaccatccaccctagaatgcagcaccacaggtgcattstagaatttctgggctccacttctagcaaagtgcctacttgatgttcacaaaggtattggcacttctggagcaaaagctatccaggaaagcccaaaagtttctaggatttctggtatttaccaagtgttactgagagttcctctcatgttttcaacttgtccaccctgaaaactaacctctcaaaagggaagagaccagtctaggctttgagtgcagccatatcctctaggggctgaagatcctgttgcctgtggcccaagtttagttcccccagtgtagctgagcttatcagttgacagtgatgtcttccaccccatggtggaaatcaccttgtctgagaccctttgctcctgctacaaagggagctagcctagatgggctctcttgtcccaaaggaaagccagagctgttatctgccatagccgccttcaatatgtggaggcccyacctaggaagacctggcacctcctctcccctgccccaggacagtactctctggatcactgaaacctagaatatttgagcaaaaccctagctccacctgctccaggagacttgtacagccgatttcttcagaagtacagctttgcctaccattcacattaggtgatcagaaccaccatgtacgtgttttctgccatcccagaagtgagaatagtgaatagagaggaagacagagttgatcagagccaggaaattctgagtcagaagctgtgtgatcatcaaaaccccattccaggtaactgtgtcatgggcaataggtaatctcaatgcacagtgatgcctgaaagacccagcaccttcagtgaccaattagtgagaatagttagctgtgtcctcatctgagcagggggaattccgtaccagactttgcttgtgtcaaacgtactgtgtccctccctgacctctgtggctggcctaagcctaaatgcaatgtttaagaacttctctttgccccccgacccctcacaatgtctatgacacctgagtccaagctctgagcaggtataggcagcttaagagaatgcagtgcaaacttctgacccacaagtatctctcttgagtacatggggcttcctccctgacccccatggccatgaagccacggccatgcactagctgctgcgctctccttttataaccaggaattacttttcaaaatcagaaaatgaaaaaatcaaattgggttaagtaattaagcatgtttccttttctgtttcctttggttttgtgtttgtcacagttctagaatttctctgtgggactacagagttggggctctgctgctgagttgtgaaagtggggagctgggtggaggaagggcccgcacgcctctgctgcccggcactgcctccagcttggcaggcacaagtggcgccggcccgcaaccttggacagcagcagctgtgcgctctgattcctttgaaccgctgctctgacctttcttcctactcggttttgtttcttaaaggactgtgtccaggaacttttctgctgttttcactttactttgcctataaaggtcttctgaaaagctggatgagctgtgtttccgccctccakattctctgctttctcacttggcacaatcatttctcccagcttcatcacacaggggaaggggggctggggttccagttcatttcccatctatagggaatgtggcactgatttcattcagatctgtaagtgactgatgccagaactgcaatcttagctccttatctaaactctaattgggggattaacccatggagtaggacagtatacagtgtaacaggtcttgggtccaawtaccacctcactgactttaaatgaaattctttttgttgagattttgctcacagtaataagtatttggttattcttgttaacaatagggtataatcaggtggaaatataaatttaggtagtgtccatttaaatatcaggaaaaaactttttgacaaaagatgattccgttagataggggacacctgcccacctgaattttggtctgtctttctcagaaggacacaacatttgctcagttaatgcctctcaactgtcttctctgggagataaatataatgtaattgcmaagtttaaagtaattttagaaaataagcmaattaagctttaaaagtaaaagaaaacctaaacagttgaaacctaaacctaaattttctgcctattggcccaagcattcatgttattttaggtgcgaaacagctcaagtgaaagttcgcccataaatctctacgatattttattggtactgctttataatagagatcaaagattgggattggaagcctgtcttaatgtagagtccaaagagttttaagatgtttctttctgacaccagcaggttgtcagagtgttgatgttttgttaacgtcaaactgtgtagcaaagagttgatcaaattctgaattcatggaagtgttgatatggaaaagaaaactctttaaacagagatgttggctggcaagtgaattaatctatttcctttaagttatttcagtgtgtaagtagggagctagctgagtgtaccttgttgttaaaacctcgaagtcctcggagaaaagggggaaaagtcaccaattctcagactgcagatatgggctgcgatggccaatgggttatcgcactgaaggcctgagggagtgtgggtggggagccagcaaaggcctgggctgaaaggggcagaagaggccctgcaacctctccaggtagtggagaagcccctatgacttggctkgtgggcatctggctcccacatcactgctagtccttcctgctcctccttgcctgaatgattgattcttcccttctgtggccctttgtgttggtcacagggctgtcctggctaacctgctgctgaacttggccagcctgcccactgtggctttagcagatgtttctgctctctgaggctaatataaggttttatagtcttgttggtacccccacccagctgccttgggcagtggtgtatttacccaaatgataaatttctctctactctctcaagacctggtccagaatgcttagaaagtcagtgtcctatcatcactatcccttttctccacggccagctcttaagctctgccctgactcaactttggtcctggccccaaagcatgcttaagaggasttagcatccttcaagccccgtttccttttctgctgcctgaagtgcttatcagtcttcctccacttggtatttattgagtaccagctgtgtgtcatgttcgagggatgtaaagatgagacagattctggtcttgccctggggaagcagaggaggtggacaggtagcaaacacttgcaatgcatcaggctaccttcaggtacagaagtgccccaaaggtgaggaggtgttagagaagagagaggggttgtatctgcctgggctggtggtgggagaggagcttctgcaaggtccaagaaggcttcacaaagcaatcgtgttttgaacagtgtttcacattttgagtagaaaatttctagatagacaaaaatgggcagagagggcattccaggcagaggctagaaaaagcagagaacattcaaggagcagtatgcagtttggaattcttggggtgtgagttgtagagagagccacggatgaggttacaaagagaagcctggagtggtaggcgaaggagctcagattttgagggcaagtagggaagtgatacggtctccttccaccaagatagaaaatcaccttagcaactgtgtggttgaaggatagtgaggccagaggcaggaaaattgtcatcagtacctgggccctttcccccagtcatatcctcttgaggctctgaataactaccccaacacagagatctttgctcacaaaatcttatgagagtttaccaatgtggtaatgtctaactggaccccaggagaactaggacaatagatgtcttcagcctagtgccaaatggacattctgaacaagcagcatttcagttacttcaaattgtagtttcttcccaattctggcaatgcatatcacacaagaagaagtagggagaagcaaagggcagggaaaatggagaagttagcttcccactgttatctttgctgtcccctcggagatagggtccttctcccgcttccctgtggggaactcttggccacctgtgaccttagccactgaacattgagggtgcaggcttttccaaaaaccttttggccccatggaaccctctaggccctccttcatccacaggacatgcaaaagtccatttactaaattcagctccttagctattgggaaggtaaagccagtgtgtcctaacataaatggaattgcagattatcattgagtggagattagtaagaagatgcagaagtctggagaataaacaagtcttatctagaataatttctacttcagaattgtcactggtttttatctgagagaggaagagagacatatycacacttgaatagtggaaggaggagaggaaaagactcatttgagagcgttagaatgtcagatctaggcttgggaagtgattggatgtagaagggagagagaggagagtgaagaatcacaggcaaatccccagctgtgttctggggacaggggtgaggagtgtggggagacatgggtgtggtgttttgatttttggtggttttgagggaggggtggtcgtttgcttccttgcttatttaacttgggacagagcgctgctcttaacagaggtaggaaatgtagtcagtggaacaggtaaagaagggaggaaaatgctgaactttgtcttctccatgtggagtttgaaacattcatgggacatccagttcatggtatccagagggcattgtagacgtatgtggagtcacaaggccagatggccagaccttggacagggaagacactcgttgtgagatggcaggagacgagggcacacatgtaaagtgagtgggcctgggagaaattggccaaaggaaggagctggaaggttgcttgcaacagattgagtctgatgatctcagttttctctgtgaagaagagttgaggttttctgctgagaaagattgggaaggcagtcaggtaagaggtctgaggagaatagtaacattttgggacctcttctgaggggcgtggggaaggagctaacaaagagaggtgaaaggcctgccaaccctcatggaggtaagaactaagacagcttagcaactcacctccacacggcccagcagttttctctgtcactgctcagtgaggacttgcagaagtaggaaagggcgattataagatcgatcatagggtttgtggagctgggatagtagaagtgagggaaataaagaaccttgaagaaattatccatgtggttcacactgcatarcaaagttaatgaggacaagacaggataagactggggaaaaggatcaaggggtcagggaatgtatgaacatttgcacagttctaatgatagccaggagtttcccagctcctggagagacctttcttttccagtcagacatggtgttccacacttatcaccctgacccagaggctctcaggaaccatcgcaggcctcatgtagctgacctgggtgcatggactgttgcgccatggtccaggtgggtctccccctgacataatgggacttggatttgagaaagcagctgatcagaaggggctgcctgcctctcctttccagccctcctccacagggatcctgctgtgcctggggttgtgggagagcacattcacagtgaccctggcaggaattaggccccatttatgagaggctgtgatgtgccaaaccacaaatgtgattgtaacctcttaattccttttcctttgaaacatagaggaataaccatctatttacaaaactatatatacctaaagactgttttctatgagaatttcgtctgaattctgctttaagacctggtaaatgtcttttataaaaaatacttcttaaaaattaaatataattatactaaccaaaaagttttaaagttcagctttttcatgagcacttagattggtaactgaccattgcagtgtgattaataaaatgtcttctgtgtaagatataggataccacacagtttttatagcctgcacaaccactgcatgtgctggtaagttttaggttagtagccaaaacagtgtagcttatacttaaaatactagttgtttatgaagttttttttgtcaagatgtttaaatataagtctctagtatatttcataaaatgttttatgtgatgcagtaaacatagaaaaaaagaggtggtccatctcctgggcagaagccagtcagttgtctacacactggaagtgcctaccatgcatcaggtgtagagagagacaggagtgaggcctggcccttgctcctgaggtttcagtgtctgtggcactcaaggcacctgaagaagcaattaggacagtgttgtaaatgcagcagaagagcagggaggatggagtaagtggctgactgtgtaggatggccccaaatcctctttgaaagaacaggggaggtgtgtaaaacacagcacacactctgcctgggggattttggataaaccttttagcagtggcaatgagctgaatctgaaaggatgtacaagagtttgccagatgtaaaatgtccagaaaggtgttccagaaagagggaccagcacaagcaagagctggagcagcacacagacaggtgaagggggtgcagtgggaaggcccatgtgactggtgttgccagtgccccgggagagggccagggcacaaagctgaaggggatgcttgagcctggtgacagtgcaccttggataccgtgggctggccagtgagctgactttcactgagcatcttcagtattgttctaccaataagaagaccaagactcaaaattttactaacttgcccaaattgtacaagaagcggtgggcccaggattagcccccaagtctctcaggtggcaaagcctttgctgtctttcctgcaccatgctgctgctgagtctgcacttcactcactgtaaaaaggtctttagaccttrttgtawttttttaagtggtgaggccctttttgcaaataatatctgaaccccaaattccaacatatagaaacagatcaggttttcactaaataattagcattcatttatttcatatttaaatgtgtaacacacaccaattaatgaaaacagtgactttgtttttaataagctcatttattttggaatgcttgcagttgacagagaagttgcaagggtagtaaagagtggtcccatacccggttcctccaygttaacatcttacgtgactacgcttcatgtgtcctaactcagaaactgacattggaatattactawtagctaaactccttactttatttggatttcactagtttttccatcartgttttctttctgttccagrktctagttctggcccaagttataatgactttcttttgacaaacactaaatatgaagttaggaattataatgcattgtcagatgctcagctttgtgacttaaagtaagatactgccgtgaacacttagaagacacactaactatctgtacaaaaggcattaagccctggactgatgtcattgcaacaagcatgctgggtggctgagcagccagttaccaaaatacagttgatagaacgaactgttaatgcagcccagaggagaacacaagaatgcatacccagcaaacttgatgtagtctgtcttagctcaggctcctatagtaacatgccatagcttaaacaacagagattnnnnnnnnnnnnnnnnnnnnttgagcctggtgacagtgcaccttggataccgtgggctggccagtgagctgactttcactgagcatcttcagtattgttctaccaataagaagaccaagactcaaaattttactaacttgcccaaattgtacaagaagcggtgggcccaggattagcccccaagtctctcaggtggcaaagcctttgctgtctttcctgcaccatgctgctgctgagtctgcacttcactcactgtaaaaaggtctttagaccttgttgtatttttttaagtggtgaggccctttttgcaaataatatctgaaccccaaattccaacatatagaaacagatcaggttttcactaaataattagcattcatttatttcatatttaaatgtgtaacacacaccaattaatgaaaacagtgactttgtttttaataagctcatttattttggaaatagctaaactccttactttatttggatttcactagtttttccatcagtgttttctttctgttccagrttctagttctggcccaagttataatgactttcttttgacaaacactaaatatgaagttaggaattataatgcattgtcagatgctcagctttgtgacttaaagtaagatactgccgtgaacacttagaagacacactaactatctgtacaaaaggcattaagccctggactgatgtcattgcaacaagcatgctgggtggctgagcagccagttaccaaaatacagttgatagaacgaactgttaatgcagcccagaggagaacacaagaatgcatacccagcmaacttgatgtagtctgtcttagctcaggctcctatagtaacatgccatagcttaaacaacagagatttattttctcccagttttggaggccagaatcccatatcaaggtgctagccaattcggttcctggtgatggtctcttcttgatttgtatatggctgtgtcctcacatgggcttttctctgtgcctactcatgcagagagagacttgtgtctctttcttgtcttataaagtcaccagtcgtatttgaccagggcaccaccccgtgtcctcatttaaccttacttacctctgaaagaccctgtctctatatacggtcacactgggggttagggcttcaacatataactgccgcgggggggggggggggggggcaaaaaaaaaaaaaaaaaaaaaaaaaaaaaaaagtccctaggatagcccaaaggctgagtaggtgaaatctttatcattcaaccacgagatggtatcatcttgaagctttctccattttgtgcactatttttaaacaggtgaagatgtatcattttataaaacacttgacatatacaagaaaatgttaaatatttggattacattctaatgcatcacaaaataagttagcaaagaaaatatagtattgtctgaactgatggtgcaaaagtaatggcaagaaaaaaatttcaaaggtagttgtctgtaaaagctgttagcgaaggctggtaggaaaagttgttaccagagttatcaggtagtcattargtttcatacagatgttaaaagacatgacattctttagaaataccaaacaattgccaattatttgttactggtgtgggccatgagttctagaatttactattccataccaaagatatttactgtactaaagtagagtacagttgcagatacttcacgcagaataagaagccgctggggtttgttctgtttctgcccgtaaagaaacatagtttgctgaatgtccctcaattacagcatggccaccctttgcctatcacttctcagttacctagcatggggttacagtgttatccatgctcaacactgcaagccaaagtgggccatagtaagtgtgttgagtaaatggctagtactgctgatgtttttagttagagaggtggggtggatggtcctgccattaatcaagaaaaatatgggaaaaggaacagatagtggtagatgggagagagtttttgaagtawtttcaggagatacagatagagatattcatttcatctttggaatagtaggaaaaaaaacaagtaatattttgggacaactgcaagtcatcatttgaaagtaagctgaaaaacagtttttaattaaagagtatataccgttgactcagtttattatggaacagaaagatcaataaggagaagaaataatttaggcttaaaaaatgggaaaatggataactagttgatcacaatgtttatctaggaaacctggatgtatgatcctttctgttttatcactctagtgatattttattgaagtagtctcttaatgttccaacatgtaatttggtaaattacggtatattcagttactaaaacattgattcaacaataacaatagcttattttactttaacaaaaccctgtccagagtttacactcaacccttgggctcttaagtatatgtataattcaactggagtgcttatatccaaaagcacaagtacttcttgagtctggagcttcaggtttagtagataatacaatgtagctattttacattgcttgcattgtacttttgtcttcccttaccagttctcctcactttcccagctcatattcctatttgactctagaggcgcatggaaaagtatacaacagtgtggtctttctgcagagtctttgggaacagagccacctccatcttcagcttgctctggaaaagctgaagctgttcaccaaaactctgcccactgggcttctcctaagcgggttggagaaaggtgctcatgggcctgtgctctatttacaggtggtccccatgcttcccaggctgctgtgtgaggagctgtgcagcctcaaccccatgtccgacaagctgaccttctctgtgatctggacactgactccagagggcaaggtaacaacttacacgttttctttctccacttacctcttttctgttccatgagtcatgaagcactcaccatgtgcctggcactggcttgggtgccatggtggtaagacaagggaggtatggagtagccatcatagagaaatgtcagagtccctgcctcggaagagccgttggccccacttagaagccaagactgaccttaagcacttagaacaggcttcttgtctgttatcaggtgaaggaagaaattgagtaagcagagtgatgccggggaggcttatgcaggagacagggtgtaagtgggattgaatgaggattggcaaaggcaggaggggcagcccagcctgcagttaggagagcagagcctgtttagaggaggacattaggtaaagtgggaagtttacataggtggggtgaaatcaaactggagaatcacaaatgaattgtaggtgttagggttcctctgaagtgtcatgagaaagctgattgtagaaaggtcagtggtgcatcgtcatgctggatgattggagcggtgaagatgaattagcaaggtagtgctataatcawggcacaaggtggtgaaaccacagaccaagaacagaggagagaaggatgtcagcaggggtttctgggcataaggaaaaagatgtctgtgcctgtcgtcgggatgtgcctatgcgtatcatagggaacggcaggagagagatacatgaaagagaaactagtcccctccctgcaaatgtaacaactccaaacattcagaagtagggtcgtgattaagtaagccctggtgccttctcagtggaatatatgcagttattaaagttgttgacagagaccatggaagaacatgggaagtgtttatactgtaatattaaatggaagtaaaaaaagatatttaattataaagaggttccaaataaagatagaggatcaaatacccacatttactttcattccctcccaaaacctcactaaaacaacagtaaaaggatttttttttttaaagacataaacccacaaggacaaagagagtgggagaggagacaacagcaacaaaattttggaatctgggtagcagatggatgagtgtaactgacttagsagtcctgagaaagctgaatcctgagccagcaatagagaaagccaagaaacaacccagtttatgcagcagaaccctaaacaattcagaaattgacagtaccagataattctagaaagtgggggaggggtgggggagagtgaggctaacaacagtattgaaagtttatttttaaaaattgcccctcctrtaacttagtggaagatcagaaatgtgttctctagacagggtaaagtaagaggtgtctgaactagaggacatcaaacatgcttgatggcagtgacaccttgggggagattgagtgaatgttggcatactgaacgttaagagtgtcagctttctttttgctgccagccccagaattctggtcgccaggcctatatccatgagtcgggacatgggaaaatctctgaggactctgaatagtgaggaataaaaacataaagatactaaccttaagagtttcccaatcagcagcccagctgtctttccctacagtaaagcttacagacaataagcttcacccgcacaatcagagctttttaggatttcatttccatatatgaagagacaacccgagggaagcttctaatgtgaaatagggaggctattactaatgcattgattcaacaatagctttattttactttgatgaaaccctgtccagagtttacacttagccctagggctcttaagtatatgtgtaattcaactggagtacaaacaaaacaggaaagaagtaaacaaacagaaaatgaagtaaacaggaaaaagtaactagaacaaaacacactagcagggaaaagaaattatcacttatatctttagggaatttttttaaaaaagaaggtagctgtatcacaaaatcttgatactttaaaaaggaaacatttggagggaaaaaaagagctcttgggaattaaacacaggttagaagaattaaagattcaagattcctactgaaaggtaaagttgaggagctgtcccaagaagagacagaaaagacaaaaaattagaagactagtccaagatatacaatatctgttcaatgaccgttccagaaatagagaacaaagtaaacagaggaaaagaaatgatcaacaaaataattttaggaaatgccccattcctggaagatgtgattttccatattgaaagggcacactgcctagcacaggggtggaggcacatcatcaagacacatcattataaaatttcagaacactgtggacaaagaaaaaaagacatacgataaaatcggaaatcagaataacttcagacttttctaccacaaccctagaaattagatgacagtgaagcaaagctttctaatttctgaagaactgtgatctccatgccaaaattctgtacccaacgaagctatcaataaaaagggtaggaaaggacattttcagacatacaaggcttcaacaaaaatgtccatctcatacaccctttctcagaaagccaccagaagatgtgcttcaccaaaatgaaggaggagtaaatgaagaaagaggaagacatgggacgcaggaagcagataatccaatacaggaaagaagtgaaggaatcacttagatcagggctggcagacttttcctgtaaagggccagatagtcagtatccctgtcacagctactacactgtccttcaggtctgtcttaaagaagatgctaagtgccaggtgtggtggctcatgcctgttatcctagcactttggcaggccgaggcaggtagatcgcttgaggtcaggagttcaagaccagcctggccaacatggtgaaaccccatctctactaaaagtacaaaaaattagctgggcctggtggcgggcacctataatctcagccacttgggaggctgaggcaggagaatcacttgaacccgggaggtggaggttgcggtgagctgagatcgtgccattgcactccagcttgggcagtaagagtgaaactccgtctgaaaaaaataaaagaaaaagaaaaagaagaggacgctaagctggatcctctcgtgggcttctacattctgtctgttagaatcagttgttttggttgatgtgtagatatgtagctggaaaagaaaggagcattttaataactttttcagataattgtggctattcatttttgtactacaccaaactttaatagtttctcaaaagttggttgggccaggcacagtggctcacgcctgtagtcccaacactttgggaggccgaagcgggcagattgcttgaccccaggagttcgagatcagcttgggcaacatattgaaaccctgtctctactaaaaacacaaaaattagccagatgtggtggcatgcgcctgtagtcccagctactcaggaggttcaggtgggaggatcacctaagcctgggaagtcaaggctgcagtgagccatgatcacgccacgcaatcccagcactttgggaggctgaggcaagaggattgcacagcctgggcaacataatgagaccttgtgtggatgaaaaaaaataaaaaacagacaccagagagtgagctctctcatctccccaaaatacccaagtctaaactatagtttgtgtgtcagttgttccttcaagtaaaaatggtgttccataaaatgagcaatcagttcacttcacaactcagttatgtaattgcttttcctcaagaccaccagcgtacctctacatgcagcaaaagtgaaaaagacaagcaatcaagggttgagacatcataaaattaataatttttactcctctgtccagagcattcggttgttcgatacgagtatgaggtattggagtgcaatagccacaggtgtgcttgtcggatttgcaccaaggcagccactttacccacgagggcttttgtgccaccagtgtaaatgtcagcacgtggaaaggacaaacactgccttagtatttttatgaaaatagttttaacctcctggattcctggaagggtctcagggatccctaggggtacatggaccataccttgagaaccaaatggacagttggtggaaagtttggggtagattaatatacatagcacacagaaaaaccaagcaaataaaaagacagttattaattccagtgagaataaaaagttgtatagaaaagaaaagtaacacttagtatttatgtaatcataatagtagattgataaaatgaattctgatcattgtcatgtattaggaggattaaggactagaatagttacgtgggcatggtgggggagggagtgtgtatggaagaaaaaataaattatcttctgtagtgaaaagtttgcaaataatgcctaaaaaaaatcaggaagtagcagacaggttatatagaaagttaatatccaaatactcttttaaaagaggtaaaagtagttactcttgggaagtaacagagagggatgggggctgctgtttttcataacaatactttaaaactatttgaactatgtatactttaatatttttattgtgaaaaatttcaaacatacatgaaagtaaagggcacaataaacccatcctccccacttcccagattcaactatcaagacagagtgttttaaaacaaaccacagacatgtcatttcgctcatacatattttagtatgaagctgaaaarattttggacattttcttatataccacagtgccattagcacacctaacagtgactactaatgccttggtgtcattctgaacccagtccgtaatagatttccttsctttctcccatagattttcctgaattgggatcaaaacaagttatacacattatatttggtttttatggctcttaaatatcgggttaataaaaaaaaagcacccttttaaagatttttttaagagttaagaggcaaacgctatctgaaaacagaaggaattatgaggacagtatgccagcaatcatattttggtgggggtgggagcatgcataggggaaaaaatgaatggaaaaagaccagtaggaaataaaatcgaatgccaatagcggttatgtttgggtagtaaaactatgagtaattttttctacttttttgtattttctaatgttttttgaaaacgtgtagcttttatgtttttataaatgcttattttcgtgaaagtttaactaaacagaaaataaaagcccatagaagaaagctaacttgagtcaacagaaaagaactttgagtctgaattttgcctgccaaagtcagacccaagaaataaaaagctgcccaatctaatgagcttctaaaatatgagggtcataaaagaagcactagaaagtggcaaactctgtaactcagttggcctctggggtttctgttggaggtagtgtctggtgcccaggccactggcattagggactagagagcaggtgtgaagtaggcacaggatccaggaggggctgtgggcctcagtgcaaaccaagccagatcggaagtaatgagagtttggactagagacagagttgtagggcaaagcccactaaccacactccttgtactgttggttatccaaacaccctgcccagaccaagcgaccacatgagaggtagacctggttggttagtcctgggatgagtatctcttacccacaatcaagatgcatgaaatgagaggtcagattccagactcacatccaagggatggtccttcctcaagacactggcaaggaaagcttgagtttagcaagggctgggggaacaaagttcggaaccagatgggagggttagggagccagagaaggccaacgggcaaggggtagccctgcatcaagaacccagtgatgaagaggaggatctccgaagcctgtgtggccaaagtctgaggctggttttgcatgcagtggtgacttctcttggcgtaaaggtttggacttagaaggagtcagagcagggccaacagcatcatgccacagctgctgcgtagccaccagtctcacctggagttgaagtggagaaagctctgtatttttccttagtctattggaatggcttactttctggagcaggcatggtcagctatagaaagattgttccaacgttttcttaacgcctactaaatttttttttaaacactcacaagaaaatcttggacaygtatgcattcattaagctagtgctcaggcttttaggtcaataaacgctgaataatttatttttagcatatttctcacatgttggttgtgagagtcttattctctgacttagtaactaagtccttagaccttagaaccttagaatcttagggccaaagatcagaataataaaagaagggtctcacaattgattagctatcctcagtttgygtctcctgtgacatccctgctgtgtgctgtacaggattagtcaggacctggagtgtactatggaagtcgcctatttcagccatttacttaggtcaaaaaccacggggtcattcttgactttggtctttctctcatgctacatctgcatccagtctgccagtgtgtcatcgctgctttgctttctgaatgcctccagaatcagcccccttccttaactaccggcactaatacctgcgtccaagctattctctctcaccttgacagatacagtggcctcctgactgtccttgcagcctctgctcttgccccacgtyatctcctctgcatacagctgtcagagtgatccttctgaatcttaagccttgtctctccattaaaactttccaatctctcattcacaataaaagataaaacgcccccttacaatggtaactttttccttgttcttttctgcctgtcttctgtgctggaaatgcatrgactccagagtcttcctgcaaccagcatctcctctcatgtcctggagcattgctgctcacaggagagaagctgccttttatgtgtaactgagctctctgctgtgctgcaggccccctccccagctccagggacctgacatcagtcaaggttgagtttccccacctgccatcttctcatatccttcaagcctctgccccttccttgtagctgagcagatcttttcctccctgcttaactcattccattctgagaattggacattgtagaactatgttgtgtaccagttggggctttctcagctgaaccttcagtgctacttgggaatccttttattcgtcactaggttccaagmcttttttcttcggttccaacctcaaccttgctttccactcctctttcctttaagacccatcattctcccaagtacctttcattcctccttcttggaaacgagagaggctagccaacttcaactgctgaggtccccctttccacatcaaaatttctctctgccttgccgctacttaggaggctgaggcaggaggatcacttgatcagattgagaacagatcgagaccctgtttctaaaatataaatgaatgaataaataaataaatatttggctgggcatggtggctcatacctttaatctcagcactttgggaggctgaggtgggcagatcacctgaggtcaggagttcaagaccagcttggccaacatggtgaaacccygtctctactaaaaatacaaaaattagccaggcatggtggtgggcacctgtagtcccagctacttgggaggctgaggcaggagaattgcttgaacccaggaggcagaagttgcagtgagccacctgtgaagagaaagcgagcattctgctgggtgtataagtggattgtgtgcaatggtgcttcagtctagatattcatgccttaatcttactgtgttcgtctctccctttttcaggggaagcctgagctttgctyagtgatgatggccctagtgtgaggactggggcttgtggagtagcctcttgtttgctctagccaccccactgcctctgtcctctgcagttactaggaccttccctagcaagtttgcgtcctttccaccacaggcatgacctgcctctctctgctctcttccagcccgtcctctctctgcctagtccttttcagacacttgcttcttggcacctttgacttttctcactgccgggctgcccstactaaggatgattgccctgttttcgtagctctaagaagcagccaaaatccactccacctccctcccaccctccgtcactccaaacagcctggttttgttccagtcaggaaaaggtttctttcttcctcatatttttttgaacaaaatattttgcatacggaagcccggagctcctgcaaaagtgattttgtacctaattatttaagattataagttaaccccacttgcagttttttcagccagagatacatcttaatgargtgctgacatttttcagaggataaatttaaagatacatttgaatggaactgaataattttcaaaggaagtggtcatacttctgtatcaatatagaaagttgatgtgtgtttgagacatacttggtttattttacttcatcatctgcctctgtctaatttatgaccttcacctgaaatggaataaaagtaacactagattttgggtctgtctttaactggatctggtcttggccgccacttaggagtttgtatgacttttgacaagttcctggcctgttttctcaactgtaaaatgggctgaacaatgcactcctcccagatgtgttaaggagattttagaagtagtaggtttaagaatactccgagtgttagactacttccggtcttacttagtacagtaggtaggccttgaattacagtgctgtagtacataattatgtactcctttttcagtagttttttcccagtaataygccttcagtcagtgttggcactgtatttaatttgacattctgaacagtggtattccagagtatgtgcagtaaactcacctgcctacagaagagtgacccaaatcctgtgattaagaaagaaaagaggggccaggtgtggtggctcatgcctgtaatcccagcactttgggaggccaaagcgggcggatcacgaggtctggagttagagaccatcctggccaacatggtgaaacccygtctctactaaaaatacagaaaatgagccgggcatggtggcatgtgcctgtagtcccagctactcaggaggctaaggcaggagaatcacttggacccgggaggcggaggttgcagtgagcccagatcgtgccactgcactccaacctggtgacagagtgacagagtgacagagcgagactctgtctcaaaaaaaaaaaaaaaaaaaaaaggaaagaggaaagacatgatcttctttatgaagtgttttgtttctgaagctctccctgctgtttctactttttccgtgaaaaactctgtccttttgtcttctgccactggctttggttatgcactgggcattgatgtgaatccagtttccaaattggaaagtaatgaggtgttccatacagagaggcctgccttacatactgtgaggttggctattccgaggaccccctccatttggatctttgctttcttgctgcctttctctgtgtcagacgacaacagactcctttcttttctgcttggcgtctgcagaagatggtttcaggccttctttccctggcctagtcattttttagtacatgtcaggtgtgactcccagaagcactggactgtgttaaggcatagtagattcggctgccagaggtccctgtgcctgagcaggaagttcctgatggctcttcaagcttctacctcagcccttcgtgtatttaaagagaaggttgggatggattttcagggttgcaggcgttaaggaagacgactgaagtgaagcaaaacagctatgggaaagtgatcatcagcactgcagtctccaatttggtggtgttcctatgtgctgttaggaagggacatcttatctatcttgactgataaggaaacaaagtagaggtgcccattaaggaaaaaaaaaaaggagctcaaatgaactggtagccaatgccagcataggcggtgagcaggctttggtaaagagtgacaagctgctgctttgggcaagtctcaggtaatcaattttaggaataccttaggattccaagtggctcctggtcagggccagcaatcagaggggtgagaaggagctacagagatgtgcttagagccaggagacgtgggcctgcagggtacaggggtgtctgggaacctcgtggaacttgctgctacgttttatgcataaatatttcagggaggagggcctggagcattcactaagtttttttctgtttgttttgtttttttgagaccgagtctcactgtgtcgcccaagctggagtgcagtggcgcaacttcggctcgctgcaaccaacacctcccagactcaagcaattctcatgcctcacctttctgagtagttgggattacaggtgcgcactaccatgcccggctaatttttgtttttgtttttgtttttttgtggaaacggggttccattgtgttggccaggccaggatgccaaactcctgacatcaagcagtccacccgccttgacttcccaaagtgctgggattgcaggcatgagccaccgtgcttggccaaaattcactagattttgaaagcagttcttgacccatggcttaygtgaaagcaaatgcccgatcagggtgcagtggttgccctgtgctggagcattcactagggaaaaagaccgcagaccctgggaggctgcagaccctgtgacctgaatgctggatgctggagggaacctccagaccacttgtgaaatgtgaaagagaacagtggaatagaactgaaactgacgttccctgagcatgctgaaggcagactgtacagcccaatgtagacgcacaggaggagtgactgggtttggaatgaaatgtagaaaaggaagcaagctaaatcaccaggggaaacccttgagaccacaagaatgaagaggtcatggccctgtcattccagaggaggctggagcagctcttcaggaaatgtggatgtgcgaagaggacaagcctggctgagcctaaaaggggctcttcagactcttctggagacctgcacatggcactccccactgggactgtcaggtggtacctggaattgactctacagttgcttttgcccacagcacacacatgcttcctgagagccaaattcagacctgcttgccacagtggaagatttgtgagattatttgaatcccttatatctttggatagtggtagttcttggaataatatggaaagaatagtttcaggatttttttaaaagaaaagttaaagtcagtgattacagattcaagattcttataagactttgctctggataaaaatgtgagtagttgccaccattcttttcctctaccccatggctgccatttttcaagagtattrattcttcctttaagggagggtgaaggtaccaaagtggtctctccagcctttcagggcagaagctgtattccctggaggctttgtggtgtgaacagcacctgggctgggctcagtccttccccatggggaatgcctacatactcttcaactggctttttcggaaagcattgtctgagagcttgtgaacagaagggttggctggtgaagagcaaggcaagggggatgtctgcaagcccaggttaaaaggtaaaatgttctactcttgactggtgctccctcccttttcttgcacagaaaatacacttccacgcatttatccagagcttttccattctcctcaggccctcaaactccacytagcctcctttgtactttgcctcatgctcaactacatagattggggttctgtgatagtcatgctctcagcttccctcttcttcccttcagggtctcctgccctttccttccttccttcctccccaccaggctgggcttcctctgtccaggatggatggcctccatttggcccaagatcccttttgttctcttgtgtcttcagtcttccttcagtgctggtttctcttctttaccctacaactgccacacagccctctgttctgctcattccaaagcgctccttccctcctgttcttttggaagtggtcatccacactggttgcattgcctccgcttccgatgcccccacctatccttaacctggtgcttcccaggttttttcatgtcatgtcacacacagaagatgttgctgtttgagtagcacyggggacgtgtgcatgaggctgatgggaggccgaagctctggctgccctgggagtaagaagagctagagccctcctcacagcrtctccagaacccatttgcagtacatgccttaaacctttgcagtgtgactctgcccctgtcctatattttcctaaaatagccttcataaacaccaccagccagcaaatgctcaatgccaggagcttgtctttgttttctcctccttgacatccaagtggcattggacatacacttgcggtttagagagactctagggctggactgcctgggttcagttcccagctttgccagtctctagcagtgtaaccttgggcaaattccttaatttctctatgtcttagtttcctcaactgaagaagaggatagcaaaattcctacctcatagcattgttatgagaattaaatagttgccatatggagagtgtgaacaatgcctgtctcatagcaattgctctctgagtgccctgtgttgtctttgagtcccctttcttaaagctcttttctcctgcttttcctaacatcggtcactcctggtttttgtcctgtctctctcagctctcttgttttttctactgttttcattccctggcttctcttctctccttaacatgaaggaggtgttaggccaagcagccccacctcccccaaccgccctttcttccatagacccttccacctccaaacggcccaggcccacatccgaatgcctgccagatcccctcacctacatctctccctgaacctcagacctaggagtccccaaaatgttttaatgtcctttttttgttttaaaagtaatacatatttattatacaaaatacagaaaagtgaaaataataaaatgcacctcagtggtaatcccaccgctcggctggcaccaccactaaacttgggtatatctccttcaagcccagtggttctcagcctgggccagctttcccctagaagacatttggccatgtctggagacatttttgattatcaacttggtagggagaggtgctcctgacatccagtggatagaggccagggatactgctgaacattttataatatacagttcagccccctggccaacaaggaattattcagcccaacagtgccaagattgagaagcctgttctagacttctgtctctacatatgtgccccaaatggaaaagtcggaatgggtttcctctttctagcctcatcytgcttctccacctgtgttcactctttttgtcagtggccccacctcccccttctccctcactccacatccgagctgttcccaagcctgcagagtccctgtctgccacattgttggcagctctctcctctactactctcagtgtcgacattgatgcccactcaccgaaactaatgaaaaagcctccagcatgccttgcctgtgccactggtgtgcttggggaccgtccataggtgtccagtgcccattggattaattccacgccaggtggagactaagctccctgagggcagcagcttccatctctgattcatctgggtgcctagcctgaacctgccaccattccgagcacacagtcagtgctcaataaatctttgttgaatgtgtatggatgaatggctgaaggaagaaaaacctgaaaaacatttgtcctcacaattcccttgtaatctgtccatctttgcagatccttgatgaatggtttggccggaccatcatccgctcctgcaccaaacttagctacgagcatgcacagagcatgattgaaagcccaactgagaaaatccctgcgaaagagctgccccccatttccccagagcatagcagcgaggaggtacaccaggccgtcttgaatctccacggaattgccaagcagttacgccagcagcgctttgtggacggcgcacttcgtttggatcaggtcagtacgtgtttttttagtgtagccaacagatttgactcgtgcctgaacccagcgtggatgagcgcagcttggcaggcttagactcttccttccttctctttgctccaggcaccacactaaaatcatgttctctgaggccggcaggaactaactcccattcactctccaaatacaggatattatgcaaaatattctgtattttgtatgattccacaggtacacgaggcctaatgacatgagccaaggcaaagagtgggtctgtgtgggtggctctgaccaaaacccccagctggtcttccctggtaaggctgtgtccagtctgtgatcctcacctcaggtctctactcaaacctgttctttaatggaggcaagaataggagacacggaaatttaggaggcagctgaccagtatctgatacgaaggcttggaaaaaaagtatttcttcttatacctcatctcccaaaaaagagttatttgtttacaaattccagattaatatctgaagatgcagagaactgaggagactgtagaacagcggtcccattgttttgggcaccagggcccagtttcgtggaagacaatttttccacagaccaggggtaggggatggtttcrggatgaaacttccacttcagatcatcaggcattagttagattctcataaggaacatgtagcctagatcccttggatgcacagttcacaatcgagtttgagctcctatgagaatctaatgctgccactgacctgacaggaggcagagctcaggtggtcatactcactcactgctcacctcctgctgtgcggcctggttcctaacaggtcatggaccagtatggcccatggcccggcagttagggacccctgctgtagaacactggctattgaataacattggcctggattgttattgataactctgaagtctcacagccttgctggcagccctctgggacttaggtagctgtcacttaaacctgcttgaatttccatatctgagagtcggtaactgttaggacccaggatttcttttttcattgcttgtcagtatattacagaggagagactatgttttgtattatggactttttttctccttcatttatatttctcacccaaacactccttccttgcttgttgtgtgctctgggaagtttccacgtgtctgaaatgaggtgggtaggagcgtggaactgttcaccagaccgcctcatgcagacttctttcyctgagcctgtcagctgggagaaatctgaaaggccttgcaaagccttctgattgaagttctgattttatcctcccttttgcaacagacttgcacaaatgcttctaagcaggcattgcaaataggtgctgccctgggcctagggagaagtggctgccattgggaccagtggatgacctgtcctgcctgtgtgtggcagagtcagggtagcctctggagttctcctgctcctccttccccagcctgggctcgggcagcctgagcaggcctgtctgcgtgagaatgctgacagggagacaagaggcagagcggatgctgaagaagacagcagacatggtggaagagaaactaaaggcataggggattacagaatacctactttccttcctttaagaaatcattcatgggagtgtgaacacactctgtttctcatttacaggtggctgcctgattgtcaagtcccaggacactttacagttcttgcttcttagacttctgacctgcaccagcccctttgaaacccacctcctggttctctgtttctctttgtacatctccagtaatgtcctgctggccccctttgcagaagcctcttctgtccaccactttagggttggcattccctgggatctacccaacctttgttctttctgtatccatactcccaccctgagtgacctcttgtgattctaactactaactggatgctaacgagccaaaatctgtctctctatccctggcctccctcccccagctctagtccagccccacaatatctcagccagtgctcatccttccctctgtaaaacgcagtgatcagtgatgcagtaggtggcaccggctgtctagtactgccttctcccttggcccccaccaggggagtggtatgtgtattctcaaacctggctaggccagttgtacttgttgtaattatgcagtttaactaaatatcagggaaaccgatcaaatacgaacataaaaaagaagctgttgtttttataaaaactaagttaaatgttttggaaagacctggataaggataagtctttaaaaattcagttgtaaaacaggggataattacaaaatccattaagcattctgtattcaaattgcttcataaatgtctaaattctcattctttttaaagaaatcaaatggtaacgtatgaacagtgaattgtgagtgtagtttattcagaaaagactaygtagaattccggttagcattccctttttgaaagccttacatttacaaaaaattagtgaatgaatatacatctatataaattaaaacatttagtgatgggtttgtcttcctctgtttgattctcttctttttctaacttctagaataaccaaccaatggctgctgaagcacatcacaggaaagtttctgtcataacgttttagagactttaccccaccagtttgttgcaaagttcagttgaattaagtatatgaaatactgtaaaaactgtagaagactgtcaggtgatcccagctcatatgaggatagggtatagttgtcaaaatagaagaatgatctcagattattgatagataaagatctgttggcatgtctcagaatcagagtcttattgctgaaaatggctttggatatctgtctctattggccttctcaatttatcagttagagagctgaagcccctaaaggttaagtgagttgcttatatgcaagaaattcaaattgccctgtgttcactttgccttcatttacaccatgctgacttgagagagaaaaacattttccttttaagtggaaagaaaaccctccgaagtcctaattaggttccagttaattaaggtttgaaaataagggctttgcacccttggagttgattccttggttccccygaaaacaagtccatggaccccagctttggaaggaggagcacatcaatctcccacagcaaaggactctggtgaggtcatttataaatcagctaaatggccctattcagaagtcactgcatttgttctcctgcccctactgcctgccttgtcctcacaaaaatccatttttccttggtgcttttttgagtagcctactgtttggaattgttctctgatgctttgtttgcctcagaccactatgtccgtgcttttggtggcagtcctttaaaaaataaaaaataaagtccatttaagctagcctcaattagagatgagtctgtgcgagggggtaccatttatttacacatcatgcccttaggttcagaataagcgtgtaaaccacaagtttcacctttccaagaagtcagtttaccatgatgactttccgaatgaatgggggctgagtgtgcggcactagtatggtgattgtttgttgagttagggacctactagttcagaagtcatagcctcagaactgtagagcaacttgaccattgtgtatttgcagttggcaacttagaccggagctgcctarcccatgtctgagttagtgagcctcagccctcagggccacctagtctggccccagttccatgaaggccacctactagcagtcttgtttaccctagtgtgctgtcatatattagcatatgtatatactagttcatatcctagaactgtggtgggaaacagatagggaagcactgccttccaggtgggattacctgctccaaatgtctcctttacctacagttcaacctagttctaaagaggttctaggtacatgaatgactcctttgtttcattgcttagaaagcaaatgcagataccaaatgcattcttgtgctttttggttggatgggttgagtaataccccttccaggtagtttcttctatctccatgttttctgctgctaagttaattcttggacttaacatagatgtttgttttattttatttataacatatgtctctcatttctgaaaagggagctcccataacaggggcccagacttttttatgtttgtagtaaaaggaatcataatgctttataatcatatccaaatcttgagctttgggagaaggggaactgtgggaagtttgctctctgcctggttcttgctcagtgattcaggcccaactaatagactttgagagtaggggtcacagagtcccctggcacttctgcttcttgggacacgaagcctgttctcaggcaccttcccacttaggtcctttacagagactgcctgactataatgtgaagacaaggcctcaggcttcttagccatggcattcagaaaagataccaagggagggtggcaggtgccagaagaatcccattatgaaagtgtcttgggaatattgattgatttttaggaagctacacctactgcctgctggggttctctctctagcctcttcctcatcagtcaggtggcagtacccagaagccactctgtttgagggcttccatgtaaaataagcatgaggtttgcaggaagctgtgcaccatcaygggtcccctgacaggtggttaggtgatgtgagcagttccttctgggtcactgactttgggaattcagaggaagttgaagtagtggtggagaaaacctgatgttaccatcttcccaggcaaattactctcaactccaggagcttcacaactgcatcttgtataaatcctacttggtgcaattttgaaacccaaactgcaggcagtttctttgagtggacttgattgtaaagatagccttgttaatggaaattatttttaaataccctgggacccaagctgcagtggaatgctgttatgtatgaccttgacctgttccagcctttaaggcagggattgacggatattttctgtaaaggaccagatagtaaatggtttaggctttgtgggctgtgcagtctctgtctctgctactcaactctgctgttgtagtgtgaaaacaccagcgttgctttaaatggataaatgtggctgtgtttcaacaaaactttaagaacactgagatttgaattttatatagttttcacacatcacaaaatattgttcttcctttgattatttttcagccatttaaaaatgcataaaccagtcttagctcatgggtcatacaaaagcaggtttggcctgtggtccatactttgctgacctctgcttaaacagccagctagcaattcagccctgctatccagtgagcttttagcagctcatcatcacttcacagggaagccaggctgggtaatggagaacagtcgtgctaagttaactctcaggatggcttcatgcaattaggtaaattattcctttgattagtaccatgcttatccagtccaatgggaggtggggagtagaggaatgaatcagtttagcatcagttcccttattccatttacaggcaggtcgctttaattagcctgaagcaaaaggagcaggggttctcatttcccacttctgcaagctcagcagctcttcacagtcaggtcttcatcccacccaagcccacttgcagagatgctggctctgcctcgtgtaggtgcgctgaaggtggggactgctcatggcaaaatgtagcgctaaggaaactgtgtagcatttctcccccacactgcccccattgccaaatgtagctgtatgttttgttgaatctgtttctgttccttctctccaatacagtcgctttcaagaaatgagcattccagctctgctgtttaatatttgtaccatatatttgatccaaggtaggaaggatgggtacatttatcctgtctggctcttccttggtcttattatttatgttgtcacttaaacacacgaggaagctattgatcacagggttgagtatatttgtagaatcattctgttttcttagtcgtagagcttttctataaataatataggaaaataatgagagagccagcaggccacacagaaaatgtaaagtgatgtgacagaactctgcccatagtgcagtgagctgtcttggagaggaccagctcagtctcaggggttcagggaagattttccagcagaagtagtggggcattaggccttctaaaagacttgagggtctagccaggctgcaaaggcaagcagactgctggtacaagcatgggagggatgagaaatggcagattgttccagggtgtgtggtgtagggtgcrgagagagagaggagctagaggagacacaggctaggccttggagtctgtaggaatgaaccagggcagctatggaatgattttaaatatgtaagtgacatgagcagaactgggttttagaaagagcctcccaaaagtgaatagaatagaggaagtttataatccaagagagaaatgatgagggcctaacctgaggtagggaccgtggggtgagagaagatgatggaccgacccaagagagggaagaaaatcgacaagcctgtagcaaattgactctcttgattagatgcggaggggaggggcaggatcagaggctagggatcagggaatcaggtttccagtttaggcacatggtagtaccacctggggacaccaccgtggtggaggtcgagaagagagatgatgatttccataactaggcctctccggtcccctcttcttcctttaggaaggaagctttatcataaaagtaatatgttctcatgttagaaaatttagaaaatacaagaatataaagaaaaaatcataatcacctatagtcccatcacccagaaataaccatggttaatattttggtataattccttgtgcatttgccccttatcacttcatagcaggagggaagggtgtctagcataacatatgtatagtttttatttatattctgctcttaaatattacctaatgagtttttcctatgtcattaaaaaatcttctaaaacattataatacctacataatattctgtcatatgaatatactcttaaacattcagccactccccaattttgaatatttaaattagattctgatttttttggtactacaaataatagtaccatggccatggccatctgtgttcgtaaatctttgacctgatctctgattattttcttaggacagtcttagaactgtgatgacagcatcaaggatatggatatatttaagattaatactgaaacatattgccacattcccttccagagaggttgtaccaatttatactccttcagtagtatgtgaatcagggtaccttagatggaaacatmtgtcaggagttctctgcstacacrgagctctggcgcactcgcgcgckctctttwtctcgtcyctctctctctctctctctttctctctctctctctctctctctctctctctctctctctctgtctcgtctctctctctctctctctgtctctctcaggtgtctaggtctctgaaatatcccagtggttgtggtcttagattattccttcatctttcatattttattttcatgagctcctctctacaaagagctcaatgtgtcacagacacttctcgttgtgttacttattttaaaaagtacttacaagggtcctaaaatttaaaacagctgaaagaggtggttgacagtatcttgctaaactcttgctaatgctgagactggggaatgacccctgccccaagttaaggtcctttcctctcattagaatccttaaagaaacccattgtgtttgaagtggggctgasaactgttgttgcattctcagatcctcagagaacatttgtaacttcactagtcttttctcttacctcctgcgtgtattacctcttgggcattgtttgagttggtctgacatgaataattataaggaaatccagttgaaaacagaatcgctctgtataatctgtgctcccataagaattgctacacttctcttgaaagtagtagtaaacagtacaggaaggcttctgctagaagttcaaggcttccatttaaacattgacgacttactacttcaaccgtggagatagttctagagtcagcgaggcttgaagaatattagcctcctacattttcccagttaccaattttataataatattagcaaaattttcatttaaatttattcatctcatttataaagtaaatccacagccaagaatgtgtgccctcttagctgttcagcactcaggctatctaggacagcctccgtggaagagagtgggaggaggaagcagtgaggggtggaacaagctgcatccctgagctttggggagaacctgggagcgtgaatttcagccgtcgcgggtgttggaatctcccctttgagaaaaaggaagagacagagattgatttagttagtacactttatggaatcaaggaaagcaatccatggttatgcatcccaaggcatgaacaatagacaaacttgaaaacttgacctaattatatataagcaacactaattacagccacttatgtgtggtggccactatttctggcttgttcacgagtgcataaaaactaatatgtgtcattaagcatcagattcattctgttgagtggctcattattataaccctgaactcttcatgtgcttactctccttgtaggcaagtcacctagtcatttactcatcattttcaaaaattagaaggaatacaggttgcattattctggaagttgttaaaaatacagactcagaggtgatatccsaccagtacaggagggttgcttcctgtgtgttacaaatactgctcacagttctgtgaaggagccttaggcagcagaagacaaactttctaccctcaagctgcttcagcaatttgagaactgtatgtactttaaaaaacaccaataagataaaagcaagggcacagtctcttgaaacagggctgacagaatcgcaaacccgatggttatttggtgggatgggattagggaaagaaggccagtttggagggtgaagccgtgagccacactgtgatgaaagggaaaaggagctgaaaggtatggagtacccacgctgtgagaggtaagggatttatcccctcactcctctctctgagtgctgaacccactgagaaatagtcaygcatatcagactgagattattccatctattactgataccgtttgggttagaaggcaatctaacagaacagcccagaagtagttaatgtaaaaagaaactgattggagtgattagtgagagcagaaagtagccagagacagagagaaccatgtcctctatcagactggaactggggatggcccttgtgcgaccttctctgctaggtgcccttccagtgcagggtctgctggtgaggaccagtggctaatgcttctgctcttggtcagaacagccagtgcagatcctcagaagaactctgaaagcaaaattgactcccaccccacttctagaagcatttcacttgccttctggttctttctgcttgcctatatccaggctcatttcttatagatgaagaaagtcctacccccagcctactcctccaccttcaccctgtgaccttctccaccttcaccctgtgamcttctaggttcaccttttgaagctgaagattgaaactccaaatcctgctgcagagaagttcacatttgtttttcctaggcagggccagcccatccacccctccttcctagggttyccctgatactttatttatacctgttacctgtctttatcacactgtcacattgtcttgccattttccttttgcttccctgtctccttttctaagattgtgagtttcttaagggtaaagacaacatcttgtccacctttgtatccccagcccctgcccagtgctcatttttaaccaggcatttcaaggtctttaaacatcactatacatattgatcttttaaaaaagatgatggtagctgtgttcaggagagtggattgtagctctagaagagaggcgtgtttatataagaggattagatacatattatgagccagggcggttttctttccttgtgaatgaaagggctgggtgtttgattatttgctggggcatccagggtttagaacaaggtataatgaggactttctcaaggtggagttgcctgaacaggtgtgaggagccaggaaacttcggcacccccagggcctggcagtgcttctgaggcatcctgagcacttcggtgctcacttctcagaccaactgtgtccccttcaggggagcatggtggaaggggcactccaggggaagggaaagagaccccagtgtgccatgctgggaagggagatgctggcctgctggcatggaaaggtagggaggcaccaaacttcagaaggttctctagggtcagctaccattagctgttagtccctagmcccatgatggggatgaaagcgatttgtgtatcaaggtggctgtgcagtctaatgctccttctgcaaaattctgatcagaacctatttttgcttttaatggagataattcccataagacagaggttctgtgttagctgctgctggactgtctaagagaggaagataacttatatcccggttgaagttgaaagtgtgcccagatgactcaaacctaagtgcctcgcatctccaggggacatgaagtgagacatagggttcctgcactgaccaggtgataggaacttccaggggtgagcagaaccccagccagcaccccttgttcctctcagagatgtgaacctttcaagttaggggccttgacaaatggaacagaatttggctcctctaggaccctggcttttgggtaattatactcataattaggcagcacttggactctcctctttctgttcacgggacacactgcacgtccttgccctgcctccatgtcacactccacgtcactcatatgtgagccaaacagctacatcagagacgtggaattctttgacgttagtaaaacctgcattagggaaggggaacccttgcagctgacccttagatttaaaccatgactgcttcttgggacaggcccagtttatttcggttttcattgttcagtgagctggggctctgctgcgaaggccagaatccttttgttctgtttgctctctgtcctaaaggctgctgccagactgagtttccccaaatgctgctttccccttgccactcaagagcctgcagtcttattaagtaaatatcatggatcagtaagatttccaaaactgttttgaagacaagatataataagattgttgcctttttactttaccaagcaaggacattttctttaaaaagccagttaccatctactatcttcattattttataaatgaaaacattttagcatgaaaacaaagacgacataatttcacaatatggagcagtcttttacgttgacttggttgaacttggtggaaacctatttaattgtcctatctttttctcattttgtttgatctcaaaccagcctgtgagaacgactggatttctacatcaaatctaagtgccccagcctttgggggcctctgtcaggtagcctggtgtgggtgttccctgcttcccactaacccctatccttcctcctccctcctgccttgcctctgtagagtctgggcctccatttgatccccgcaaccctacacacctcactccctctagaagcctgctccaaatagacttcctcttcctccaatatctctggccccattccccatctctcccctaggtgcctggtgcggaacaccatcagctttcattcgttttgttttgcggttttctttctttactcctttttattttcctccctgcctgcattcttgactataactgttaagaaggcagatgtcttactgttgcttccttcagatttgtaaatctagcatggtgctgggcacagaagaggtatgcagtcctttagtggggcatcactcggctagctcagagctgttcacagtgatctgatgtcacctctgaggtccatgggtgcccagggacactgtgcccattgtattgtctacaaggtgaaaatgtggtactgctcttcctcaagaaactcccacatttttaaaagagtgatagtattgtagcacggtttgttttgctttataatacttcttgattcccttgttaagtgacatggcagatatttttagactaaagacaatttaagagctttaaattattttaattttataactttaaaatattccttttgatttacctttttaattgcccacatgtttttttagtatctaccaggtacaaggtaatctgctaggtgtccgggacaaagacaaggttagaacatggtcacagcactcagagtggcttactgtctcctggaagacgtagaggcagatgggacaggggtgcacaggaagagcctggacagcaggtgtgcacgtggctgctttcgtgttctacagtaacaccagctgtggtttgaaggggccactttcaaagtcagttagaaatgtgggaactgtttaaaagttttctcctagcaacttgctcttatactagaaatgctaaaaacaaattagaaattatttaattgctccttgaatcgtgacctcctggggtaaaggaaatctgccagagtagatggagatgagggcaacacccagggagggaatcccaacaggtttcttatctgcttgtcagcatgaggctggtagcctcctaaataagaagatgtgctaatgaatagcagagtctactggtttcgaagcacatttgaacagagagctgtgactgagctctgagaatgctggcttggccattaggcagtttgaaactgatttgctactgtcagtttcgacccgtaaataacagggcgctctcccctttcattctcctgcctgccacctgccagccaagctctcaggcttacccacctccctggtggctatgccagagcacagctgagctcacctcgaggggagcagagctcctatctttcctggaccctcctggctgcctagtttcctggctgggattcctgacccctggttgccaagactaccttgttggtccctgtggagttctgtcctgtttgcccagaggcctcgctcagacttgttcctttttggtacatgtttccactccagactgccccaggccccaactctcagctctcctgttgctaccagcttccagtcaatgactgtttatttgaacatctcctgygcaacaagagaatgtagtgatcaagagcatggaccctgggtcagactgcctgggttctgatccygactccctcacttagctgtgtgactctaactcttctgtgcctcagtttccttgtcagtgaaatggagagcataacagtacctacgttataggaatattaggttagatgagatgtacccgtaaaacacttggaacagtgcctgacacatagcaagcacccagcagggattagctgtgtggccagatggtgagaaagggcccacttctgtcttcacagaagagctactttaacacagaggtgaacttggaaggactacagtaaacgatggtggccatcagcagccatggcatggagacatcgcctcctttatgatacttccagtcgatctgggaggtgggggaggatttgaaatgtaaatgcaaggcagagtgagcctcattgccccctgcagggaagcagaacagtctggtttggctaggtccctgaagggagctccgtggtgagggatcagcctaggcatggtggtgctgagttccttaatggggtaagatttgggagcaaggaaggcaaagggatgcagctctgaacatcacgccccaagtcacgcaaatgtgagctgcaaagtatttcatcctgttttgataactaggccagagtgcatcacacccgctaacgttggtgcagctggaatgtttccagtttttgctgttataaataacactgcaattaatactcttatgcataaaattcaaaaatcattttggattatttccttaggagtacattcttaaaattactagattgaaggaaattaacttttttttctgtgctacttttctctttcttactaccttttattattttattataaaagtaatacatatttattttataaaaatttagaaattgaccaaaagcagccattgttcacctatcactgagtaataacatttttctatrtatcctaaggcgtgtacgtgtacatttttagagcttttgactttgagattacagtcacacattgcttaatgacagggacacattcagagaaatatgtcgttaartgattttgtcagtgtgcaacatcatagggtgtacttagactaacctagatgggatagcctacgacccacctaggctttgtggtttacacagttgctgctcctagtctacagacctgtacagcatgtgactgtgctgaatactccaggcagttggaacaagtgctatgtatttgtacacttaaacgtagaaaagcacaataaaaatatggtattctaatcttatgggaccactggcagatatggggcccatcgttggccaaaactttcttaatgcagcacatgactgaattttccagaaaggttagactaatttaggttttcctcagcaggaaacaatagtgcattgttactgcttctcactaaattgagagtttgttaatacgatagattggaaattgtgtttcattattgctttgactcgcatttgttttcctgcttgtgggctcaatcaactcttcaatcctctttttgccatttctgtgaaagggcacattttaccattttatatggtatcactagaatcttataataccttaagcactagacctaccagccacatttagctaaaagcacttttttccctgctaaggtatacttacatacagtaaaatccaccctttttagtgtacagttctgcaagctacacgtatagtcatgtaattgccaccacaatcaagatacagaacaattccatcaccccagaaaattcccacgtgcccctctgtagtcagttcctcttccctagcctcagcccctggcaaccattaacctgttttgcctctttatagttttgcctttccagaatgtcacacaaatggaatcattccgttggtagcattttaagtctggcctgtttcacttagcatgaaagtgcatttgagggtcgtccatgttgttgtgtgtatcagtggtcattcccttttgttgcagagtagtattctgttgtatagatataccacagtttgtttatccacttaccagttgaagaatatttggctagtttccagtttttggcaatatgaataatgctgtatttgcctacaggcttttgtatgaccattttttccattttacttgggtaaatatttggaataagattgctcggtcatatggttaagtgtatatttaacttcataaagaacttccagttttccaaagtgactataccactttgcattctcatcagcaattttttgtttgtttgtttgtttttgtttttgagatggagtttcgctcttgttgcccaggctggagtgcaatggtacaatcttggctcactgcaacctccgcctcctgggttcaagtgattctcctgcctcagcctcctgagtagttgggattataggcatgtgccaccacgcccagcttattttttgtatttaatagagatggggtttcaccatattggtcagtctggtctcaaactcctgacctcaggtgatctacccacctcggcctctcaaagtgctgggattacaggcgtgagccaccatggccagctgagaattctatttcttatgtgcttgtcagcacttggtattgtcagttttttatttgttttgttttttaggtgtggtgataggtgcatagtggtatttcattgtggttttaatttgaatttccctaatgacaaattctgttgagcatcttttcatatgtatacttgctgtctgcatatcttctttggtgaagtgtctgttcatatcttttgcccatttttaattgggttgtttggtttcttattactgagtttggagaattggtgtgtgtgtttgtttgtttgtttgtttgtttgtttgtttgttttttgagatagtcttgcactatcgcccaggctggagttcagtggtgcaatctcagctcactgcatcctctacctcctgggttcgagtgattctcctgcctcagcctcccaagtagctgggattacagacaaccaccaccacgcccggctaattattttatatttttagtagagatgaggtttcactatgttggccaggcttgtctcaaactcctgacctcgtgatctgtccacctcggcctcccaaagtgctgggattacaggcatgaactaccacgcctggcctggaaaggatttttaaaaatattttagatacaaatcctctaccaggtttgtgatttgcaaatactttctcctagtctttggcttgtcatttcatttcttctctctccattctctctggcttatcttttcctgtcttttgaaaagcagaaatttttcattgttatgaagtccaatttatcaatctattttatggattgtgcttttggtgtcatatctaagaaacctttgactaacccaaggtcagaaagattttcatctgttttcttctgaaggttttataattttaggatttacattttagtttcttccttttttaaaacatattgcccaggcctagaagtttcttttggaaaacagttgcacctgagaagatttgggatggagttggtcctaggagccttgccaggcatgatgctctctgtgagccatctgaaaaggaggtgtgtgccttagaagttgcccgaggggtggcttttaaacagataccaggcttctctggcttaagatttggcatcaaactgaagattgtatcatttgaaaagagggtatgggatgattagagaaaaacctccaaactttctagataagtccttctaactgttgcacaaagttgaaatgaagaatggtgccaaacacaggactttgccgattacatgtgaacacccatgtcagtgactcacccaatcatgctttaatctcataactgagaggctttaaaaaattatagtcarcaaggcagcttgctagttatgactgccattggaatggagttttcctcagaacagctggagtgtaatgtggtgggaagaaagcctggtgtgggtgagagaccaaggattgcttgcctgggaaggatgtgcagctaatgtttgatggaaatctgtgagatgaccaacctcagccaagctacatagaggccctccatacactgcagccgaagtgctcagaaaacaacaatgataattggcactgtatcaccgcaagagagataaaacacagctctgtcttcaagaaatgcatggtccactctgtgatccatgctaggttgtagaagctggcagaagattccagttccagtaaggcaaggcagttgagagcagcctggaaatggcttctccaagaatgtcccaggcagagcattgccrtgggttggtttgttctggaatgtacaggccattggtgtggctgtgtcagaggaagggctcccagtggtggtgggaaatgttggggatgtaaccagggctgatctggaggaacttgtttgctctgccttgaaatatgagtgttttcggctgggcacggtggctcacacctataacccagcactttgggaggccgaggygggtggatcacaaggtcaggagatcgagaccatcctggctaacatggtgaaaccccatctctactaaaaatacaaaaaattagccgggcgtggtggcgggcgcctgtggtcccagctatttgggaggctgaggcaggagaagggcgtgaacccgggaggcggagcttgcagtgagccgagatggcgccactgcacttcagcctgggtgacagagcaagactctgtctcaaaaagaaaaaaagaaatatgaatgttttcttgaattcaacttggtgctgttgaagcattttacatataggagttgtgggatgggacctcttttttagaaagatctctttggcagctctgtagagaatgagttggaaggggtcaaggtgtagacatcaaggaagccagttagatggctgtggctgtatgcaggtgaggccacacagctgacaggagggaacagatgagagaagtggaatcagaaccacaaaagggaggggggacacctggatatgcccaggtttctgacaggcaggaagacgtgccacccaggagcatcatcggcaccacccaggggaggaagagcaggcattgggtggagaccctccaggcttgaggtgcgtgagctgcccacttaaagacgcttgccaggtggctggaccggaagtctgctgctcctcttctaccttgccacaggctgctgcctctgagttaaagagacatgggaagcatcgggattgctcatacctcccaaagtacagcaggaaggactagaagcaatatgaaatctaattggcaagaccacggtgagcacacaggcacttaggagcagcacgtggcacccatgaaagcctccatcccctgacagtgagcccagaggctactgtggagcaggaggaaaccagccgtccttcctccttgcttgcaccctccctcctcacctcctactctctgtctttccagctgagcccttctcgtttatttaaaaaaaaaaaaaaaaaaaaaaaagggaattcactcccagtccttttgaaacccaacatgtcagtgatagatgagggcgtattctgtaacttcaaaggagaaaagttgagtgagtgaatgtgggccagaggagttgaaaagtccaagggaacaggagacccatggggtgaccccaccatcaggaggagtgccccccatcccacccctgctggtgccatgcagaggcacagacaatgccactttcaataaatcatgaaggattctgaatgcctggttttgtcccattttcaatgggccttgggcatattgctcagatatagccagccatttgtgcaaggttcccagctactcaaaggctcaaagtcgagtgctctttccactatataatggagtcttcacatatgtgattttgggggagatgttttcagatttccatagctagtcatagtaaagatgacctcgtgggcagttcaggccattgtccccttctcacatccagcctttgagtaaggctgcgctttcaggagtatccatgcagcacctaattcaatcacacatctgacccctgcctctctttcgcactggccccttctctgtgctyagtgtgctgctgggggcctctgcacaaacccggctgttctggaggcgtcctgtgctaagcagagagcacttggccattttccccactttctgaattcagggccccctggtgaatctggcgtggggatggctgcctgttctcatgaggctgcgcacatgaaggcgcctgttggaagcgccttttaagaatccccaggttgtttccatcctggagtcttgcaaagaaagaggaagaataacctggggtcatttaagggctggcatggtcatttccttaatcatctgtgaccactgagagccttattttctataaagaagcacagaggcttctttggctttgctttagtaacaacaaacagctagaatttattgagagcctgcagtttgccaagtgctttcacacattcgatcatttaatcctcaagccttttacccttgtttagagatgaggaaactgagacttgagcttaaacacttgtcaaaactcacatagctagaggtggcagaactaggatggaatcatttctctttttatttgaggcagggtcttgctctgctgcccgggctggagtgcagtggcatgaacatggctcactgcagtcctcctaggctcgagtgatcctcccaccycagcctcctgagtagctgggattataggcacgtgtcttcatgctcagctaatttttttgagtttagtagagataaagtcttaccgtgttgcccaggctggtctccaactcctgggctcaggcagtccttctgcctctgcacccccatagtgttggaactacaggtgttgtgagcgactgggccaggactaggcccagtctatttcttattctgcttactttttcatttctctcggtagatgttgatgttgttttatattcttctaaaaatctaaaaaatggatcaagtcctgaccttaggattatttgaagagctatttaaaatgctgtatgattccatttaggtaacatcctcaaaatgacagatttatagagaaggagaacaggtaggtagttgccaggagctagggatggcggggggagcagagggtggcccaagggagagctgtgtaaggatgggacagtctgtatgtagattgccatggcagttacacaaatgtacgtgtgtgaccaaaatggcataaaactagacacacccattatgccaatgtcagtttcctgcgtttgatattgtgctataattatgtaagatggaaccttgggtggaaattggagatgggcacgtggaacctttctatactacctttgcaatttcctgaagctataattatctcagaataaaaagtgggttgttttttttttaattcctctgtgtgcaacaccagcattgcccccaggaaatagccaggtctcagttcaggggctgcttgccatcagaaagcaagccacatcacacagtcaaagttggcctagaagtggggcacaaactagaagagggtccaggttttatcgcctgtcagatgtgagcttaggctctctcgacttatgggaaagcactgaactgagagtcagggcccccgggctcaagtatcagggctgcagttgtgtgacccagagcaagcttctcaacttctgtgagcctccagcttcccagctgtaaagtaggcatggtaactgcacccaccctgtgagtctggcagaatgtgttgatgtgcttagtatcatcttcgataccacgatcaatgttattattttatcttttcccaattttactcccaactttgcagtcagaccaatctcttgtgtattcatggaacattgaatattcattcttattttctctgcttttgatcatttattccttcaacaattattattgagcacctgttttgttgaaaattctggaaggcactagggatacattgatggacatgccccatgtggtctttgccccgggagagctaaaggtctgtttttttccccatcacctggaatctctcctgagtgcatccatcgttcagatccttgctgtcctgccagacctgaggcctcatctacaccatgcaggcccctctaccagatcattctctaagctccctcagtattagaggcagtgcagctcagtcatctttgccaacctttatcctgaacctcccatgggacctggcatggagctgcrcaccacagagagaatgcttagcaggtgcttgcccacagaactgtgaaaggagagcccgaaggagacttagacaggagccttttgaggctttcattttacagatgaagtcctgaataggggccctggactaaataatagraagtggctataagggtccccaacccatttttaataggataatgctagttcttatattgatcttaatttttgttgttgttttgggttttttttctttatttctgttctgcagtttttggactagctgactgacatttcctcttttaaccttttacagaccctgaaagaagctctagttcaggtcttattactacttagctgtgtgactgggccacaactgggggcaggttcattgaattgaaaaggtgaagccaacctatctctcacctgctctccctgagtggactcacctagcacctgcaggctccaagcttgacattgcctggagggagcccacccaggcatccccttcctccagtccagcctctccacctgcaactgggtgggtcagtctactgagctctcacctgattcttcagcgcccaccttaattgacagtgagccttgaggaggctgacattcttaatgccatttgcagttctctgttagaatctagagaaggggaaaggtaaattgttgcaacttgcagcctccaacacagtgtccctgtttgtgggagaagaaacaggaagtgtggcccagtaggaaatgccaagactttagagccgtatgggtttgagttccatttccaggttggccggggttgatttatgtattgccagaccttgggcaggtcagttacttaacctccctgagcctcagttccctcacctttaagataggagcagtgatacctggacacttgttcctggcacagtctctggttgcatgtggaacctgtgattcctactgcttatcacggggccctgcattgccttaacttaaagcctttgtggggatcacaaagagtaaacttacactggggtttctctacagggacttaaaatctagttgggacaatatgattgttaaacaagtacacagctagagacatgtttcaacttgagaataactgagaagaatcaggccatgatagaagcaattttcatgtatccagactgtcagaagccagccctctgccatgctccaacaggctggggtggcctcttccttccccaggcagagattaatggacaagttgttactagtgctgaggttctgggcagcttccttgtggaggcacatctgttgacccagcagggccttggaagctttttttcagtcgtgagcttcatctagtggcatagggcctccctgatgctggtgctctggagctagcgtcactgggtcataaaatcagggctgccttgattttatcaagggctgaccccgtgtcagcacagccacaggagagcagtgtagtggtagtggggctgctgaggcagacagcaaggctttgaagcattgtatcttcctgctgcggcccaaggagtcctacagaaagcaagccacagagagagtgtttcccagatactgctcaggtaaagaaattggaccttattgttgtagaaattactcaggttttagagtgatcacatttggaratattgagtcccaatcagcttgttccagcatgtcatgttttgaattctgatctcaactcattatcaggaataacctctggccttactgtataatacatcargaacatcattgagtttccgctatagctaggcactgttattatctcttttttacataggaggcacctaaggtaaaagagattacatactaacaggaagtaaagctgggattcaaaacccagcagcctaaagaggctgtaccctttacttctctactaagcagccccctgttattggggttttatttttgagatagagtgtcactcttgcccaggctggagtgcagtggcacaatcttggctcactgtaacctctgccttccaggttcaagagatttcctgcctcagcctcctgagtagctgggattacaggcgtgagccaccgcgcctggcctgtcattggttgttttcataggtagaagtgttcacaagcagaagttccttccttttgtcaaaggtgtttccctggcagaaaggtggaagcaagagcataaactctgtctgacaggcagaaaggtagactagaagatctagactagactaaaaagttagactttgagatcctctgtctgtcccctgagttctagccctacagcctctagagagattacatggcagctagagggaaaacaagtttctgcttaatgaaaacattcccctaagattattgtgaaacttatttttttaacatttaacattgtgtctagtttcttaaatgattttcaactgtgagattatccaaggagttttttattaccaaagctaatttttcatagttagcattacaaatagaaagtttgttcattttccttctttttatcctttccttccccccgcgcccccccccccccccgcttttattacatagagacagggcctcactctgttgccaggctagagtgcaatggcgtgatcatagctcagtgccgcctcaaatttctgggcttaaatgaccctcccacttcagcctcctgagtagctgggaccacaggtgcatgcctgtgctgatttttaaatgttttgtagagacggaggtctcgctctgttgcccaggctgctctcaaactcatakcctccagcagtccttccatctcagctcccaaagtgctgtgattacagacgtgagccacctcacccagccccattttccttcttaatggatcctggcccttccaaataccctccatttggtctttgtatttcatattaacagtaaacttttgtctgtactgttttaaacttcacaatacgcgtgggttctttagtttttaccacagttaaaacagcatctcttagactgatatgtcattctgtaaagaaatagactatctaagacacaactaattatcttggaataggaacttcaggtaaccccaggtatgggccccataggtgtcccttccagactgttctgagcgaccaattaagagatgtcagatcaatgggcattttgtggctggatggtagtggaaagtgattcttctaccaggaggtgctgctaaccccattgttgcaggttgaagccagggtgtaggagcaggggagcaggcagctggggaaggaggtagattggctgccccaggtccagaagggacctgagatggcagtgtagttctggaatatgttatccagatatttggccttgtctgggaggaaggaagcagaattagcacggaatcaagtcctgaactttgatgggagctcttagctgcgtaagacagccttatgcaggagaactcttcactgccacttggttctcattaaaacatctgaagatgtgagcactggctcttctgaaatcgtagagcgtctcttctaactgatatagcaggggcttattatgagtgctttcttccagcaaacctagaaagtgtctcacattcacccgtaaaacaaaccatgaggacaaccatagaggaactcagctctgtttaacaggtagaaagtctaggaccatcggaaccccaccaccaaccccagaatctgggagagaacagagacaaggtcagagctgctggctccccgcttggggttatataactccccgactcctcaagtccctggaaactgaggccaattccctggaagatcattctgttctctgctgttttttcaagaatacagccagcttgatcactggctctgagtattgtatgggaatgtcccgttttcttttttttccatgaactgaatgcctaccattatggtcattgtttcatcagtctgtgtttaaacttgcctggatctcatatttttatgtatgtttggcttatattttgaagaactttgctttgtttatatataccctcatctgtttccaaaaagattttgagaggacttacaacaaaggaaatgaacagtgagctgcatttaaataatagaaagacagaaaatcagaatgaaggagaggagtgtcagaaagaatttgacatctgtaagggtgggcacagctcctgtgactgggcttcatgttttctgatttcaatatcacagatgcagtcgtcctgcttggtggcgtgggggagggagagtttacaaggttatctcttacaacaaaccccatcgaacattgagaattatttttcttagcacctaaaagcagcttctcacttaaggcttgatattggaaatattcagtgttacaacagtggacagcgtttgcattttgggcaaatgaggaaagagttttttgttttttgttttttttttttggagacttgtccaggccttgcccagttactggcccgtgttcttgcctctctcatgtctgagatcgcagtggcaccatcttggctcactgcaacctccgcctcctgggttcaagcgattctcctgcctcagyctcccgagtagctgggattacaagtgcccgccaccacgcccagctaatttttgtatttttagtagagatggggtttcaccatgttggccaggctgatcttgaactcctgacttcaggtgatccacctgccttggcctcccaaagtgatgggattataggcatgagccaccgcgcccagccaggaaagagattttataaggctatttcttaagacaaaatctggtgaaaatagaggaacatactaacccacccttgaggaaggcaggtgctagagagccaagctcatatgatctacacacataactatcctctatcctaatctgattccaggataaagtgtagaccatctctgagtgggtggagagcctgtcgcttgggctacttctgtttcccttccctttgctgagtgtttgaccagggctgtgtagctgtgggaggcttccacarggtctgcagcttgggtaggaccactgctgagggcaggaccacaagctttatttagaaagcagatagataggtaacagaattagtatattctatatgcaaggaaatctagatagcatctttcccaggtgcacaaccatctctgtgcattggaaggggtgatatgcagttcctgcagtcagcactggcactttcctgtggaagcagctttgggtaactgcattccttcgacagtagttggcctgaggcccctgagctctgagcacaaatggtttgataaggtgatgttctaacgcagtcatcctctttggccatgaaaatcctcaaaaattctccagctttgattaggatgagcagattggctgcactctctctccagctggctgcatgtgacacacgcagacttgctcatcatgctttgtattcactgttgcatattgctcaggcacgtgagaggcaagaacatggcccactaactgggcaggtcctgatcgggaagctgctgaggtaaaggtgctcctgttctgctaaaggagaccctgggatcagggacgagctcttccytgctgggctcacccagtaatacaggtcgtgtgggacagtggtgagccgaactctcctgccatagacgtgctggtgagcaatggagtcaccttcagaagaggaggcggcttgacctgggggcatgaatgctaccaccaggcccttttctcctgggactggctccttcctacagagcaaccctccctgtgggttgaccatagctccaaagacagacgttttttcttctcagaaagtaaaacctcagcattgaagaatccttgtcctgtcatttttaaccttaatgagaacagagcaagcctctggaacaaggtgcagcgcagtcaggagaagtggctttaagtgaaaacacagctgtggggtttacagacggcgctgcagggaggcatcatccaatgggagcggccagcctcgctatagactttccaacactaatgaatcgggaactccatgctgaayagggtttagtttgatgggtccctgtgccagcagaaggatgtatttttcttgaaagaccaaggtgccagaaatctccatgattacgttactggagaaaggttcttttttgtggtttgtgaagttgagcgtcaggactgcaggattctcttgctctttctcactcttattttttccaggtcagaaccagagcttggggtggggaggaaaatcctgctgaatgagcaagttctttcttaaaaagctctctccaagtccaaaaagacttcagtggacttaggagaaagaaatttaatacattgccatagaatcgtcattaaccaagttaaagcaaagtccacagcatctttgtcttataaaagaaagcaaaaaggagatggaaaaaaagaaattatacttaggaaatccaaaccaaacagtgaacactaaagaagaaaaactcaagatcatctctgaaaatgtgattttcttctaatcagatttttctattaaaaaccaaggctgcaggtagaagtaacttttctgatcttttaaattctgccataaatggcatagctgaaatgtttgaactgtgctaggatttaccactttcagcttaaggaagagttggacaccctgtaagacccagtggactatgaggggaagagtcaaccgtggagaggctggaggcttcccaggccggccttgacctgtgtttgaaccttggtcctaataactagcagattgaagcaaattcacaggcctcctggagaacccatgttggtttgaactggagcaatcctggccaaataactcacactgtgctcttaccagtgacctccctcattacacccctgtgaggggagctctgagctagcatcctaggttcccctgctcattcatggagtagtctgcagagaaagctgaatggctctgtcctgctggggctgtaagtaccttccaggagacgggcagagagagacttggttgtccatgagaggtcatcttggaggtattgcgaacaaaacagggaattcctaaacttttaaactcatttttttgcccttccaaggtcaggccaggacttttccaaagcctcgaaacctctgatgtggcgtcttccctaactgatggagtttagtgcctagtggcccttgcatgacgttctccaagtatggctgtttgacaaagctgcctgtgtgcctgggccagccaaagatctacctgttcagtagcccagagggacccctggcatgcttgcctagccacactttcctgtcttgtctcgtcacgcttctggttattcttatgaatgtagcctggcccactgtcttcaccaggctgggatccaaaataaggtcacatatcttttaatagttacattaaaagactcagtggacacccctccttctgcttayctaggacattgtttctgcccctaagttctccctaaagtgccatccccaagcagcaataatctgagcagcctgaggaagctgtacatagtcctcagtcactcattcttgttacccacctgttgccatctgctgggagggtcgccttgctgtctccattgtcatcctacccagaaagctcagacgggcggaaggagggcctctcaaaggcccaacaaccccaacagggcctgcatcccatgttcccacagagtctggggaagattctcctctcccaagggtcctagtcccttcaactcatccaggctcctagagctcacccacgcgattctcttaaggccagtttcctgggggccccaccctagagcaggaggcctaggtccaaaggggacccagtggtagtctcatgctctggccgcctggagcctgccctcctgtgtgacctcakcctgagcccctgaaaggagaaggctctcccattttctgccctggggagactgccctttccttgttgggatgaaagccttgcctctaactgaacccttttgaaggcttccgccctctgctggtggaagctgacagagcaaccttgttgttgcctcttgggtccttcacttccttccctcttcactcaataccaggaccgttgtgcagttggaaactgtccacccagggaagcctgttcctggggaaaggattgggtagtggtgagctctcctgcttgacatggcagctgcctctggagagagaaagaccttgtgaagtctgagtggctgccattcttgcaggctgacttcccaagctgagctgctctgtgggtggtccctgcaggtggtgattagggccagagcgctgctgctgcctggttccttgccgtgcctgatagctaggaagtatctagtgagcattgttgagggaaggagcttgtgcctcttgagggtgctgacaagatggcaacacctgaacactgagagtgtctgagccacagctggtcatctggtggcaattactgagcaggaggcagacgtgaggcagaatttatttactgaagaaaaagaaattattttgaaggaatgacattggacacctgctgtgacagtgataaggacaccgattgcccaggagacctggtgaagccacccttggattctctgggggaaatacctctggcattccagcgaaggggaaaacaaaagatcagggccactttgacagaggagggacaggcaggaagggctcccctggaagcaggtggagcatgaggaagggcacagaggcctaagagagcctggtctgctctgaacccctcagggaagtggaccgcgtcggggagtgcatggagctctgcaggagctggagagtgacccttccctgtcctgtaagactccttctgtctgtcctgagggcctccctggctggcacaccctcccgagcacaggcccacctctttccattgctctgttactgtccatatttgttcatgtgaacaaccaaccttcagcgagcctgggctgtgttgaattcactttcatatctccaaaagcaggaagccgtcaaaggtactaaagagggaagtgttaccaggtttatgcttcaggaaaataacagctatgttctagagagcggattaggagaacatagccaagggagtaggaagatacattgtgtgtcagtgtccttaggagaagcatgagcacaaattacacaagggcagtagagggcccggaggtggcagggaccaggcctgcctccaccaaggcactggctgcccactttgtcagtctttggagtctgtgtcctccatgatttggctcccttctcaggctggtggcaagctggttgcagcagttctggcccgcrtgaccagaagcactcaacaagcatcccctcgtacctcattggcctcggttgggtcacacatccattcctgaaccagtttctagggccaggaaatgccatgccctgattggcttaggtttcttacctcagagctgtcacgtccagccctggagctagaggttgggtctgcttccccccggaccccctagaatggggagcaggacaggggaatgaatagctgagtgaaagtaggccatccttagcaaggaggaaatgcctgctagctatgcatccgtgtttgctacaggaaccagatggacccattcattcatcttttgaaccttgtacatggtaagcacctacacaccagtagggacatactttgtggaaacagcataccatcatcctgggtgaatttcagtcctcatgaaggatcccctacccttatccctacccagacccttggctctccattccttgacttctttttggatcttgtttttgaccagccatctccaaggtcagacacacagcctgctctctgaccatggcctcagccccttcaactcccttatccagtgactcccacactcctctccttgacctctcagacactacacccagtgattagcaacatggaccatacttcagctgtgccacttacttggtaatttgggccaaatacttaataaactctcctgtaacatagaggtaggaaccggctttgcagggctcttgcgaggattaaataagatcagcgtgagagatgcttaggacagaggacgtgcttaataaatattagctccattccagacatctgtcacccagccgcttccttctgttttcttcccatcagcctctttcccatttatttccttcctgttcccccgtaggtctcctggtccatatgctgccgtattgtatctccactcccttacccccttattcttccctcataccttcctggcagatattcagcttggaccaacctaactttcttcacactaatgtctaagttgctagaaaaaaattaacagtgggacagatgcttgctacagtaacttcagatcctgtggcctccgaatactccctggcaatactccctggcaatccttatgctctgcccaggtcaactgtttttcctattctccaaaggagcaatttcaaaccttcatcactttcctcaaactccttcccccatcacactccccattctttgcagataatttgtgtcctaattttcaggaaagaacctaaaaaatcatactaggacattctaaatcccccctgcccaatccacagatcttactgttatcgctgcccatcttccttcctcttgcagccaagaaaggggttccacttttgtgttggatccaatcccttgtcatctcagagaccttgaatctgcagttctctctgtctctcttaatgtcttctactccaccatccatagtgccttcttcctgtcagcattgaaacaagtctctgtcatctttaaatatactcccttcaaacaccttcagtacactctcacatcctctcatcctttcccattccatttcatgaatcttgcctcttccctagcactgtctaatttgctaaaagagttgtattcactcatgattgccatttcctggctttctattcgtttttcaacctgtcaccccgatctctgcccccagcactccctgcaagagtcttttctgatagatccaaaggattccttgtttgggaatgttctctgttacttgacctcttagaaggatttaacgctgctgactatgccctccttgaggcatgttctctctttggcttctataatgtcagaactcagaactccatagccactccccagtttctgttgtccagctcttaaatacaggtgtttctcaggattctatccagggctctcttatcccttcaggttacaatcttgcttataaacttcagaactgtatgttcagcagcctactggccatctccactagatgcctcccaggtatgttagaatccgcaatctcagattgaactcaaactcttctcccaaacctgtttttcttccttgtcagggtgagtagcaatagcatctgccctgcagcctgagccagagaatcctgaacacttgttgactcttccctctctcactgactttatctccagaccatcaccaagtcctgtaatgctggtgaggtgaaaggagcatggattttggttaaaattccagttctaattgtggtttgctcaaactacttaatctttctcagcctcaagttcctcatctgtttaaaggaaatagcaatacctaatttaagtggtttttgtcaggataaaggaaagcctttacttggtaggtgatatggtttggctctgtgtccccactcaaatctcaccttgaattttagtaatccctcatgttgtgggagggacccagtgggaagtaattgaattatgggggtgggctttccctgtgctgttctcgtggtagtgaataagcctcacaggatctgatggttttgtaaatgggagtttccctgcacaagccctcttgcctctcgccacgtaagacttgcctttgcttctcctttgccttccaccatgattgtgaggcctccccagccatgtggaactgtgagtccattaaacctctttcctttataaattacccagtctcaggtatgtatttattagcagtgtgagaacagamtaatacagtaggcattcaataaatgtgagtcctccatttagtaaacatgactgctcttctgttccagtcctctctctcccctaccctatcaccacctctgctgacttgccttattgttgagttggtgtgaacatagtttcctgactttgagactccccctgcaattagatttcccatagttccttcatgactaaggactaagtgctggtcaccacagcattgtgtggggtctgggaggcagatgccagatgttactggcacatarttagatgtgtatgtacttccaagtcttgtctcttagctgtctccaacgccacygcacctccgtaagccaaatcctcatcatctcattgggctactgcagcagccccctctaaggcatttctctatgccctctctcacttcagcccttctctacctgaccatcagagctggtctttctgccctgaaacctgccatggcttctctcttctggtgaagtgaagttcacacactcctacgtgcagcctgccttgccagctcatctcccttgcatgcctgtgccagcccagtggctaagtcctctctgacccagtgacacctttcatgataagggagcaagaaggatgcttagatactgattgagaagctgaatactatacttcttgggtctagtggctagtaggacaggcataagacactcagctaagaccagctgtccagaaaactgggaccaaaagacacaggaaacccaggagggcttagaattctgtaagaatcaccagtcataaaataaggaggaaaacctattagtcttctgtcaaagcartgtatgcttatgaagaatttggaaaatgcaaagaaagtaatcacctggaacctctcagctagtgataggcactgttgctgtttaggtatgttccttccaagtcttttttttttttttttttgagacagactctcgctatgtcgcccaggctggaatgcagtggcaaaatctgggctcactgcaacctccacccsccaggttcaaacgattctcgtgtctcagcctcctgagtagctgggactacaggtgcgtgccaccacacccagctaattttttgtattttactagagatggggttttaccatgttgcccaggctggtctcctgagctcaggcaatccacccgcctcggcctcccaaagtgctaggattataggcatgagccaccacatctggcctcagtctttcttctaggaagtctttgtccttttttacatagtcttcatggtacactgtataatcaagtgtgcatcctgctttatctcatctgtccaacctatttttcctgggttagtaaaaattctccctaagccatgtaacaactacctgctattccatgtgtgactatagcatagtttgtttaaccttttgccactgctggactttttagtctttccaataaataacactggggggaacagttttgcaaataaaacttttcttcctacatttctgatratttttctaagctataaattcataacttaaatcactgagtcaaatcatatgaaaatttctaagcaatgcagactcaaaatggacagaatgaatatagacctgacctcagctgcaaagagagaggtaaagagaaaagggttgtaactaatagatkcttttaaaattatgttttacttcacaaaggagagggctgggaagattcaagtggtgctctgtagggcaaacatgcctttgacttgaagttctggcttcatgatggtcgagaagggcttgtttctgcttttgtgttttcatctgggtcagttagaggacaaaccattcctgtgagttcctttcccactaaggaagagaaaaatcgtccagtatctaatgatgcagatcattagctgtgttcgcagccttgtagttaaaaaaaaaattataataatgtatcctcctaatgtgcagttaattttagttaaaatctccctagtgctttaaaaacccagtgaatttataaacatagtagttggcttgcatttggaatgttaaagctgtcataaccaactggctctagcagggcatgctgcacctccttgagctctgttggaagttcagcactcacctgagcactgccctctggaatccagaaagaaaccaagactttcccagagttcctgttcctgatcttccataactgaagaaagctaatgagtgtctcaaagttaacatgtccaaagtcaaacctttgactccctatcagtccccaaattcagtctttctctcagcagtggatcagccacctgactggtgattcagattcaaaatcttgaaccgtccttgagttcttcctttctttccttaccactgccaacatcaaatccaccagcatatcttgttgattcgacttctaaaatgtacctcaaattgtccatttctctcactctatcccagcccccctggccgctcccctgactgtagtggctgcctcctgcaggatgttgcttctgctctgtggtctgtggtctgcagtctgcactgtagccagaggggtcttgccaaaatagaattctgattacctcatctactccttctttttcttttcttcgctgttaaggtaaaggccaaaaattccagtgtggccaagaaggtcctccccagagtcacccaccatgtccctggatctatcagcgcccaacttcaccagccatcctgcagctcctgccccagggcttctgcactcactgtgctctctcctcaggagaaccctctccactccccatccctcctcctcctgattcagaggagccttcccttctacccattctatccaggtcaggctcttcactttcatggaaacatggggatttttttcttgcttcagagagcctattttaatttgaagttctacacatatatgcacattcattggtgtgatcatttgattgctgtcagtcttctctgctagacggtaagacccatgaaaagagtctgctgtcactgttctttccctctcagctagctcatgtctagcacaagataggtgcttaataaacgtattggttgcatgctgaatgaacaagtagagtcttgctgacagtcatcattgatgatggggtccttgtaaggtgtgggctcttcccagagtgggcaggcccaggttctccacaacacattgacttgagggagtgtgacttcgtttgattttatttttttcatttcagctattggaatgaatagagcatgctgcctaaaacttctttttctcttctctctctcttcagctaaagcttgctttcactctggaccacgagaccggattgcctcaaggatgtcatatctatgagtaccgcgagagcaacaagtaagccactcagtgggaaagagtgtcrcttcacatgtgtgcagcagtggtgcctgtgggctttctgacactgagcttccattgctaagtggttgtcaggaagggaatacaccttttactactatactagaaaatagctggcacagaaatagtcctcttgtaagatctctttgcccctaagtatagaacttggagcacttgcagaggagcagttgtggtgtgttagaagtagatgctgaagcagaccttctttcaaggctgcagatgtcccccagaccctccccactcttggtctccagtcatgtgcctgcttgtttggttcactgtgtgactttggctttgttgtagttctcagtcactatctgcctatacttaggtttatgggttttgttgtgattatctaccttgtaaattttatattaatggttgggagatttccgggtacttacagagatttaaattggtgcccttgttggaaaggtggcaccttgcatactttcatagcacctcctttccacatcatagactgctccttttttttttttttttttttgagacagggtcttgctctgtcacctgggctagagtgcagtgatagaatcgtggctcactgcagcccraaactccygggctcaagtgatcctcccayctgtttcccgagtacctggtactacaggtgcacaccaccatgcccagctaattttctaaatttttagtacagacagggtctccctatgttgccckggttggtcttgaactcctgagctcaagygattctcccacctcagcctcccaaagtgctgggattacaggtatgagccaccacacccagccacagactgcctccttgactgtgtattttcgtttgtgagacagtgaaagtggtggtgaatgaggcacaggaactgtgccccgatgatgacaatgatggtaatgacrgcggctaccattgagcacctcctatgtgttaggcacagtactggggactttacatttgttatctcatttaatcttcataacaaccccggtgtgttattttattattgtcatatttgcagaagctaaggtctagggaactaaagtaattcactcagggtgactcaccacggctgtgagaagcagagtcaacattatcatgtttactctggggagagaatagaaggaaaacaagtgacccgtatttttacttagaaaccccagtcaatgacaagagcagtcccatcctggacttaaggagaatgtactctggtctcattgtctaaatatccaggctgtttaattttattcagtggaargaaacaaataggcacatgccagtagaactgtctactgtctatgaccttccagaagagaaacctgggccttcctcaagacctctggtgctgtttagggtagaagagaggctaccgggtgccctcgttaccacatctccrctgggattaccttcaagacatgatgactgtttgtaatttatctttaggagaatgccatagtaactggtgtgtacccctaattaatcataggaaggattgaccagacatcctttaacaattcttgctggactctctgctctttgrgaaaaggttgaagagtatttattcaatgggagaaggacaccagctctctgtcctttaagtttatgtcttagctgttcacatatctggtggcaacaacttatgttgtctttgactgtgagaagagaaaatagcctagctctttttttttttttttttttttttaatagaaacagtgtctcatgatgttccctaggctggtcttgaactcctgagctcaagccatcctcttgcctcagccttccaaagtgctgagattacaggtgtgagtcatcatgcccagcctagctctgtgtcttggttgatccatagctcctagcatattatcagaccaagcaatgtaagaagataacttagggtttataaatatgaataagttttggcccccaaagacctctaaaagaaaatacttgtgtaggaaatcagataggagccatgatctagaaaagtatggtgatcagcatgttctcactcataggtgggaactgaacaatgagaacacttggacacaggaaggggaacatcatacaccggggcctgtagtggagtggggggagtggggagggatagcattaggagatatacctaaagtaaatgatgagttaatgggtgcagcacaycaacatggcacatgtatacatatgtaacaaacctgcatgttgtgcacatgtaccctagaacttaaagtataataattaaaaaaaaaaggaaaagaaaaaagtatggtgatcaaatgctttggtgactgctttctctggttctctcttgcttgtattagagtcagtcttagggttcattctcaatctttagacaactttcctaacctctctgagcctctagtttcatttattttcttcttcttcttttttttttttttctattttttgagatagtcttgcttttgtcacccagcctggagtgcaattgcatgatctcagctcactgcaccctccgcctcctgggttcaagtgattctcctgcctcagcctcccgaatagctgggattacaggtgcctgccaccacacctagctaaattttgtatttttagtagagatggggtttcaccatattggcgaggctggtcttgaattcctgatctaggtgatccacctgccttggccccccaaagtgctgggattatagtcgtgagccaccacrcccggcctgagcctctagtttcttcatctataggatgaagtaggattaatagtaggattaattattaattgttaattaattattaatagtaggattaataatacctctctggcagggttgcatggggctctctggccgggatatcatgttgaagtgtgtcatcaccagtctcacatatagaatgcccataggaagtgcttgttgcctcttcttcccaaagagaaaaactggctcatgacttccatcttcccagaaagtcttctgccaacagtgtactcatgagggaagaggctggtgtgcctgccgttcacagcctttggttgtgtacgacgctctgtcaaaggcagactcctcactcatgagttatgaagcacggaggaccccaaaatcctgactatgatttattgtctcccccagacccttccctgtttgtgttcctctgtttccatttagggtcattttccctacaatgcctgaatccaaatattggcataatagtgttatttaggaaatgaagatactcagcccagacccttaaggggcccatgttgtctcaggctaagtaacatgaagacaataccagcagagagaggaaattctacagatgaaaaagctagcttgagtattagtttggtacaactgattattgaaactactgcctttcctttttggatattccctgcagtacaatttgtaatcactttagcattcatctctgtttgccaaattcaatccatcagcagaaaaagttgttctgaataagtgctgaggctgttggatggttctcccaaatagtctttcctttcaaatggaatggcccggaaaatgggcactccatttttatattttctggattcttttatcagccctccattaacgggattcagtatcaaaagcaggtaaagttttctgcaacagagaagaagaatgtggccctcgggtccatgrgtggtgcctgataattttgatccttggctctctgtcatcctgttctcctttcacataaaggggctaatctctacctctggggtccagggaggacagtccctaggacttgyccatttctcatgggacttggaccctgccttctctaaggctagaggcacagctgtcgggtaaacattcttaaagctctgaggtcattagaagaaagagagaagctgtcctatggtgccttgggttcaactagtaaagctctccacsctgaattattctgtcagcctcccaaaagctgctccagtctgcatctggaggtgtgaggcctcacaccccctggcagatgccaccgtgggtctacgggtggtgactggttttttttttttctctgttgcagaaaactttacctgtctttaacactaaatccagttaatcaaggagtgatcgagagtcatttttgtcaaattgaagtttggagatctctggatatagggcaaggaacaagaccttcaggagtgaataagtgatttgtgagaattcagttacacatttatgaagcccctgctctgtacagtgtgttacatgggggaggcaaagatacgttagacccagtgcrtgccctcagggtttgtataaggagcaaagygcactccagcaccctgtgggatgatatgcactttggcagtggtaggaatcgagtgctatggcagcaacgatgaggaaagtgaatgcttccgactttggagttactgtgtggatggtggtgaccttcacagacaaggagctttgtcagaaggctcctttctctccatccccacggctaccctccttctcactgccaggactgtggagctgctttgcaagctattcttcctgccgttagctggttggcctcccggctgtcctctctgcagcctgagtgagtgtgtgtgtcttttccttctggttgctttttagaccttatttttgtctttggcattctgcagttttactacattatgtctgagtggattcatttttatttatattgtttaggactcaatatagttctcatttagaaatttttatctattatctttgattctctttggttctctctaatctctccttctggaacttgttagaaaccatcttatttcatctttcctctcttttttctatttctgtatctgttaatgctgcattgtaggmaacttcctcaaaagtgtctgtcactttattctccttgtagcagtttactatcggctgcttaataacccttcccaatatgaatatttggtttttattttattttatttattttttgagatggagtctcgctctgtcacccaggctggagtgcagtggcgcaaactcagctcactgcaacctgcaccacctgggttcaagtgattctcttgcctcagcctcctgagtagctgggattacaggcgcgcaccaccacgcagggctaatttttttgtatttttagtagagatgggatttcgccatgttggccaggctggtctcaaactcctaacctcaggtgatctgcccaactcagcctcccaaagtgctggggttacaggcgtgagccaccacgcctgtcctcatgtttggtttttatatttaattttcagaagttctgtttggtgcttttgaaaatccgcctattactattaattaatttttttggtgtcctagtcttctgttatgatttctattctttcttttatctccctaattattttggttgtatttattttacagcctctttccagttatttgaagagttttagttctagttccaagagtaccaattctcttatttcttgtgtctattgactcactcttacgtggttcattttctcttgcaacttgtttttttatcataagatcatcttaggctgtgcgcagtggctcacgcctgtaatcccagcactttgggaggccraggcagaaggatcacctgaagtcaggagttcgagaccagcctggccaacatggtgaaaccctgtatctactaaaaatacacaaattagttgggcgtgatggcacacacctgtaagaccagctacccgggaggctgaggcaggagagtcacttgagcccaggaggcagaggatgcaatgagctgagatcgtgccattgcactccagcctgggtgacagaacaagaccccatctcagaaaaaaaaaaaaaagatcatcttaagtarggattgtgtttagtgggagttccacatactgtgggttgtggatgtgttatcttatcacttttgcatatgttctgccaagacccagggaggttcataggtcctgctagtttggatgttaactccttggcttaggagtctcacctcctgggtaggccacattctgactcctcacccatgtgccgtgtgggcttcacatctccatttctcataggagatgcctctggtctgtgccacatacggccattcctctgctctgtgagaaaggtcttcctgattctttgttcaaagaccaacagctcccaggatcctggctttatgtggggatctcagttccagttccatgaccaggtcttcagttccatggccaggtcttctgcctcctgcatgcattaaaatcttagctcctgtaactgtatcaacgtctgatactcccggcccccagttgccacggtaaaaattacagctctgacttaatttttttttcacttcaagcatctgagaattttctcattattcttctatactcaataatatatttaaattattattttggtatattttatctattagttctctgtgtttgtgttgggaaggaggtccacatcagttcagtctactatcttgtcagaatcggagatctgaataaacttaaatatggtcactcatttagcaaatgtatagagaatatctgctatatacctgtatagttctaggccctggggccacagagctgaataaacgctgatgctgccaacagaggcccatgtgccagtggaagggactgggcactcctcagcagcaaggcagccagccctgtgatcccaccccacctgcctgccatacagacccatcctgtcttcctgccctggcaccctacatgctgtctgtaccagattacctcacgctcctgcgtacaacgtgtccctgttgtcatgccattttctgcttctagaacatccctctttcccagaaccccstgcccacccatctaggtaacctctgcttctccttccactctcagctaggtatttctcctctgggaagccattccacacccctcacaggcaccaccaaagctgggtcagatgtgccttccccgtggccctgtgccgtgcctgtctgctccatgtcagctcttagcactgtgcctttcagttgtgggtttgcttgttggcttccgccactggcctgatgcttttgaggtcaaggtcttgtttttttcatttcagtacccacagtgcctaatccactatctggcaaataatgcttgatgaagggaaggtgggggacctgatttagtcctttaggaagggagggagcatggctactgaggagtcaagcttctttccagctttgtcttttcatttgccgtaggattatcatgatgattaaattacacatgacatcagggaaactgtcttcatggatagctgtgaattctgaagagctaacatggagaaaagaagctgtaaaaatgtggcttaactctaaatatagtggtaattacagtcacttacatcagtttttttttgccattttttgccgggtagtgaagaacagtgatagctatgaagagcattaaacatgtcagacaaacttgtggaagctgaattcgattgcaaggctatactcttgttcacracatctagactttatgatccatgtaccataatcatgatgggagctaccatcttctgagtgcccgcagacaccaggcaaggggcttacccaggttagttctagtctaaaaccattcaagaaggatattcacaataaaaaataaaaataaaaccagtgagagtctgagaggttttattattttcacaattgtacagaataaaaaataaaaacaaaccaaaactgaagagtctgaagaggctcacctgccaaggccacagaggtcaagggcagaacctggccagttgtggcaaattctaaagcctgtgctgtgccttcatgacacctgcctttctctccatgccaggaagctgcagggagtgctgattccagccgtttctaagcaggcctgcttgggaaggctgtctgggaaatcctgggatttccagtccctgtgaaccccaggtcagatgggcagcttctgacttgtcatcagagttctgggttaggccagtcacgctgcttggcaggtcaccatccattcagtggtatgtgatgtggctgtgttagttataaagacctcgtagttttgggggtgcagttgccctgartacctgcctgattggcccttgtagtagaccctggcagacccaggccctagctttggggtgcctgctcctctgccctgctggcagttgtgcctcacttggtccagacagtgaggccagcagttgctggcagatccgttgtccctgcggacctctcagagcctccttgacactcacagccaggtcctctgccttactgcagttcttactcttagaacaggttagtttgctaaacttaacaagagaaaatcttccattttttcctgcctagctactggactcattttgggaccttgaaacacacrtcattaaacttactagctggcctctagatgtgtgagagagagctacgctgtgggattgatttccttcggctgaagtgtctgccgcattcatgagcctgccttgaaggacagtactccttgcagccttccagaggatagggcagttctgggctgtacatcctctccccagcccacaggcacctgctagctcaggtcactgtaaggacacctgggttctcttccccagcacctgagcacatagttctttctgcttcccaacatgccccctgcccgtgggggcttagcctgcttggcatcccccggggtctcagaacacactctctagacacaatagacctagagaaccaaccctaaaaccacactgcggttctctgttgttttgtgtttatcatggaggatgtgatgggttcgttcaggtgctctgacaagtggaccccaagcaggattaatgtacgagaggtgttgggggaaggcctgtgaaggatgaggggagggaacaggggcaggcccggggcttccttcaccttacagcaaccagcccttgtagacagtatgcatcccagggctttcccgtgctggcattatcacagtgactcaggagcttcttcccaggtcactgctggtgagtctttgagcagctgagccacaactttgtaccagggcctgtccctgcccacacaccactcagaagagcatcccctttgcccactaggtagtgartgagccactccccagactctatctttctgcctgtttcctcagaaccactcctgtcccacttgcgtcagttcagatctgcagagaagcagatgctgagatgggattggatgttgagaaacatatggaggaagatgcctgtgaaggatgaaaggggagagagtagcggaaggcagagagagccttcagacctcaacacaagtctggcccttatgaaggaatttggaaaggaaggagggctgggtagggagagtctcaggctacggcccaggtttttttgtttagttttgtttttttgagataggatctcatgttgcccaagctggtctcaatctcctgggcttaggtagatcctcccacctcagcacccccaccagctaggattacaggcccgcacaatggctcccacctgcggcccagttttaaggttcactgacggaaagtcctcaagccaaagccaaagccaaagccaaagctgactgctggaggatcctcacatcttgcaggacctggcctgcattaggaccctggaggcgtgctcacaggaagtgtgacttcagggcagatgcagtggtggatcagagcacttgcagttggggacattgtcagtagtagaagatctgagtgatgcctcttcctggctgctgcacttgaggaggggacagagcagggtgttcctggatgaagtcctgtttaattagcttcccccctgcttggttctttgcctttgccttcatcctgaataagcagaggaaatatttcccagcagctctgacaacttcaaaccagcaccaacacttcccagtactttggaaatgacactttctgtctgcaccttggaactgatgccagctcctcaggctaagcagcagtgttacctaagagccattcattgcagagggcgagagcctccaggcctcccagacactgccaggttagcttgaagaaggcctttcttgttcctgatgaagccttagtttaggagaaaggggggcttgaaatcaagagagaggaggggcttgggggaagttggaagcgatgcagccagagaggtgccaggcgtgagctcatgggtgcaagcctgcagctgtattgtgcacgtgggagtcagccactcacagtgcaggtgtgagctcactgttccaccacagccgttagtgtttggcatcagcatgatgcaggcacaactcctgcttccactgctggattcgggtagtgttcagcgaagggagtgtctctccaccgtccacccacacagagggatggccgtggctctctatgctctgctctcttctcacctcactccgtgcagcagcaatcaggatattttgtctgccaacaagcagtgcttcatttaacctcagttttatctacaggaagaggagaagagggtatgaacactcccattttagagagagagaaacagatgccctgataggtgccctgtgcaaggtcaagctgtacataagaggaccatccagcaggcttctccctggatactaccccagctatctgatgcaagcaggtgtggggccctagaacaactacacagaagtggcactgagttgcccatgggtccaggagcagggagggcagcaaggcctggggcagcacagctgcctcctgtattgcttccatctcctctggagtcacagtcacccagtctcctccacatggaatctgaactgcaaagggccaggacaaggaggagctctttttcagctgtgttgagtcagtgcctattccccacttgctgggagaaccagggagggacagagtctgaagtcatattttatagcactcagttgcctcggcagaggtttcccatgctgctgagctatggtgctcaggaccctttgtagaaatcactagaccttcagctctttctggctttctgaggccagaactgacccaaacaaggaaatgggggagccgcaaaaatcggcagattgtgctggccacagaccagtcacatacatcagtgtacacacrcaggaacactggtccatgtctcagcatatagtgtgacttatgcattctgctatttttttctgtagtgcacatactggaaaataggtttttacaataagcttgctttgtaaaacttacttctgaattatgacatgcatagagaaaagtgtacaaattataagcatctagttcaaggaaattgttagaaaatgaacacatccatgtcaagaaatagaacatggccaggtgcagtggctcacacctataatcccagcactttgggaggccaaggcaggaggattgcttggggcccaggggtatgacaccagcccgggcagtgtaacgacaattaacaaatttttatttaaaaataaataataaatagaacattacagcttccaggagcctcccatgtgcccctcactcctcccaaaaggataccaccattgttawcttctaacactgtagattggttgtgcctggctttgaacttcatataaatggaattatttactatattctcttttgtgcccagcttttctctttcagcattatatttgtgagaattcatctttgctgttgcatctatagtccattcatcaatttatccaatctgcatttgttcagtcaacatttgtattgtttccattttggggttattataaatctgcttgtacatgtcttttggtgcacatatgcatgtgttgcttttgagtatataataggaatgaaattgctgaaatcatatgtaatttcacaagcagtgtgtgagagctcatctgtttattggccattcagtagagtgccttttcaaatttcttgcctgtttttctactgggttttctgtttttcttcttgatttatagtcctctatattctggatatcagttctttgttgcttatacatgttgcaaatatcttccactgtgtagtttgcttttttactgcctctggtgttattttaaygtacagaagtacttaattttaatggagttcagtatgtcgatcttttttattatggttaaatgctttttgtataccatttaagaaatctttgtctatattctaaaagaatctacttagaattgatttttgaaaatggtacagcaagtttattttttcatatgggtatctgttgacccagcatcattttttgaaaatactttcccatagcttagcactgccacctttgtcaaaaatgaagtacccatatgcacagatctgtttctgctctccattctgtgtcactggtttatatatctattcttgtaccagtaccacactaccttcatgtttgtataaaaatcttgatagccagtagagctacactttccaacttggactttttctataaagagcacctatgctattcttggcccattccatttccatatagattttagaatcagattgtcagttgccacatacatgcacacaaacttgctaggatttatattgagattgctttgaatccatatgtcaatttgggaaaaatcaacacttttatgataatgagtcttcacaaacatggtacctccctctatttagagcttctttaatttttctcaatataattttctgttagagatcttgctcatgtttcattggatttactcctaggtatttgatttgtggtactattttaaatggtatttgtaaatttaattttctctttgttgctaatacaaggaaacatggtttatttttgttgaccttgttatcaattactttcctgaatttatttattaggttcaaataatttgtagattttttttcataacaatatttcagttcagtgtagatgcttttttatttccagtgtacctcatcatgtcatctgcaaataatgacagttttactttttcctttccaattctcatgccatgtatttatttttcttgccttattgcactgtacagtatttctggacataataataataggcatttatgtcttgttcctgatctcaaacagaagagtttttaccacaaactcactcttagattatgaaaatgaaaatttttactggtgttctctttagtatacactttatttttccccaagatgagttttcaatttgggaacttttttttaagttttaagtggtgatttatgagctaggagctaggaaaatgatatctgattttttatttaaatgaaaaggaactaatgtttatcacaagactgctactcctcattttaaccttgtgaggaggttttgccttggccattttacagaaggatctcatggctgtacatttgaacaaggattcaaacagatctgtctgacttcaaaacccatgctctctttactgctccctgattccttggtagaatattgaaygtgaacccacgaggtcgtaaaaataccacttttgtcatagatgaccgagagaaaagttgctaaactattattrcctcacaggtatatgcagcatcttttcctttccccagtaacctcctaccccaaatctctttatatccctgtgttttagtccattttcatgctactgataaagacatacctgagactgggcagtttacaaaagaaagaggtttgttggacttacagttccacctggctggggagtcctcacaatcatggcagaaggcaaggaggagcaagtcacatcttacaaggatggcagcaggccaagagagggcatgtgcagagaaactcccatttttaaaaccatcagatcttgtgagacccattcactatcatgagaacagcatgagaaagacctgcccccgtgattcagttatctcccaccacgtccctcccacaacacataggaattatgggagctacaagatgagatttgggtggggacacagagccaaaccatatgacactatcacctgccccatcccacctttccctgatttccattgccatggaaaggagccctctgggcctgcctgtggccctaaagggctgcagccctcctcagcaccggcccagcacccactgggcccagtatagggcattctccagcctgtgctgtcattctgtcgcctgttgtctggtgctgggaggtaggattgaaggctttcctcctgggcgggctgctcaggttgcaaggtagatcctatatttttaagccctgtagagtctcagctgtcccattttgagggttatgcatcctacatgggttcacagaatccctttcgctgagacttggaggaatgaagaggacagagagggtcgagacccaaaccgagcaggccccggaggcctcagggccctggggctgaagggagctccctagcccgagaatgcccctcactattctcacactccaccttttgcagcccaaatacccatggatgccccaagagatttccctatgagacagaaaattctagaacaccaggaactctcaaaactagatatttcaaaactcttaaagaccttaaagagtaaatgttttcattgtcgatttaacatagagttacattaagcagctaacactttccctttcttgaataagatttcctgtctgtcacgttgccatttgctttcttcatgtttttgcgatggactgcagctccctccattctggggagcctcctggsgctgcagcaatccagcatgactcggagctctttgattttctttcccagttactttatagcacatgaagatgtgttcttaccagtgacagagggtcggtgagaatgaccatttttgttttccgtatatctgtacctgccacatccatacctttctcagaaggtcctggaatgactcgtttctctctctgcctctctgggtatttctccaaccacaggtttgcatccccagggggaagccagctctctggtccctcatgctaagctttttaagcagatagtactgccaggcggtctttaaacccaaggaggcttgccccttcccaagacttcaaggagttctagaagagactgtgatattcaggccaggtccctgtttgatgaacagggacactcaattcctggcaagtggggtgagcgcctccagccctccccacccccataccggtgtgctggcccagacccagggcatattcaggtacttaaagtagcaaatgtctctgctgtaaaaaccctcactccggtactgaaagcccagagcccaggctcaggccacagaggtctgagatatactctcaaggaggttagcccataaaagaaacaggtcataggactgcatgttgggtttgagcctgaagaaaggtgcccatggttgtcatcttctgtggctgcctggcaggtaaccagatgtgcttggctctcttagcttttggctgtgctatctgtggggtagtgtttctgatctgtcttcactgccactcccagctctctgaggctttgtggctttttcttggtggttgggcaggaagcctctagagcctgaaggaattgctgtgcttgatgacaggcacaggctatcaatggctataaatcgcctagtggctgcttcacgtattgaagaagaacatgtttgctgtctgttctgcggatgcttctctgatggccggaacacagctgcgaaaagatttcgtagagtgactcagagcaagcgcccagctcatgcccactgaattaagcaagaggaagtggccaacttccgcagctgctctgaragcccaacacagcaaggcctggctgagatgaacaacatagatcattccactgactttgggctacccccaagccaaccccatgtgaccccacacctaccccaaagctaggtgagacccagggtccaccctccaagcccgggttaccagtagggggtaggtgccaaactggagagtagactgtgatgaatgggtagcagagatggcagaggacatggctcatcacctggggtcggggaccccgctctcagcagctcccttccctgagtgccctggcattggtgtgtctgtgtgttcgcgagccctggcatgccactgcggcttcacagtagcctcctgggcagcggctcatcagcttccagcacagcctttgttgttctrtaaatctgttaatgtttgtgctacctagaataagaaggaaggagtcattctacagagaggatttattcttccaggcgccaaaaccttgttccttacgattatgtcctgttctttaatggggtcccctgtactccacagtgtcattcgcctccacactagatgtccacacaatgctgtgtattttcactgattttgctggggccctgccctgtctttgtctctgcctttacagtcagggccagttgtcacttctccgtggctgtccggagaacctgtagcaccctctccagccactccaagcatgaggctttgtggggagcgtggaatctgtgaggaagccgaggcaagctgttaggattctgttcaatgggaggaaaggctctgagtgaggtgggaaggaaggacttcccaggaggcacacttgsgttcccggccccacctctgcgctggctgcccacaggccctgcttctgcctatttcctggttctgcttcatgtttcaaagacataagatcaaatgtgattaagttttaggtaagcaagatattgtgcttattattgaattgttcttctttagtttaacagccctccagtttaatctaaatctgtttcctgtcattaagtctttggtgtagataaaagatcagttagctggtcgctatcttttgtgtcataaatcttctaggaaaccattgttgtgatttttcattgtaccgttcctgaagaggaaggaacttttcattcctttgggcttttttcctggtgaatttcccagctgttagtgtcatcgagcttaactctcacatccttaaggcagcattagcctcagaaccaccagtacctcgctgtgtgccctgggaggcaggttattacccttggcttcatgacccatggacagtccttgcaatggaagggaaacacatttgtgggtagagtgtggagaatgtgtgtgaaaggctttcctcgcccaggcagtaagtgctgcggaaacaagccactttttatgctaataagatttggacaggggttgggaggtaggggagtgagtgtgtgttgatctgattccctgtgcccaagagcaaggacagtcacttcatcccagcccctgcacagtgttgggaacacagaggtgttcagcagatgctggrcaaatgtctcctgggagtatgcagtatttgctcttttttcctctcatgttctgtgttcctaacattcttctattttggcggggtggggaggtagaaggtaggcagagtctcactctgttgcccaggctggagtacrgtggcccgatctctgctcactgtaacctctgcttgccgggttcaagcgattcatgtgcctcagcctcccgggtagctgggattacaggtgccctccaccacgcctggctaatttttgtatttttagtagagatggggtttcactatgttggccagcctggtctcgaattcctggcctcaagggatctgctcacctcagcctcccaaagtgctgggattacaggtgtgagccaccactcctagcctcttctattttttaattacacctctaattgtctctgaattgtcactgaattaattgtctccttaattcagtgcagaaggttttcataataacactaatatttatggaatagttaacaataggtcagagcttayaatgttaaataagataacaaagtttatctcatttaatcctcactagaataaccctgcgaggtaggtagaagaagttagagaggttaagtagtctgcctaaggttacccaggttgtgtgtggttgacagtgccctacctttcccccctgactttagcaatacaagaatactggcaagttgctgctgccctctgggctctgttataaagtgaagctgccgatccacaatggagaacccactcctgcaaggccaggcctccacagaggccagaggccagaggccagtagtggtcggggtgcccaggaagctgggctcaaacaagggtaacttgcaagaatcttcaggaagcccttatattcagaattgtgttctgtgccacatgggccctttcccaccatcaaacttagaaaacgacccctaggaaagtcctcagagttcatggaagggcgctgagaagtctgcccacaccctcgtgggttggaggaccagtttcgccaagtgttctctggcccagttgtaaacatcattcgtttgcttgtccagcaaacattattggacgcctattagtgccaggtactgcactgagcacaagagaagggcccasttccttcccttgaagcccacagcccatcgaggaagacaggtatgtaagacagcatttgcaagggggtgacaaaggccaggggggaggtgaacaarggatgcagggagtggctctcagtgttgtgagcaccccgcatgggaaggccagcgcggcagggtgctgggtgctgttgccctctgcttctcccggctggagtgtcagtgtgggaccctgtaggccccaacccaccccaggggaggcaagtgagaaggtgacaggacagagtcatgggacaagaaccagagggaagaggcctggccaagccctggagaactgagcagagcagagagccgcctcaccaagcctctgtgttccatcttgtcatgcttgttggaatgaggaggaatccctaaagatcatggatagaaggagaatggctcttcttcccaccacctccccaccgtctctccctgaaaccccaggagcattccagatacaacacagggcgggggtcttcccttcatgttccttgagtgcagtggccatggccactcctttctcagaactcctactgccagtcttagcactgctggcctccatacccagcagggaggtgtggtctgctcccacatggctggctgggccattcctgggcagatggtatcgagtaaggagcacccagtgtcttgtgtggttggcacacaagacactgtggtggttgagagaagcagagggcaacagcacccagcaccctaccacactggccttcccatgtggggtgcacacgacactgtgtggttggcacacagtggacacaccctggactgcatgctacgtataagcatgtcctggtgaaactagcagccagttctttgttttgttgcaaatgaccatttgacagtacttccacaacagccaaacatggcacatgaggaactgggcttgagtatcacaaagatttactggtaaatggacaggcataagcaccattaatcagacagcacagttactctccatcttggtggctgcacagctcagcggaccacacagggccctcctggggtgttgggcaaggcctcctcccaggcagaggcagctggactgaggccagagagttctgggtgctacagcctctaccaggaacaacaattctcacccaggggaggcctgaaggctgcctgggcttggctgcctgggcttggcctaacctacctgtgaagaagctcccagattgctagtcagcatcccaggtaccaggagagctttcttaatgcatctgaaaatcctggataaacagggctgccctctgcaacccaggctgccctacaagatgggcttggcctccagagtggtagctcagggaagcagagccctcaggtccagtcacgctttggcatggtctggcctcaccatctgacttacgattgacccagcctgcctgaaaggactcagggcctaatccaggttgttctggtcttggttctcaggtagaatgagagtggcgtcggggaaagggctgaagtcttcacacaggctgtgcgagagcactcagcagtctttggttgactttgggtaggagtggagatgaaacccagcagtcttatggttttcccsgccytccaccccacccaccctaccccttcctgtggacaaagagagggcagagctggggcctcagtgccacgtggggtgggcacatgaagatgtcagggaagcccagaatgttctggggggggtgggggacacattcattgaaaccgctctgaacctaggtcataaaactgtgtgtcaatattttaaaagtcacagaatgaatgcagagctctgccaaactcaacatgctgtgttccagggggtgataagacgagcgttagttcagtggaaaaaaaaccaagacaaaaggagttttcttttaatcttctgtgtttcatgtttatactgaggcaggctgcccttgcaggagagaattcattcatcatgcaaccaacagatgagtcccagtgacattgtcacctgtcacctgtgttggatttaagtgataaccatatacaggcagtaagaatgtatcgaggcaaatgtagcctgtcccattaggccagcagaagccatcttgggtttcttctgccaagttcatacacctctggttcaacagtgataagctgaagggaagttgcaggagccataactgccactcctagtcctttattactagggggctgtgcttccacccctgaaaataagtcttgtttggcactcaacgttttctgtggagcaaacaagcaagtcatgtctctgaaatacctcatttgttcccccaaacatttcaccagctcctccatgtgctgctcagctctgggatacatagatgggcacggctaggtgttcccctcccttccccacccaacagcctatggtctgcagaggaaaactagcctccagagaaggacagtctggattcactgttgagatgtggtttagaatcagcccacaggaccatggagccagggagggagatgtgtgaactgaacctgtacagccccacgagttgctgagtggagaaggtgggcttgggtgyggggagcagagggggcagagtggaaatccagggtggcctaagagtctgggtgcctgtcacccatgaggaggccccaaagagtcccttgggaacagaggcactgatctccttgtggccagtaagtgagcagggctgaggcaaggaacaggccagcaaaagcctgcggggggccagggagtgtgacaaccaaggacccccagagcactagcagctaaggacctcatgccacactcagacctgggcgagggactgacctggagacctcctgagctttctctgactgtatggagctcaccagggaaaacatgggggatgcctggatgcattgcccagctccgagctcagcacaaaaactccctcttggaacagtctagaaagaggctcacctgaggcccagctgtcacccaggggccatgatgtcatgtgggccaaggcatctgaggggcaggggccttccgcatcccactgctgccgtggcccgtggcccactctgccctgccctcctgacccggaggcccagtgcgtctctgtggggggtgggaggagcgtcagcaaaggagaggctgcacagggcgccttcggcagtgacgsgaaaccaagagcaggaaaagcaaccctgctcagccctgggcgactcagacaggaaagggcctgagcctgaggcaaccaggagggggcagccttatcagggaggccgtggcgcgggcctgagtgctgcttctgccctcatccaactgcagcgggacagaggcaaacaagaggccccccctttgtttccaggggggcctggaaacaaggcttccaaggtggcaacagtgtcccagcccagccaggcggtggctgcagggggccatgtgtgtgcgcctgtgcctgtgaccagcctcagggcctaggggcagggagcaggccaggggaaaggctctgtccctggggcttggccgggcaggtggaaagccaggttcagatgggtgaccctgggctctgcagctgctgtggtctggcagaggggaggaggcgcccttagcagtcaggggcaggatgatggtagtgacgtagctgactacgggggtgcctgacccctgggcagcaatgtgctctcagggtgggctctgtattgagttcccactgtcagcacagcctttggctgctgcctcctcctcagagggttcagagcaaatgatgcagggtcacctgaggacaaagcatggatggggtgtcagggaccctgggtctgggagcttgggcaagcccttcgagctcactgagctccctgtgctcctgccaggcatgagaactctgacttctgagactcagatggaccgagagtggcaaagtgcctggcagtctccacatccagccctgccacactgtggcatgggacctctgtggtcacttctgtggcctcccagagacaccatctccctctgtcaccttaggaccacagtcccctccccatgcactgggtgtgggggaccagtgaggagtggatgaggaagtgcagagaccactctacgcttgtttccctgcagactttagtggctgtgtggctggggtggtggccctgctgaaggggatctgacctggcagccgtttgggcaggagcagttttcagatgtgagcacacgttcaaacttgcagcagcaaagctgctcaaggtcccaggaagcccaggcttctctctcgtttttgtggctgccttggtaacgtgtgggtgtaagagcgtgtgtatgtgcaggagagagacggagagaaagaaagacctgtgcattccagaacacccttcttccttgaacatccgattacccagagcctaattttaaaaccgaagtcgatgccttcttaagtctgcgatggcccagctggcctccttaagtctgtgatggcccagttctgttcttgctccaagtctacgaagccagcttcccctgctggggcttgaaagggacccctggccaggagcaagcagggcagcaagcaaagctgttgggggcactgtggggactcccccaggtggccaggcttctgtgtgcccgtgccacccctcctcaggaccttgtttccagttccggttgggcaggggctggcactggagagaggcttatgtgtcaacaccataaagcagccagcaagccctaatgaccacgctctgcaagaccacacagsacagactggcacctggttctgcttgggggcagggccgctgccagcctgcaggccgcccctacctctgggagcagagcccgaacttggggagcgaatgaggcttctgggctggctttatgctgacaagggccttctgcactgtcagcccggccccagctcccagcaagtctcctttcgctccccattacggccactggggctccctttggcaaggcctgagggcccaaatgtggccatctagcctctggggacttccttcctttggagctagaaaaacaggtgcagaatgtgtctggctacagcaggggcccgcccactcacctatagaaaggccctgccatggactgagcctcccagcctaggaaacctggctctggcctcccctgcaggcatatgatgtttggctccagaggccttctcctctgggcttttccatgcctgtgaactgggccccattcatttctctgtggtttcatgggaacgtccaatgcattcaggaggttgcagtgcgcgcaggaggagaggggtcagcgagaggcccgagctgtgactggtgggccacccagaggccacggcaccctctgctggagactggcagcagggtgcatggccagctgtgggtgggggtccatcagtcaagcagctgcactttctccccatccccctccccgacccaggcaaggtgctctgcctgcggctccctttctccaggcctccactttccagctcccaggcacccagccccacccggcctggcctggaacagagctgccaccaagatctcttccactttccctccccagcagcctgcaattcagtgctccgtagacccctgcctcccagggctctgcggtttccaccacactacactcaatttccagctgctaagaacacagcaggttctacgtaaaggtggccatcacctgcaccccatgggttgcccagccatggagaagaggccatggttgggtacacagcttctgagacaggcccagcagctgccttcatggcctcggcagagcccagggctctggagcttacaggcagcgtgtgcccaagtgtggaaaatttggtctgcagaagaaatgaggctgaaattggctgggagcaattcttatcaaagccacgttagcagttttcagcaagagctaattgaacaagctctgtgagtggcctcattccattagcaggagcctcccacagagcgtgacaagggccctggtggctgagggcagaagaggctgtttctgtcccacatttgcctttggcctttgaaaatggacwmattttcagctttgggcactggtcctgcccctctgccccggctcccgctcatttccaaggccactctctgagtgtcctgtgtgaggaaggggtgaggtgagtttgtcagcactttatcaggtgcatggatctgaaatgggacacctctggcctccttgccagagggtggctttgtggtgagggtaggggaggcagaagaaacttctagaaatgttgcttttactgtgttttttgcccaagtcctagagttggggcacccaggccagtcacatcataagatgtgtaataataatgtcttatttattcgaggccaggaacttgaacattgcttccctgttttacagggaaacaaattgagattacatgagcttaagaagcaagtgagtggtagggctggcattccatgcaagccactgaggagaagccccttgtctccatggcagggccaggagaggggagggacaccccccaacccctaccacctgccagacaggaccttcctggccacagatgccctggatccctgactatcaaaacccagccccagcctttcagctgagcagagaaatactcagatccagttcctcgatggtcagggaaggcaggcttcctctgaagagcagatcgctttacccctttctcatctcatcacctctgagccctgccagggtgagagcagcctttcccagcatcgtcctttaagatgcracagaaacaggtcccacctgagccagcaggaatgcggcacccagtggctggctctgcagtcttgatgctcgccggcaccttcagggtgaaggacgccctgtcgtaaacgcatgaagagccctgcgtttcatatattgatgttgttgctttttctttagaggaacgtttgtgcactgtgggaacctctgtctctaccagtgtcacccttgctgtggggagtgtgtaccgtgtgcggggggctggtggcctttctctgctgtctgccacagyktgtgaggggctcgctgagcctcayacctgagcctccccctccccaccccctcctgccccagggaggcccagaaccagggaggagaggtgctgggagtgagtgccgaggagctggggtcctggccctgcagccactgtcacascacagccccaccccagacctccagagtggtggggccctggtggtgcaggttccagacgcttggctgatgccaggcctggatccaaggcccccgtctccgaggccttagcttgctgttctggaaggtgatgctggctggcagccattcccagcccctcggaaagcagttgtcaggcagtccctgagctccagcgccccatcccccrcagggcccagtgatctcacgcctgtgccyctggtgctgggaggagtggggtgacactagggccagtgcccacatcagaggaggaaggtatgaggccagggcagggggcagggcgccctcccgtccagcagccccagtgcccactctgcgcccttcggggctcccgtggcccagagtgtggagcggctcaacctgaccacccaggatagcttgggggcgtttcggaggtttggctgcctaggctgtgcacctagcacwgctccccaggagagggagggaggaggtcagggkagagggccctgctgaccgggtcatctctggccctgggttcccataggagcgcctaggctctaagctggagcctccccatcccaggaccttggggagaaagaggctgggcgccacctgctggcccaccagggaattgacagggtgggggactgtggagcctgtgctggccgcagatgagagccctgacycccaccttccctaccccacccaccctgcaccgtccagctcagttctctgacccgtggtgccaggtcccatttgcaatggcraatactgaactcggtgcaactctggctgctggcagctgggcttggcctgcacctttctgtccccaaactccactggggacccaccttccagccaccccagggtgccaccgccagagccaggggtcagccccaccttcattcactcctactcatagcctacctgttcactctgcccccatctgctacttgcagcatcagaaggacatgagggcaccaaacagcccctgcagctgtcctcaaacatcatggccaaggctgcacctgggaagtggactttctgtggtgctagctccctcctcagtgcccttgacctttgtctgggtccctgcttaatgtggcctaactagttgggccagagctccacaggtgctgtcctgactcccagccccaggagggagggagaggctgagacggcaagggaagcagagactcagccacaccaagggccctggcaaggtgggcctctcctccatagcctcaccaggcttcacgttcaaggtcaccaagagtgcacttgttcactgtcgagggcagaggtgactcctgggactgtgctgggggtccagggagagcaggtagcggagttgccagggaagcagcttgcctgaggtctgtggtcttggcaggggcttccacagcggccccaccctctccctgtcccctccctcctgtccttgtcctcgtgtttactgaaaaccatgagaagggatgtggagagcgcctgcaggaactgagagcaggagcctggctcagccctgagaggcccccagatattcaattcctaaacccatagagggtggggcatgggcacagaggagtaaccaggggccacctcacacagccctgctctttcaccctgccygcctggtggcctccttagcctgcagcctcagtgctgcccgctatggggtcatgctgcctcctgctggccacactgcaaaatgcagcccagggtcgggcctaaggctacacttgtccctcttccggcaagcctgcagctgggctggaggggaaagcaggcaccacagaattgcctggatgctcctgcccaggaggattgtccgactgcatggggagaaaagtccagaaccgtgcctggcacatagtagtttttatggagtgagagggcaaaagtacgcatgattgtgtgcatctgaagtatttccgtgctgatggcctgaccagtatcagattatttttcaagcaggaattttgattcctcttgggttcacaatatcttattatgaaatccgaataagaacagtctaatggcaccagacagtgatacaggtgagcctagaacagtcagtgttcatgtgggggactgcagcctgcttttcagggaggcttcaaaagaattgaggaacacagattgatggcagggatgaaaatcacagggcatattgaggagacccccagctggccatgtggggggcaggtggggcaacaggagaacagtgcctgcgtcctgagggctttcaatgcatcaggcagagggcctgccagtgcagaacctgttttctctgcgtccatgacagccctgagcaggtgccattgtgacccctgtcctgcatttgagacagaggatggggagggctctgtgatttgttcagaatcccacggcaagaaagttgtggagctgagagtcaaacctgggcttgggagacttgtagtgggttaagggcttgaacacagggtttttggcaggaagtggtgggcacaagcacagattagggctgggaggtggggtggcacatcacaggccgttactgccacccagagggcaacatggatgctcctccttttacctgctgggtgtcctgtgtggtagaagggcaggctgaagcttgatccttgtggtcacacatcccagctgtcacctgccttactgtgtgccatgagccagcccaaaaaagtccccactagtccccaggggaggcgctaggggtgctgggctggcttccctcctctccaggtggtgcctgccctcctggggcatttcccagcccttcttcctctgcatctcargctccctggggaggcagatatgctctcaggacatcctggcagagcacagccacacgtctgccctggcaggcccaccctgggtggaggaggggctctatatgccagggctctctctctcggtggctggctttctttccacgagcatggccagatgacgaggctcacccgcagcactactcacacctccaggaagggaagttgatggcagggttctggctgcagccaggcctgcgggagcttcctccctgatctctctcactcaaggggaaagctcagggctgggcatgaaggctggggaaaggcagggaaggcagagtccccccaggctggtcaaggccccgatagccccatgtctccctgagggggcggctttccccatgaagagggtcctggtcaccaaggcatgaggacatgcccaaggctggcccatcacaacaggctccagctcttgtgcacatgtgtgatcttcttgtcccaccaaaggcgggaaaaagaagtgcgtggcctcctgccccagatttggtggtagggtcagtggtgctgacctcagtgctgtgtgataccagccccccagcctttgcctggttcatgtcccacatcgcctatcggtccccgctccttcagtctgggaccttggcctgctcagtccttctgtggggagccacatccattcacagtgactgttgagtctaatgacagacacccaagtgctgcaaagccagagcagcagcccctgaaagggtgactctggggtctcaccccatccccactcctgccctgtcctctggtgagggcttccctcctgctgcctcagactgtcctgtctaccctcagagaccctgttgggaggcttccctccaacaaggcaccgtccccagaggagaagggagcccagcactcctgggactgtggggtccttggtccactcaccactgccacatgcctcagggagccctcagagcaggggctgagctggggccccagggttcccatgccctgggcgagcatggtgccctcttacagcctgggctgcccgagtgttccaggcatcctgtcattcagcagagatctttcctcggtgccttctctggattgggtgggctgctgagctctggggctgctgcagtgaattatttaatagatgggtgcttccctgctctccagggtccccctctgggagagccagcacaggagctaaccagtcagaggagaaggcggtgtagaccaactggtgcagggagaccatgggggtgctgggcaagacagggacttggcggaacacatgagatgaggtagctgggaggttgtctttaagctgagacctgaagggtgattgatagagagccaggccggctgcagcgtgggaaagcctgcgcacctgtccccaaaccccagcggtccctcccatcccacccaccctctgcaggctcgtggaggagttcatgctcttggccaacatggcagtggcccacaagatccaccgcgccttccccgagcaggccctgctgcgccggcaccccccgccccaaacaaggatgctcagtgacctggtggaattctgcgaccagatggggctgcccgtggacttcagctccgcaggagccctcaatgtgagtggtgggcaggattcgggggaggccctgcttgggggaaagaagagaaagacctggaaggtggggtggtccagcggcctctgcttccccccagagtccctccccttcagccaggtctctcctgtagggaaggaggccctgggagaaagggcccctctgagtcacaggggccctgacagtgggacctgccccttcaccaggactgtgccaagcggggggaccctggaggcctagcagagggcaggggtcctgtggccagaaagggctggtcttgggcccagaggctttcagagtcggggctggaattgtaggaatcccgggaatgttcctggtgggtactttcaggtgctccctgcctggggcaaagctaagaaacccagggccttggctgtggtcctggaggagggagacatctcacccaggcccaaccctgggaggggaaggcaggtgccccaggccagagagctggagcccagtgagtccaggccagccagcaaaaacatggaagtgtgggccacagggtgtgggcggctgccccctctccccacccatcccctctgagcagggctgagccccacaggcaactcctccccccagagccgggcatgaggtgctcagcggatgacagggcccagagtctctgcccgagctggaccacacgtcacataggtttctgggatttgcttctagaaaagcctgacccaaacatttggagatgacaagtactcactggcccgcaaggaggtgctcaccaacatgtgctcccggcccatgcaggtaaggagggcccagccccggcctcccctgctcccaggagcacactagccccagacctgtgacctccacgtgcaagcacaggcccccaccgttcctgcctgctctggacatggctgggtggacgggggctgytcctcctctgccagagggtgggagaggaggccgaccccaggcagcacctaggagggggcaccctgagcctcttgagtttgagccgctgtctcctgctcacactcgctcaaggacagagtgccctggagctgaggggctactgagacctcctgtcaggctggggtcctggaggagagacagggtcccatgtggtttcctgtcccagggaacactccgcagcctccatccccacatgtggagtccagaactagctgtcagcctctggccagtgtgggaaagaagcggacttggccgggggcctaggcctgggcctgcagggaggtggcagcctgtggggtggacagctgggcttgctctgggatgcctgtcacagcgccccaggctgagcttcccccrtgcagggcccgagcatcctgggaccaggaccccagaggaccctcgggtcagcgggagcagtggatgctgatgggtcggctctgggtcccaccccggcccaggggcagagacaggctgtattttaggggctcggtcactcggcagattcaatctgttcacaagaactgatggcttcagctgacctcagtggatttattttctgacacttcaagctctgctgggtttgaagccatcagggcctgcttgggcctggtcaccgtgacctgcccccagtcacaagtgtctgcccagccaagcacctgtggcacccacagcggagaggggctgggccgtgcccactgggctctctctgttctacactgcagcggctctaggcctggcagagaaggcacagcagcccctgagtcccagaactgcctctggctctgccctgctggggcccctcccatgtccctgcctctgacgccatcacctccaaggaggtacaagccaagctggagctccagagatcggagccgctccggagttagccagagcccgaaaaggctgcattctcctggctcgcctcccagggagctcagaggcgcccttgcccgggaatccgatggcagagagttaccaggtctgcggtgctcctgttcctcagccccgggaactggggtggggacagggcagggcagcagcagagagcacagaaaggtgtgagggggcacacagtccccagtgagcatctgcatcaggacaccagggctgtcccagggctgtcccagggatggctgggcctgtgggaaagccatggtccccacccatcccacccgaccctgagccacctccaccagccaagaggggccagggcccttcatcaacctcacccaggtcatctggggaactgggccaccactgagaacaaagcccagacatgtctgggagtggaggctgtgcccacctcccccagagacttgcccccgacttaacccagggcccagcaggggctggaagggaagtggagttagggagcggagcaggtcaccatcagctgcgccctggattccagggcccgtgtgcacagagtaacgggagccggctgtctgtctggccaagggcacaggagggtgagtgtgtacagcagccagggagcaagggagccagagagacatacaggcgtgaccttggacctctgcgaggaacccgttcactcgctcccaggcagtagcactggccctgacacccagccctgaaagctcggggactgcaggacaaacagcttcaggggctgtggccccagctgggacgggctatgcgctggtccctagagactctcggtatctccccctgccccagtcctgcctcctgcccagcacaagggcctttggaactcagccctctgtgtctcagcccccgggagggtcaggtgtcagagacgagaagggccgaggctggcaggccggaaactgcctcccttgactgctgtggggtggagtattggcgagcacagaggtgcccgggtgaagcgtggcttcagctgggcgggatcagtgccagaggggatgaggacggccccgaccaaaggtgggcctaggctggagaggaagctccaagagcctgaggcccgtattgcacagggcaggggatcgcatcctgggctttctctccctcctcccactctggccagatgggaggatggacgttgcctccttgaacaaagacccacaggctccttggcttctgcttgtgtctccagcagacagcgtctgcagcccctggtccaacaaaaccgcaggcggcctcctcctcttcctcctcctcattgtcctcctcgaccaccaccacctcctccttccaccacctcctccttctcctcctccgctgtcgcctcctcctcstcctcctcctcctcctcctcctcctcctcctccgctgtcgccgcctcctcctcctcctcctcctcctccgcwgtcgcctcctcctcctcctctgcctccacctctgccatcgccacstcctcctcctcctcccccaccccccgccgctacctttctttcttcttccttcttcctgggcgagagtagcagccccggccccatgctggggaagggtaggccagagactcttccctcctggtggtgctcagcagtgactcagcagggactggacttcggaggctcagctcgtgccccctaccctgacagcatcctgggggttcctggctccctggtcctcagcagggtgggcttgtccaggccattctcagtgctgccaccttgagggcatctgggaggcccaggcaggccagatttgtctcctggaaaggacatgggtacccctgggctctgcccagcctcctggcctccccctgggrccccttgtgcagcaagggccctggccccagtcctccctggcgtcactcagcaaccagcagcccattaggtctgtccacacatcgctgccgacggtgaggctgtgggtggtgccagccttccaggcctggctgggcagctctgggcttgtcaggctctgacccatcccgtcccgcagatggcactgtacttctgctcggggctgctgcaggacccagcgcagttccggcactacgcgctcaatgtgcccctgtacacacacttcacctcgcccatccgccgctttgccgacgtcctggtgcaccgcctcctggctgccgcgttaggtgaggggtgcagtcggggtcagggcagacctgggccagctcagggctgcccacccccacagtgggtgctcagtggcccaagaccattctgccgtgacagcggaggtccaagggtcgggcgacccaagtgcaggggagcctggcctggaaactctccctacgggccggtgctgcagaagctgcatggagcccacagccagccctggacacagcygggaggagggcgctgacctcgaagggccgctttctgctgccctgggagctgggtgcttggggtcctaatctgtcggcgggggtgcagcgccatgcagcccatcccccagccatagctcttcccagccccccaggctcccactctcatgcctcaccccctcttcccaggctatagggagcgactagacatggcgcccgataccctgcagaaacaggcggaccactgtaacgaccgccgcatggcgtccaagcgcgtgcaggagctcagtaccagtctcttctttgcyrttctggtcaaggtgagccctccagcctggtgcccctcacctccctctrgctcccgaccctcctgggcacctgctcaccaggaggcctcgaggagcccagggcagtgccaggaggtgccatggctgcagcactgtccctgcaggagagtggccccctggagtcagaagccatggtgatgggcatcctgaagcaagccttcgacgtgctggtgctgcgctacggcgtgcagaagcgcatctactgcaacgtgagtgccctgggagagcccgggggcgggcagggcagcccaagccatcccgcactggaggggcacaggctgtgatgggtcacactccacccctcgctcccccagccctagcacaaagcccacctgatgggccttgctgagacgcccagctctcccacctgggatggtggctccaggcccagggtcaggcctggcccccttccccaaggacccaggaaccagagagcaggcccctccatggccagtacagctcggcaaggtgtgcaggctttggggactgtgtttataggaacgtgaaggaatgaaaggccagcgaatggtccgtggccgctctggaaactgtgtcccctgaagacaaggaagagagctgtccctggctcggctcctgccctgagtgactgttgactcacagttctctctccaaggggacatgggcctgtcctaatgctgccttaggggcttggctccagctggccctggggtctgcaggtcaccacctgcccctgtgcctggctttgaatttcctaacatccagagtgccctgggagtacagtgtccagcccgttgtgtgcagtaaacgtggtgttcataaccgggagctgggcagaagaggaacgacagagtccccctgcggaccctgggggctctgtatcctgaagttcaagcctagctcaccctgctgtgggcccagccctgcctgcactgacagatggcaccagcagggggcgcagcgctccgccgccacagttctctgtccccacctcagtgcagtcagccctggaccccccaccacttgccccccatagcacacagagccacgggccttcccagcccccacccctggcccttggtcactctcacctgctgcctcagctgaaggtggcctggcagggcctccctgaagctccctccagccaggcaagggtgggccagggccgagggctgagggccgcctccaagcattgaagccctccagggtggaagggcaggcagcagcatccagagctgaggcctgaggcttggtgtttgcactccaggcactggccctgcggtcccaccacttccagaaggtgggcaagaagccggaactcacgctggtctgggagcctgaggacatggagcaggagccagcacagcaggtcagaacccctctgtgtcccagccccctaagtcctgatgacccctctcctgcctcctgcggtgcccctcattccttcatctgtgtcccctgggctcccccagcactgcagcctcccgggtggggttttagggccctcccagctcacccagaccccctcctgtgggtcctgctttctggcaccaccttcccttccttgggggcaaccacagtggagagaggaggggctctgcctgtcccgctaatgcaggggtgctggccttctagggtcctttagagaacctgatgaaagctatgagtttacacccaagaaattgtctggaaccgttttcaccaacagtgtgccctgaacgcggacccaggccctcaggttgtgtttcataagccttgggagcgctcaggatgcatctgactccccaactctgccctgacccagggcattcttcctggagggggcccccattacagacaggcgagcagaggcttccagaggccgaaggaggggccaggggtcctgctgcagggatggaggcagagctgcgcctcgacatcaggccctgccatccttgtcccctcacggctgggctctgcacaggtcatcaccatcttcagcctggtggaggtggtcctgcaggcagagtccacagccctcaagtacagcgccatcctgaagcggccaggcacccagggccacctgggccctgagaaggaggaggaggagtctgacggtgagcccgaggactcragcaccagctgagctccaccagccgcctgccccgcctgccccgcctgcctgtcccgccacactggctttaggacctgttgacacggaggggggtttttaatttggtttttaacaactcaggggtttgtttttatttttatttaatttttgcagctcaacttttaaacaaactgcaggggagagggtggggctggaaggaaggctgaggcctggtcagcagtgaccccagcagagcaggccccagtcctcctgggaggctggccccccttttttctgggccctactgccctcctctgcccaggaaatgggggggtttcagcaactcagtgtcacagaataaaatcaagtgtggagtgccatctggtgtgtagggcgcctctgggaagcctgggcagcagaatgccccttgcacccagggcaagggacccagttcaggcttcacccctcgctgctgagccgatgtcaacacctggaactttcctgtcagttccaacacgattcagagctggctgcctggcagatgattgatactggagtctcattctgcctgattaaaaatggaattagtatgcaacactgagagcgcccccatcaccctgacgaatgtgactgtgtctgacgaatgtgactgtgtccaaccctgcccccacttcctctctgcaccagctccgcaggrcctggtgggagtcatgggtcctgtgataccccctcccctcagttcctcaagcagcactctgtgaggtcctgtgcccagctctggtgtgagtgggtgccccggcagcaccaagggagcctggacagaggagccggcctgggcctgggggaggggaggagggccctccagtgccttccaaaccaggaggggaaactggctgctggtgacacagcctgggtgacacggatcccacctgcctcagtcccgagcagagctggctggccactgggcagtcccttccccagccagcctgaccccagcctgtactccttccccctccgtgggggaagctccgtggcttggcgtccccgagagctgccagaaactaggatgaaagccatggtgagcacrgcctctgttcccctgcaccatttcctggggtgtccggattaacaagctcatttgatctggttacagtgaattttcttcaaagaaacactcaatagggtcccttgtcagagtgcctcgcagcgacagtgactgggtactgytgcctttgtyctgccaccgtcagacggggctggctatgggaggcaaccaaagacatcccgcacctgccctgggagcctttccctcctccagggctcagccacctcaggcggccttcmgtctgtgtgtcctgccacccccgagatgtcccagaggccacggtcaccccatctgttcctgtccccagaaccttctcctggagccaagtatctgcagggacagacaggcgagcgtctgggggtttggtgttggggtggagaaggctgtggggtgctgccccagcccaggcagcctgactgtgagagccccaaacaggagagccccaaacaggaaggaccagggcccttcscctcccctccaygctgcccaccctctgaggagcagtggccaagttcctctctgggcttctcrggccaggctgrccctgtcccccagggcctcccacgaagcatgggagctgttccctcacaggcagcacagacccggacggacacctgtccctatgtcccagcgcccccaggccccagtraggagtagccaggggggtgaacaagggggttcctgctgcctgggcttgtttgggaagcagatgctgggctcagagtttcttcagagagcctcaccttccgtgctggccccagagcatggcgggtccctggagctgtggaggccatggcagccccagcccaccccaccccatctggggaagtggaaaccgtatccacgagggtcaggtcaggtctctgcctccagtgacctggcaaggttgtgcccagccaggacctgggctcaggcccaggcagccgccacaccctacccagagctcagagaaggcagcccagccttctccccacaccagtcacaccgagccccgcgtctgcattcactcctttaaggaacatggttgactgaatccggtgccgcgcattcacaggatggctctccatgggtccactggggcccagcctcttatgtggcccctcgctaaaaggactcaacagaaagagtgaccagrcaccgaccctcatctaaaggaggacttggccattccctgggctgtcccacagcacctgccggccagggcccgggcacagagcgagactgtcttttcctcaaggagacaccgtgggggagrgagggagaggtagacaccaccaacctcattccatgaccagggcctggcgatgctcagaagccagtgagtgtgtcccwrccctgaagggtcagtgctggccccctggacctagggggaagatggtgcaggcagtggcccagcctgaggaaggagctgaagctctcaagagtttgcagccaccctcctggggagagactgacgcctccccagttcctgttaggaaggacctcaggaaagaactggaattacacagcctggggtggcagcctcctggtccctgaggaggatgtcaggccgcagaagggaggaacgggcatgaagcttgggaagcgggcgccagaggaggcgaggcctctgcagaagcagcaccagaggccactgcagcggctccaccacccagcagcgccgccaggaggcaggaagtgggaggccaggcaggaggggctgtgattgcccaggtgccaggaggaagggctgagaggggacagtgcagatgtccagagaggcctgacagggacaggctgcgaaagtcacgggtggggatgggcttccgccagagttgtgtgtggcctgaggacagtgcagcaaggaggccccatggtgagcacatgcagccgaagtgacaggttgggctcctttgtgggacaagagcctctccaggccactgcagggtgttcagagaacaaggcctrcaaggatctgctgtgcctgcagctgggcagtagaacactgagcatgcagggccggggtgggaagcaggaaagccacatggacgagagagccgggcctgcccagcagtgccttttgggagcgcaggcaggatgggatgtgcagctgtgacctgcccggcatagaactccgtctggctggggagaggaggtctcttctagccagaatggaccaggaggtcccgggaggacctgggaggaagtggattgagttgggccttagaaggagagccaggaacaggccaggtcaggggagctggagcctggctaggtatggagagagcagggtacacttgctgcaactgtgagaagagccaggggtggccctggtggcctgggygcgtttagctgtgcctggggccaggcctgactggctgcaagtcattactataggcggaragtgcagagtagcgcgctcctgctgtcactccctcctccaagtccacaaagaggcaagaaagggaggattttaaggcctatccataccgcatggcrggtgagagcagaggagcaaacagcacttttggatcctggaaagcagaaggtgagtgtcccaggcgtagctgacctgagaaaggcgactccaaagccagcagcagcaacagctggaactgccccagcctgcaccacgggacccccagctctgagactgagagcagctctggggacctctgggctggggtgaagagggatggctggaatcattgttgcaaacaattcagtaggcaggcagctccctagatcccaccgtggtctgcagaggccagcacctgtcccgacctcttactggtcggccctggagagccatctcctacagaggcaaaatgaacggtctctgggccaggaccaggcctgttcagggggatgtgtggctaagtgcataagggatgctgagactacagccctcgtgcccaggcagcgctcagggcatggatagccaggccctccccatccaggccagagatgggaagactccatccaatctcattccatgaccagggactggcaaagctctcagttctctctccatcccagcaggagacaaagaacccaacctcagagattcctcaactcggagacccagccaggccaccctccagagcatctcagtctgcaagccccttggtgtgctcagagcttccagtcacactgctcatgcctatccgtgcacagccagggattgcccttcgtggaggaaaacttcatgaaacaaaaaacaagctccgtggggaacacagaccatagaggaaaaagaaagctgtagaaaaagaaatgatgaatgccttcctggaggtgagaaagccatcgtgaaacgagaggaggttgctccaaaaagttcctagagagcaaaacaagggcccttggaggcacaatgattgccaccgtggagacacatttcagcgccactagagtaaaaacactgcagacaggtgagctctcaacagatacatgtccctcgccttctcaggaaagatgggcagtaatgagggcagaagccacaaagaggaaaccgtagtgacaggacccagggtccttcaagctgcggtggggcaagcgctcgggacagtggtgagggagcagctcagccccaggtggtgcctggcaaccygccccgggacgtcccacccagggcagcagtagagtgacatggatagaaagctgaattccccagaagagcctggaggacattgaagtacttcgcatagagcctcgggttggattagtagtacatacagaatgatccacatgtgaagataagaccatgattggctccagagaaaacagcagtgcaagcaagaagaggtagctagtcacagtttacgatctggcaatagcgtttacacagtcatcaccatagaaatgccgagtcaggatctagtttactgcagaactctatcaggaggactggaagatggggacgctgtccacatgcagggaatgcagttggtgaaatggaagctaaatgctcattttcctcagtgggaagctgtggcttgaagatgactgtaaactctctttccgcctcttcaatcttgacaggccccagggctgctaagctaatatggcagaagggacactgtgccagttgcaggcccaggccttaagagactggcagcttcccctctctgtctctggaaacctacctgcccttctgtaaggaagcccaagcagctctggagaagcccttatggaggggcccactctcagcccacagccagcaccagttgggcagccacgcagacccccaacctgcaagccaggcccgctgaggcctcagtacacacaggcagtcccatcagccctgcccagatggcagttttgtgatcaaaatatagacgatagatgattgttttttaaggttgttgggggtagtttgtcacacaacgatagataatagaacatcagtaggctgtgtgtgtgtgtgtgtgtgtgtagcatatatatatacacatatacatatatacacatatacatatacacatacacatatatacacgtatacatatatacacatacatatatacacatatatacacatacatatatacacatacacatatatacacatacacacatacacatatacatatatacacatatatgcatatatacacatatatacatatatacacatagcttcaaattcagacatgaagaagtatcttatttagcaacagtggtaaatagtaaaacaccaagagagaggaaagtggttgcctcagagatgggaaaatgcaaggagggagacggaactgctgtttgttttaacaaaccttgtagatctgtttgatactttaaactacattcacatataacttggacaaaagtaaaaactgaagttgaaaaaaatgtattcatgctaatagcacaggaatgatccacaattggattccaaggcttcttgtacattcagcatagggtgtatgaaagagtccactattctagcaacagataaaattcctactgacacgcaacctcaggttcccactcgtttagaaggctgcgtatggtcttctacttaaagcctcaagtagcagtcatggcagtgacaaatcctcattgcctccatagaacctctaggctcatgtgtgagcccaggctgggctggggcccctgggagcccagggtgaggggccagtccctgggcagctccgtgagccaggagcagctgtgccacctggggaagggctgcacggtcgatgggtcttttctgcagaagagtgtgccccagcccttgctgggcacagatcaaagaggtgttcatgggtcgaaatcacagatttcaagggctgataggagtcagagkgkgggggctgggagggctgaggcaggttaaagatttgagaggggctgctgtgtccacagctgcatcacactgctctgctgtcccctccatgttccccggcactgccgcctaccctggggtcttctggaagtaactgaaggccccctcaacctggctcatyatcaaagcagactgttgactagctgcaggcaaatatgaagaggctatttcctgtcacaaaaaggccatgctgtatctttctgaagctatggagctgacgcaggctgagtaggctsacctttcactggaattgcaaaggcctagccacatgaaaccgcgcctcctcatccaggagacacggaaaagggcccagcagaacgcagacaaggatggggctgcccatcttcaggcctctcacagcccctctgctgaagatgcagaagcacagccctccacagaggaacgcctgcctgagactcggggcatatgtgacagggatccagacacacgactgtttttccttcagcaacagagccgtgtattggaagcaaagccccaaaacacgataagagtagaggagcagacaacccagttgcagatttgaagaagcatgtggaattccttgtggcggagaaggaaagattatggaaagaaagtaaacaggtaaaggctgaaaaggccagacttctaaaaggtccagtagaaaaggagctggatgtgggtgctgattttgtggaaaagtcagagttacggagctcgcctctgcattcagaaactgctataccctcttcagccttgcagaggtttgcagcagatgccaggaaagccaagtacattccaatacccaatcttytccctcagattttccatctccagagcttccctttatggagctttctgaggatattctgaaaggatttatgagtaactaaaatggaaggccatagaagaagggagaagaggaaataatactaagtcatacagttaatccagcaacaaaaaatgaaaagggaaagccacaggcaagggtaatcctggaaatgcctcgtcatctggtgtactgtaggagaagacgcattgccaggatgtggggaacagtcgctgtgaagcgtgtcacatacctgattcactgacttgagctgatgatgccgacctggcagacactaaactcgtggagggtcagtttctcttgacaccaaccaaatggctgcctgaaagaattttttcaagcaacaattatttttcttatcttcagggttaaaatgtataaaagtatgttatgtataattaatctgttatgtcataagtgatcatgcaaaacctaaatattatggcagcctgaggggctgcttcgtatttgaaacatgctttgtctcaggcgttgacgtatgtatgcattttgttactggcgttttgtataaggtgtgagacacacctttccagatgaaaccatatgtgccgcactgtgcactactcataacggtgataacctcaagaccatcaggagaaatatttaaatttccgtgttatgaagaaagaaaccaaattattagttatgctttttaacacaaattaccagtttacataattaatgagggtgcattttaagttctaactttattgtataaggcatcatttgaaagtaccaaggaagtcttctttgtttttagtgatccgtgagtggaaggaattctagttggcagtatttgattgtaagaaatcaataaagtaattgtgtttaaaaaaaaaaaaaaaagatctgagccctggtggaggtaacaggatgcgatggttttcacattcaagaaggttctggagaagagagatgattcttggaatgatgagcttcaatttgcacatgcctgagtttaggttctgaatttaaacccttattgtaagatcatctctttgaaccttctctctttttaagggtttttacagttcagtggcatttttttttaatatttaaaaagtcattttaggagaaacatccatttaaataatttattttacttcagaaagttgttttactcaacgaggatcatgaactgagttgtgttctttaacattcacaaattgtgtattgcttggttttggaaattagttagccaaataatttaaaaagcaccagaaattgaagtgcaaaatagaacaggaaagagaaactctccattagtgtattcagcttaacaggttttcaacccaccagggtgctgttggaatacaattgttctcctggttcttatgatacaagatcaaggttaaaccactgaatacagttacagcatccttgacttcataagctttcctttccatgcatccatatagatgcccaaagcaccattcagggcagaatttagtctttcgtcccgcactctcaaaggacaaccaggagctaggacttggctgaaccacccacctaccaggtgcccctgcctgtgccaccatccttgggccaaggggaggcctggcccctgccacctcagcgatggtgaaggatcagcccacttggggcccggggcgcctggctgagcgccccctccactgagcccgttcctgtgcccccaatttcccacaggctgaggccccagtgccctgctcgtgctgctgagggggctgaatggcctgttgagaggcctccccaggaagcccatagggaggaggttggggtgtctcctgccttgggggtgggacagtcccttcttgttcccaccccaggtacctgacccaagttctcctgtgcatgaggaatgcctggatgtccctccttggtaggtgggatggcccagagggaggtcctgcctacacagcccttaattaggaatttagagatttgtgctctaggaaggagctgcttccgctaccatttggccaactgtgtgctgtgcagacccgcagcttggaaacaggtttcaaggatgttcaggacttgcctcgtgttcataaaggtcaggggtcgcctcttccccctgctcccctgctaactctgcagcaggccctggactaattaagtccccgcaacagccccgagacccaggctctgtgaaagttgtcagaatcagaatggagccacttctgtccaaccctaagagcaacaacaaaatcatgcggccgggaggttctgaaggagggccctcccgcacacctgcctatgatcagagcccttccgaagcctctgggaagggcacagatgcctgcaacaagaccttttgccaggactttacaggactttgcagctcactacgtgagtcacaaggacggctagccggctgcacaagaacacttgcctgatacgctgtgtccactcgtaaattgacgtccactcctgggataagcccctggaaccagtgttctcttcctttcaaaataaccatgtagccagacttggtggtgggtgcctgtaatcccagctacttaggaggctgaggcaggagaatcacttgaacccaggacatggaggttgcagtaagccaagatcgcgccactgcactccagcctgggcaacagagcaactcaagaaaaacaccaccaccaccaccaccaccaccaccaccacccaaaaaaccgaccatgcactgctcctttcacctttcaaagccccccttgcctcccctcctccgatgcgcccctagtttactaaggccggggctctgcatgcagtgctgctgcttattcccagttaaactccatagttttggagagcctccctctgtttcttgaggttgacaggactatcattcttttcgttcatagatgagggaattaaggcttggagaggttccgttctgaaggacactcagtaagtggtggacagagaatttcagctcagatccaaagcctatttaatttacttcttttaaatccatgcttcttagcactcagctagtcacgtatcaccttgacaactttttgccgtagccacattactgcctgtggtatgatttgctgaatatttttctctacataagctcagattttccttaaatctgttaggaaacctataactgaaaaatggaagaccactatctcttgccgtaaacagaagcaactgtgtattccacacacaccaaaagcaatgttcttacagcctccttagatgctctgagtctaaagcatgctttatcttgttaaaggggggatggcaaagttagggtgatagtgaagacatagaaccaactgagattctctccttgacattatcagaagggttggaagacaatcaaaaaataaccagctgggagcggtggctcatgcctgtaatcccagcagtttgggaagccaaggtggccagatcgcttgagcccagaagtttgagaccagcctaagcaacacagcaagacctcgtctctacaaaaaatactggctccgcaggaggctgaggcaggaggatggcttaaacccgggaggccaaggttgcagtgaattgagatcacaccattgcagtccagtctggatgacaaagctagatcctgtctaaaaaataactttctcatcgtgaagtttaatactatttaatgtcttgtctgatggcagctaaaacatgccccataccacctaatctggagtaccacactttggaaataagtgtgtgtcacattttggaaaatgctgattgcgatgaaaatgggaaacatggctggaacccatcatctaatccggatcacactgcatcactgcatagtgttcactcctttttctgtctttgtttttaagatatgtcacacacgatgaagagtgcagaaaacagaaaggtatggcctaaagaagaattacagaattgaacaccaaagtaaccgccacccagatcaagaaattgattgtggccagggttcccccacaccaccccatacctttcccatcgaaaacactattctttcttaccactgaattttttttctttttctttttaaagatggggtctcactatgttgcccaggctggtcttaaaactcctgggctcaagcagtcctcctgccttggcctcttaaagggctgggattacaggtgtgagccaccacacccgaccaccactgaatatttggatactcattttattttcatagtttttttgttttgtttttgagacagagtcttgctctgtcacccagactggagtgcagtggcatgatctcggcttactgcagcctccacctcccgggttcaagtgattatcctgcctcagcctccagaatagctgggattacaggcacatgccatcacacccagctaatttttgtatttttagtagagacgggggtttcaccatgttggccaggctggtcttgaactcctgacctcaggtgatctgcccacctcagcctagttactgggattacaggtgtgagctactgcacccagcctcttttcatcgttttatcccccatatagtttaggtttgccccatttgaacttcatgtatgtgtaagatatattctatcctatgtgttcctttgtgatttgtatattttgttcaactttatgtttgtgagatttaatctgttgtatgttagaaaagcctggtcatttccattgctgtataatattccagttatgaaactcctgacactttttctgctgttgatgagcatttgggtttttcagtgtctggctatttaaacaatgccactttgcacacgttggtgcttacatcctgggacacgtgtgccaagtttctgcaggacactttcccgggatggaattgctgtatcctgggatgtgcacaacttgacgtcctgaatgatgctcttgagtctggtgtgtggggcgcctattcatccacctccctccaccctactatgggtggatttttaggtctttgccaacctggagtctgtgataccttctccaccccaccccaatgtgctttatcccacattgattggacgccttttcacacatttacttttgaactcagcctgaggttaccaaaccctctggttgaggctacacctctgggtgtgcccagggctgctggagaatagactctccctggagcttcatctacctgtgcaagggaacggggtcaaactcaagtgtacaagctgctctagaagatgcagcccaggcctggctggcccagggcactggtccctcccccggcttcctcctccaggaagaggtgtgcacacccacaggcgtgtacacgtgggcaaggctggcccagcccaggctgcaatcatgacaaagacaaggctccacttaatgttgtcaccacctgccccaccctttcccacagcactggaactctgggcccaggctcctgccagccccacctgtctgggccatggctggtgagaaaccaaggggtgccagggctgccagaccaccctacctacctacttcccgctgtctccaggactcatggcattaggaggccaaacccacactgtggcctgggctgtgtgcttcgagcttcacctcccttcagcaccagaacagggtctggctgtaggtggctcccaggaaatacagaaaaaatgggtgaatgaacaagtgacagggtgtcttgttccacacaagacacagtgagtgggagtgggggtggcttctggctgcaggatgcacactgccctcacccagatggcatctgcccccaacaccccattcttgcctggcagacaccggggcccaccctgagctgcctttctcaggaccccaggccaggcaagccacagcctgccactcccttcagccagtgtggcttcaggtcaccaacctggggcagggtcaagctggcaacaagggaaggggccgggacacagtcctccctgatttaaactctaatctcagcgtctgtgcagtccagctcctccaggcgctggcccaggacatacttgatgtcttccaccagctgccacacctgcagagtcgggtcggggagcaagggtcagcccagcagcctttcactctggtccatcgctcctggcatgaggagtgtccccatctttaggcaccacttacaaagcccagagcttggttctgagcaccaagaggaaacc

SEQ ID NO: 94816 - DNA, 17390 bp, Homo sapiens
  misc_feature (1)...(17390): n = A,T,C or G
tgctttgtgtcttcacttgcacattctctgctttgcctgggctgaggtcaatgaagcagtctagaccaggagtctggccatgaacatgcagcctactgataaatggcatagagttggggaggatagaaggggtgggggctggccaggaggccttcccaggagaggtggtaaccaagttgaaacctgaagagtaagaatgagttggccagataagatgaaaaggtattcatgccaagggggccagtgagtacaaaagattagggtgaaagaaacacggcatacagtcaccctccatatctgcaatcaaaaatattcaggaaaaaaaacaaaacacaaaaaatagcaatacattactaaataatgcaaattttttaaaaattagtatttttggccaagcgcggtggctcatgcttctcatcctagcactttgggaggccgaggcgggtggatcacctgagatcaggagttcaagaccagcctggccaagttggtgaaaccccgtctctactaaaaatagaaaaataaggcaggtatggtggcacgtgcttataatcccagctactcgggaggctgaggcaggagaatcgctggaacctgggaggtggaggctgcagtgagctgagattgggccacagaacgagactccgtctcaaaaaaatacgtatttttacaggtggtggctcatgcctgtaatttcagcactttgggaggccaaggcaggcggatcacttgaggtacttgaggtcaggagttctagaccagcctggccaacatggtgaaaccctgtctctaataaaaatacaaaaattagccgggcgtggtggcgggcgcctgtaatcccagctacttgggaagctgaggcaagagaatcgcttgaacctgggagtcagaggttgcagtaagccaagattgtgccattgcacttcagcctgggtaacagagtaagactctgtctcaaataaataaaaataaaaatataataactacatagcatttacattgtattaggtattttaagtaatctagagatgatttaaagtatgtgggaaggccaagcacagtgtctcccacctgtaataccagcactttggaaggccaaggtgggaggatcacttgagctcaggagttcaagaccagcctgggcaatatagtgagaccctatctcttatttaaaaaaaaaatagtaattttaaaaaaaagtatatgggaagagcagtgcaggttttatgcaaatactacaccatttttatataagggatttgtgcatctgcagagtttggtatctgggtaactaatccccagcagattcagagggacgactgtacttaagggaatgacggaagccagcctagcagagctagagaatcaaacaccagatgaggaggaactggaatcccaaggcagtttcactgtcttcatacatagttccctgggcccaatccagaagcccccaagccagcaaagctcctatgcctgctaaaccctagcacctgagagccaaagaggttttgtagagaacctggtctcttagtgatggggacatggtaccttaggagtccagtgagcaaaagaatgaacctctgattgtgcttctcatgtgtcccccaaacccaacaggttctgtttggattctgcaaagcagactcgtcagaaagttgctgtgaactggaccaacttcagcctcaagaaaaccactcctagcacagctcagtgaggtacagagaccccaagagttacatccactgcctctccctgtgcttggccaccctctctgtacgctcaccagaccattctgtgctctggggcacagggagttggacttggggcatgggatccctggcttctgtctgcatcttcacagcaatggctggctacagcctccaaaggtcaaggccccatctcctcccgcagccactcacctgtaggcctctgttctattactcctccctgggccctgctgcccatgctcctgaaggtccccttcctggactggcatctcctaaggcataaccatcagggtcttaaccagctgatttcaaaagtgcccaggtagccatcagacccatggggctgccctcacccctgatgttatcagtccttgtgtcaagtcccacttcctgccctgggctcctcagtgtaggctaccaaggtacttcccagctgaagcagtataagaaggggccagccctgagtgaacatcgtgggtcatttaggcatggaggagttgatgggggctacccaaagcagggcaagctccatgaggatattggtagccacagtgcctcctagaggaagagacctgggtgccagatggcattggcatcccctcccagccacccacacaggtccttttgtctgaaacaatgatgtaccagatgatgatctggactgggaacagacaactggagaaggcactgggcctggaaccctattgatgaagagaagggcagctagcaggcagaccttgggctgggggctgagtggctctgcagtttcatatctcaaccctcagctgtgtccctggggtcaggccttttccggctggcaaccacacagctgtcctggagactggaaggctggggcaggcagactgagctcacaaacaactcacttcccccatgatggccccacctgtctttctcctctttccagtgccaggccagctcctctctgggcctaagcagcaaacttcctggaccctcagctccccaggggcagctcagagagcctgcagccaggacagccttcagagctggggctccctgtgacccttgtgctgccccagagtccagactgtcttctttacactcactttagtcctcctctcctctgaaggggttgggctcagtcagccccctttgccaaactgagatgcccacaagccccagaagtatcttccagatccaaggtggcctcctgcctcttctccacctccatgggaaccaggagtagcaggaaccccaggcacttcatctgttatccctactgagagaaaagagatcgcatttcctcccacaagcccagttctgtcattcaagaaatcaaatgcaactgtctccttccactgcctcctcttgaccctttttcacctggtctggcctcttttccaagatagaagatgcccctctccccaccccctagtaagcgctctcctttgagcctcttcaccctcccccgggctgtgcacctacagtcagaggcaggagcacagctgcacagctggcctcccagcccctgctgatggacagcaagtgccaaaggctggatctactcaaggattgtcccacaccttgtcaggatcctgggactggggctctgtctcccaacccgttaacctgcatcctctgctacaggtgatccagggaatcttcaacattttcagcccagggaacaaaaatagcagccagctgtttctgctaccagagacccatgggtacccaagtggcatggggaggctggagcatggctcattgcttactgtgattctgctctttttttctttctcaggccctgcccaggctgagctgcttcagggcatcctgaggccctgactgccagctgaaggcgtataatttttccctccgtgtgccccacctacccgtccaagaccctctgtgctccccaccatcctggaccaaccaaaagctgaacggatgccacactgtgctggggccccttgacctcagcagagccgcttcctggtgctacgcagcctccacactcagagcccgtggactgggctggcctaagggccagggctgatggtactgctggcccaacactgctctctttgtgtttggtttttttgtttttgtttttattttgtttttttccaattctttacttttgatactgtgaagatctttcgtgccgaaagataaagcaacatttggacacagagttggcatgttggtgatttgtgggtctgggcggggagggagttgagggtgtgctcagaagcatgggctctcccttagtcactaaccctagcatgcaccatgcatcagcagtttggtgctattgtcccattttacaggtgaggaaactaaagccgataggaaagtgactcagctcaacttagtctggctgattagcattgagcgcagactggtatgattatggcatctgtgcccttttctccttttgggaggtctctggtatgtgagcctggggcagccccttccccactctttcctgtttccctctttgcaagatgggtgagttggaggggttgaagatggtctctgtgcatctggatgtgagaagaggtctaggaaagaccctgaggccttcatggatctgtagcctgggccatcgaggcccctcacactgacttcacagtcaggggaagttgggggtaaattgagttttttataaattagatctgattttccagtgggggtgggacatgtagctgagggcttgagagttaagaggataatgaactcttctgtaaagtcaagcaaactacctcatcccccgaaatggatctggtttgtaaatttggattttaatacaatgagttttcccaaaatgcccctgacacacttgtgtccaaactccatgccccaaatttagttttcgctcctaaaaccaactcgaggttatgtggggagctaacagggtcactaagagccatgtatttgggtgttgtgagcaggaccagaaaccatgtcctccatccctcccaggttgagacccaccatgggactggcagtaagcaccagcttattttttttatagagatggggtcttgctatgttgtccaagctggtcttgaactcctggcttcaagcgatcctcctgccttggcctcccagagagctgggattacaggaatgagccactgtgcccagcctaagctttctttactaaagaagacttcatgaattcctgtgtatccttcacatcccagctaagaggccattgtactgtgaaaactatgacacttcgaaaagcggtaccttgtcttaggatctttctctttaagaccagttatctgtctatatttctagtctcaatctacataagctcctcgcacaccaggtatgtgtcttgattatcatctgcttgagcgcagtgccagcgcccagcacacactcttgaaggcaagaaagcacagagctgaccaagtcattccttagaagtctctaataaagttgaaaccacttactctgacagtcacagcaggcatgctctggtcgcaatctccttttctggccttaggtctggcttccccatcccacccttgccgcaatgctgttgcctggtgaatctgtgtacttgcacatcgccagacctgtattcctgcagcgccctggcccaggacgcctctcctctcccggcctgagattgccacgcttccctggaagcgccccccaggcagctctgttagagcatttacagtaataaccgtttacatttatacagggcctcccacttcaaaaccactgccatccgtatctgatgcgtgccccaccagtgaacgtatgtgtcacacaggcgcagtcagggaggcagggtgtgtcgagcggtttatcccgcaaccccggcgtccccggcagggatgaaagcgcagggcccacgcgaactcggcccgcagctcccggccctagaggacgcactgtccgccggcaggggcgtgcccaagacgccatgctctgggagaggttgggcacctggcaggccgccccgactccggatcagctgtctccgctgcgtacgtcttcctcttccaatgggcttggattgagccttctagcgcatattccaagtcctccaatgtcccacaatgccttgcagccggtttcgccctcggtcctggcaactgtcgcgtaaccacccatgaaagcgtccatgcctcgccgtgcgatagtatctccggaacaaatttgtccctctgcgcgatccggaactccgaggtcgttcctacgcgccgtcgttcgcctcttcacatcggattggrtctcacgcaaggatgaggcggggtttcgccgtggcgcgcatgcgtgcagcaaagaatggaggagtcggaacccgaacggaaggtaggagagaggcgasaccccgcgcgtgtgggagcgggcgtgaagaggggagcaggccgtgcctgactggcgtgtgcttgcagcgggctcgcaycgacgaggtgcctgccggaggaagccgctccgaggcggaagatgaggacgacgaggactacgtgccctatgtgccgttacggcagcgccggcagctactggtgaggggcacgcgtccggggagggatggggccgtgaccgcggggtcgcakgrggcgggcgtggcctcggcctccgtggggaggagggcagtctgaggagtgagcttcagtacaccagggcgcggcccccagacaaacgagggaccgacggcttgatctgaggggtagggcagctttgcgcctcgggcacaggatcctcgccccaaagccaggatcctgacgctgaccttgtggactccatgcccatcctatctgtggatcccgggtggaacctcagctccagaagctgctgcagcgaagacgcaagggagctgcggaggaagagcagcaggacagcggtagtgaaccccggggagatgaggacgacatcccgctaggccctcagtccaacgtcagcctcctggatcagcaccagcaccttaaagagaaggctgaaggtgggctgggcagcactgcctgggcgagaaagaagaagctgrgcctggtacaccgttttggtatctgtctgacatcttccacttcttttctcagcgcgcaaagagtctgccaaggagaagcagctgaaggaagaagagaagatcctggagagtgttgccgagggccgaggtatggttgtagccaggatagtgagaaggtggactgagtcttctcctcccagccccaggcatgttatatctcaagggatctggcttctcagaagcaggagccagccctgagccatgtctctctcttcagcattgatgtcagtgaaggagatggctaagggcattacgtatgatgaccccatcaaaaccaggtatgtctgtacagtctgcagttgcccttgcttaggatggtacatgcagggatgctcccaggccagctattcccagggctctcttgatccctgttacccatccacagctggactccaccccgttatgttctgagcatgtctgaagagcgacatgagcgcgtgcggaagaaataccacatcctggtggagggagacggtatcccaccacccatcaagagcttcaaggaaatgaagtttcctgcaggtagtcaggggctggagagagataccacacttttataatcaaatgcctgtgaggttatgtcctggctcccactgagctcagccacatctgcattggatccagtcactggggctggagggatttgaggaggagtttctttaggttccttgttgcctcagctgtacgtgttcattgttctctgctgttacaaagcttcaggaggaaagtgccattgggcatagacactgggtacaaatcctggctgcacctagcctgtgggccttggacaagtctctttttttctttttttttttccactctctctctctctctctgagcctcagtttcatcatctgcaacttgtaggggtagtgccagttttacaggctttggggctctgagaaagtacctgtgagtcatgaagacgatgtcggttggttttcatagccatcctgagaggcctgaagaagaaaggcattcaccacccaacacccattcagatccagggcatccccaccatgtgagtgtggactgtggacctggggtccttgaggagggctggaacagggaggagcaatggctaggtgtccttcatcttctgttgaaattggccctcgggtcatcctctcccaacagtctatctggccgtgacatgataggcatcgctttcacgggttcaggcaagacactggtgttcacgttgcccgtcatcatgttctgcctggaacaagagaagaggttacccttctcaaagcgcgaggggccctatggactcatcatctgcccctcggtaagataggctggcctggagggcaggccagagattggggctrccatctggtgccagcctttgtccctctgcctgcagcgggagctggcccggcagacccatggcatcctggagtactactgccgcctgctgcaggaggacagctcaccactcctgcgctgcgccctctgcattgggggcatgtccgtgaaagagcagatggagaccatccgacagtgagtgctggcgctccctgccccccacctctgccacctgcgagtctgtggaaaagctaaaggaccctttaccttagccactccacagatcttcacagagggctgctgtgagtgcgaccctcaaggagctcccagtctaatggggaggttagttgggggaggacagagggatgtggccaggtactgtgggagcacggcagatggaatggcccaccttgctggggacatctgggaggtgggagctcagagaaggcttttccgggaaggtgacattygaattgggaagaggggcagtccaggctgaaagcacagaggcggacggcccaggaaggtcagggtcattcagtggtcagtcaaggaggttgaggcactggggtagggctggatcccagcggcacctgtgtcctttcagtgctgtgcagtcctctgcagaccaccagaggccctggaccaggccctctgttcacagatgggccagaccccatcccggaggccttcctccacggacttctgagtattagggagatggtgagcacagaaaaggtgaagccagtgggccaggaaagcgagcccagagtaaagcctctggagcttgatgacagcgcttctgggtgagaggctgacccaggagaagggggaaggcgcgccaggccgagcggtggtgaagatggctgcagtgccttgggaaagagctgtgtgctatacatagggcaggtggtgggaatgatgagaaggggacagacaaagaaataggaaggaggacagagagcagagcagatgcagggtgcctgcttgcctctagataggtgataggccagtggccccaacctsagggtctctccttggtccccagcggtgtacacatgatggtggccaccccggggcgcctcatggatttgctgcagaagaagatggtcagcctagacatctgtcgctacctggccctggacgaggctgaccgcatgatcgacatgggcttcgagggtgacatccgtaccatcttctcctacttcaaggtgccgcccccgcccggccagggcaccctgcaccgccccccactgcacgccacatcagactgcagggaccccatgcccctggccaccccaacccactgctcatactttgtgggctgtgtctcagttgctcagcttccccagaccccatgcccctcagcccagccctgtgtgcccttggtcgcagcccccctcttcctcagggccagcgacagaccctgctcttcagtgccaccatgccgaagaagattcagaactttgctaagagtgcccttgtaaagcctgtgaccatcaatgtggggcgygctggggctgccagcctggatgtcatccaggtgggcaggtgctcctgatgggcggtctctcacctgtgggggctggatctgacaagtctccctgaagctgattggagccrggggtccaccttgtgggaaccgggggtttcattcaaagcccctgacgcttaaccagggccatttttagggcaccagcccttggyggccagaggcttctggtcacctcctggtccagatgacgggccatggcagggctgtggcgggtaagcctaatctcaagatcacctgacctgatctttgtggtggcaggaggtagaatatgtgaaggaggaggccaagatggtgtacctgctcgagtgcctgcagaagacacccccrcctgtgagtgcagccaggccaggccggggccagagtccccaggaccagggagggctttggaggggacagagtgccaggggaggtgcggtgggtgcccaggcagttagcccctgactggagttggtctttccggacaggtactcatctttgcagagaagaaggcagacgtggacgccatccacgagtacctgctgctcaagggggttgaggccgtagccatccatgggggcaaaggtcagggtggtgcaagcactggcttggaccctgctgcagtagcagngctttacctaatgccttcccctgcctggttggcctgccactcccctrtcccatggtggctctgacagtgtctgcctgaccctccccagaccaggaggaacggactaaggccatcgaggcattccgggagggcaagaaggatgtcctagtagccacagacgttgcctccaagggcctggacttccctgccatccagcacgtcatcaattatgacatgccagaggagattgagaactatggtaagagcctggggcccaagggcatgggttaggccggaaaagggccaagccaggcccctagtgtccagcgatgggccagagactctgtccttctctctgcagtacaccggattggccgcaccgggcgctcgggaaacacaggcatcgccactaccttcatcaacaaagcgtgtggtgagtctgttaccagcgccaccttagctgttccctgggtcccctgcctgtggccacccaggttctggccacagagcccaggatgggccctgatgsttccccactcctcccccagatgagtcagtgctgatggacctcaaagcgctgctgctagaagccaagcagaaggtgccgcccgtgctgcaggtgctgcattgcggggatgagtccatgctggacattggaggtgactgcagagcgggatccccgagtccccagccggcaggtggcarggaggggtgctggaagtcagaaacgtgaaaccrgtggaccgagggtgcctaacggggggcccgaagtccagggcatggatcctggtccttgacttggctgacccctgtccccattcccccaggagagcgcggctgtgccttctgcgggggcctgggtcatcggatcactgactgccccaaactcgaggctatgcagaccaagcaggtcagcaacatcggtcgcaaggactacctggcccacagctccatggacttytgagcygacagtcttcccttctctccaagaggcctcagtccccaagactgccaccagtctacacatacagcagccccctggacagaatcagcatttcagytcagctggcctggratgggccaggctggtcctggctgcctgttccctgtgctcttcagaattactgtttttgtttccttttaccccagctgccattaaagcccaaacctctagcccagccctggccctgcctctgtgtttcacctcatccgccccctggttcctggacagacgtcacctctgacctctggagcccctctgaggcaaggccccagcatctcccactagcactgccaacacctggcctgctggtacttggctgtggaaggagccaccgagctggtgcccgcctctggggactctgggtctctccactgggttgtctgaatttatgactcaaggagggaccacaytggcgggccaaggagaagtgcttggattctctggtctccctggccagctgtcatagctctcaggcccactcttcctgtcagggctgtgatgtttcagggacttctcctgaagccccttgggaggctgcttcttgcctcaggacccccacccactgcctgcctgtgccagccacctggagggagccctccattccgttgactgaggaggcagcagatgtcatagaactgccatttaggccacaagctctccctaagcctgctctgtgcccagctctgctgagctgtgaggacctagatgggccagggagatggctgcctgggaagccgtcaggcgaggggagagaaagacgcacaygcagaaacgtggacggcagtcacaagaccgctagcagatgaggcaggatctcagcatctggtgagaggtaggcagggaacggcacaggcggccacacttcctctgagccaggcactttgcatgtatggccacatgctcattccagtgagacagcggttgctcaagccatatttgtcacttgatatgtggcattgggcaagttacttaatttttctgagcaccgatttcctcactgttgaaatggcgatgagaacgcaaaggatgtggcgtctgaggtggacggagcttagggctgcttgggccacagtgggcacagagctgggtgccaggaggccttcaggacatatttcctggccaagtgcattcccaaatggcattccttatcctcttccatgttctctcccagaggtggtgctgaatgacctgaggctgttccagaataaaggtatacacacagccccgctattggcatcttgctaggcaagccaacaaaaggcgcccccagcaggaagcaaagctttaaatgaacatgtgacctctccggggccccctgggacctgccacccacactcacrtggttggggccattcagggctgtgggtcccatgtggactggatgcccagcgtgagtgtataccgtgagggcctttgagctctcggacagcgtggagtggtcaaggaaggcctccaggaggaagaggtggccaaccgccccaggcagcacagtggtgagggggccctggaggggctggcctgggggagatgcaggccagaacacacaggtccctgagtgttgggctgaggagcctgggctgcaccccaggaaggggagagacaggttggtcttgggttgtggagagtgctgcatggagccccagtggggcagtggcccctggggggatgccaaaggctggtgatgttcagtggctcgtgaggtggagaggagcaggtgaacacgagagagatttcagggagaaagaaaagcagcaagatggggtgaggcgctcaaaccaggacgccgagtgggaaagccaggagttggctagagaagggtcctgggtggaggcagggccagggagtgtcaggcccagggtgcgcagctgcccggggcgggacgggggaggggcgggaactcatgactcggggagccagactgcgatcagacgcgcgtgcccagctgaaccaggtgcgtgagaaggctgccttcaggtggccgggggctccctccaggtaggtgtgggcaccttgggcagccagaaccccagggaggaaatacatgctgcccccagcccctgagctgaagacaggctcccctccccccggcctgcagctgtctctrgacggagggacgggaagtggccagaaggggaagtgtgaggagttcccgtccagcctgtcrtcagtctccccaggtcttgaagcggcggccctgctcctggccgtgaccatggaccctckggagacccctatcaaggatggcatcctctaccagcagcatgtcaagtttggcaaggtggggacccctggctgccaggcagctgccaaggaccaacagtgggtggagaatgcagcctctgcccctgcctcggacagcccaggcagacctgggagacttgggaagggagtcagggtggaggatcccacccaggtatggggagtggaatggagtgcgggtgtcagcctgagacggcaggggctgagcaggctctgccagaccctgcctccgggagagatgggaaatacaggagtgggagagggtcgaaggctcaaacctcccagcagggaagagcttcacagcctctgacccatgaaatagtgccaccgagggccctaaatagggtgaggggctgagctggaggaggcctcaagggtggagcccctccctgcagcggcactgtcctgggagcaaggaggcagggggtcacctctcctcggcagcagccccacacccccgcagctcagctgcagctgctgcccaggcagataaaccgtcagtttcctttgctcgaagctatttgcatgtttccttccttaacagcttgaggcagaggcctccctcccaccccagctcttggcctgtggcccaagtgcccctttttgggggtgagagggaaccaatataatggcagtgtctggtggtctgcccggccactggatgctttacaaacatgacccagtagcagtcccagctcgagttctcatggccttttgagagacgacattgatgcttgtggaggtcacagttaggaaagagcgggctgggatttgaacccagggctgaccaatcccaagcatagccaaggcctccttacctggctccctgagaaactggggagcagaggcccgctcctggctgggagcgtttgccgagcagcttgtgctgagccaagtggcacggacaatctgccacccaagggtcttcaccctcccgctcccctcccgcagaagtgctggcggaaggtgtgggctctgctgtatgcaggaggcccatcaggcgtggcacggctggagagctgggaggtccgggatggtggcctgggagcagcgggtgacaggtcggcagggcctggccggcgaggggagcgacgggtcatccgcctggctgactgtgtgtccgtgctgccggctgacggcgagagctgcccccgggacaccggtgccttcctgctcaccaccaccgagcgaagccatctactggctgctcagcaccgccaggcctggatgggccccatctgccagctggccttcccggtgagtgcggcgagcagggggcgattgggctggggcacctgcccccgacttgtccacctccacgctcacatcccatcacccagcaagctccaccgagcacctacaagcctgggaaaagtaaatctataatgactctcagagggccgtgcgtgccatggagaaaatggaccgccaggggagcaggaggaagtgagggagcgacgggcagggtggccagggaaggcctctcagaggagggccctgaatgacaggaacccactgggcaaaggtctgaggacaggggcagcctggggagttgtgaacagagggagtcccgtgggcagaggccccgaggccggacagtgtggggtgtttaagggcagaaagaaggcgacgtggctggaaggaaaggagtgcaggaggaagccaactcacagagcttaggagagcggctgaaatgccctaggccatgtgtgtggttttgttctgagtgagaggcgaaggctttggagggtttaagccggacatgtttgtaaagccccaaaaggtctgtgatgggtcaaaaggaagtgagcctgggggttcttcaaagaggtaaacagagttaccatgtggcccacaggtccactcctaggtgtgtgcccaagagaacttgaacaggtgttcaaacaaaacatgtacatgtgaggcaggaggatcgcatgagccccagaggtcgaggctgcagtgagctgtaatcgtgccacttcactccagcccgggagacagagcaagaccctatcttaaaaaaaaacccacatggacatgaacgtccatagcagcactactcacagccaccagaaggtggaaacagcctacatggccatcagctgacaaatggataagcaaaacgtggtccgtccgcaagatggaatactactcagccataaaaacaaacaaacgcctggcacagtagctcttgcctgtaatcttagcactttgggaggctgaggtaggaggattgcttgagcctaggaattcaagatcagcctgggcaacatagtgagaccctgtctcaaaaaaaaaaaagaaaagaagaaagaaagaaatgtacagacaaggtaactccattgggatagaaatcagatgagtgttggcaggagctggaggaagggagaagtggggagtggctgctcatgggtacagggcttccatgtgggatgatggaaaagttctggaactagacagtggcaacagtgcacagccttgtgagtatactaaaaagcactggtggccgggtgcggtggctcaggcctataatcccagcactttgggaggccgaggcgggcggatcacctgaggtcagaagttcgagaccagcctcaacatggagaaaccccgtctctactaaaaatacagaagtagctgggcatggtggtgcatgcctgtaatgccagctactcgggaggctgaggcaggcagaattgcttgaacctgggaggcagaggttgcggtgagccgagatcatgccattgcactccagcctgggcaacgagagcaaaactccgtctcaaaaaaaaaaaaaaaaaagaaaagaaaaaaaagagcactgatgatacactttaagatgtaaaatgggccgggcgtagtggttcacacctgtaatcccagcactttgggaggccgaggcaggcggattacctgaggtcaggagttcgagaccagcctggccaacatggtgaaaccctatctctactaaaaaaaaattacaaaaattagctgggtgtggtggcacacgcctgtaatcccagctactacttgagaggctgaggcagcagaattgcttgagtctgggaggcagaggttgcagtgagcttagatcgcaccactgcattccagcctggccgacagagcaagactttgtctcaaaaaaaaaaaaaaaaagtaagatggttaaaacagtaaattttatgttctctgtattttatcatattttaaaaatcaaaaaacaaaaggcagttgaggttaggcatggaggttcgtgcctgtaatcccagcactttgggaagccgaagcacgtggatcacctgaggtcaggagttcgagaccagcctgcccaatatggtaaaaccctgtctctactaaaaatacaaaaaattagccaggcatggtggtgggcacctgtaatcccagctacttgggagactgaggcaggagaatcacttaaacccgggaggcgggctgggcgcggtggctcatgcctgtaatcccagcactttgggaggccgagacaggcggatcatgaggtcaggagatcgagatcatcctggctaacatggtgaaaccccatctctactaaaaatacaaaaaaaattagccaggcctggtggcgggcacctgtagtcccagctacttgggaggctgaggcaggagaatggcgtgaacctgggaggcggagcttgcagtgagccaagatcgcgccactgcactccagcctgggcgacaagagtgagactccatcttaaagaaaaaaaacaaacccgggaggcggaaattgcagtcagccgagatctcgccattgcactcaagtatgggtgacagagcaagactccatgtcaaaaaaaaaggcagttgacaggagcaaggagcctggtgaggaagctgtggcatttgacccggctgtgttgctatgggccagggtg

SEQ ID NO: 94817 - DNA, 121964 bp, Homo sapiens
  misc_feature (1)...(121964): n = A,T,C or G
tgcatttccctaaagcacttattatcagaaattagcttcttaggctgggcacagtagatcatacctgcattcccagcactttgggaggccaaggtgggaagatcacttgagaccaggatttcgagaccagcctggccaatatggcaaaaccccatttctacttaacatacaaaaactagctgggtatggtggtacacgtctgtaatcccagcttctcgggaggctgagacacaagaatcgcttgaaccggggaggcagaggttgcagtgagccaagatagcgccactgcactccagcctgggtgacagagcaagactccgtctcaaaaagaaagaaaaaaaagaacgaatgaaagagagagagagaaaaaaagaaagagagaaaaaaatgagagagagagaaagaaaagaaagaaagacagaaagaaaaaaagaaaagagaagagaaaggaaaagaaaaaaaaaaaaaaaagaaaagagctttcttagttacacattcatcttcttatacactgtctcccagctgcagaatggaagttccatggggtcaggaccacaatccycaatgcctggcacgcagtaggtgctaaatgtgtatttgttgactgaacaaattgatggaaaaattactaaatgaatgaatgagctctggcccacctctcacaatcaagcagatagtttggtgaaactagtacaactatgtacagggctaatgcacagtgcccagcagggaccaggagcaaacttcccttacttacccaaccaatgacctactgtggtacatacttttttccttattatggtaaaatacacattgcacaaaattcaccaatttttaccattttagagtgtacaattcaatggcattaagtacaatcaaaatgcttttttgttgctgttgtttttgagatggagtcttgctctgtcacccaggctaggtggagtgcaatggcacaaccttggctcactgcaacctctgcctcccaggttcaggcaatcctcccacctctgcctcttaagtagctgagaccacagccacacaccaccacacctggttaatttttgtattttttctaacagtggggttttgccaggtttcccagactggtctcaaattcctgggctcaagtgatccggcagccttggagctcccaaagtgctaggattacaggtgtgagccattgcacctgttcccccttcccatgttttcttctaagaattttatagtgttaggtcttatatttatttaggtctttgatccaatgttgagttagtttttttatatggtgtgaggtaagcgtctatcttctttcttttacatgtgaaaacgtggtagatactttattcaatttacagattagaacatagagactgagagggagtaaatgacatgtccagagtcacatagccattgggagttggaactagaattcaatattaggtctgactcccaagttgatcccctttccaccacatcaaaatgccctttattattttgtatagatgatatctctttattattttgtgaccagggatgtggaaatcacaggcctagtcaataaaatatgtgctttaatctggctctggacaagttattcctcctctctgggcctcagtctcctcttctgtacaatgggctgctgatctctaagagtctctcctgtggagacaactggtacccttggagcctcattcacccttgcctttgttttcatttctcctctccagagtgcagtgggggccctcccagctacagctgcgcttctggaaggagcttattgataggcacagagtatgggtgagtcttcatcccaggcctcagccaaactctgggaaacactctgcattccctggcagacagctgcaaccccaagcagctccataggaaaactgcagaatggcagaaaatgcaagggaagccaatatggaaagggctttttccacatgctgacagytttcttcacaagtatcacaatgaagctatttgagaatcagcttgcaaagcacctggctctaaatagccttctctccctagtccttaagtagagacaaagcagctccttttatcctctagaagtgccctttcctagggcctgacccacaaatgggtgctcaaaacctagttgaatgaatgaatgaacagatgaatgaagatggctacacacacttcttatttcccttgattgccttagaccaggacacggcagatttttcgcaaagggctggaaggtaaatattgttgtcttttcaggtcacagagtctctgtcacagctactcagctctgctgttgtagctcacagacagccatagacaatgcataaataaataggcctggctgtgttcccataaaattttatttatgcacagtaaaatttgaattttatgtagtttctatgtgtcacataacattattcttcttgtgaatttttttaaccatttaatatgtaaaaccaatcttagctcatggtcataggaaaacatgatgaactacatttggtctatgagctatagtttgtcaacctttggcttagactcttttttaaaaaaaaattatttataaatagagatggggtttcgccatgttggccaggctggtctcgaacccctggcctcaagtgatctgcccgcctcagcctcccagaatactgggattacaggtgtgagccaccactccgggccctttggtttagacttttcctttctgtttttcattttaaatattttcttcttagtaccagagtaatatatattcattacagaataattagaaattagtgacattgtaaagtttatcctctattaaaaataaacccaaggggataaaaagaaattactgacatggacatgcaaataaagtaatattagaataatctataatttcaatacacaaaaataaccattctcctactgaacacagtttttcactcagcattgctagctagctatatcggtgccttttaatatgatagccactagctacctgttactgttacaccttaaattaaaattagatacaggctgggcgtggtggttcacacctgtaatcccagcactttgggaggctgaggcaggcagatcactggaggccaggagtttgagaccagcctggccaacatgacgaaaccctgtctctactaaaaattaaaaaattaaacaacgagccaggcgtggtggagcacgcttgtaatcccaactactcaggaggcttaggcaggagaaccgcttgaacctgggaggcagaggttgcagcgagctgagatcacaccactgcactccagcctgggtgacagagcgagactccgtctctaaaaaaataaataaatagatacaattaaaatacagttattcggttaactagtcattgctttttccaaaattttaaatttatttttcccttttcctttttttattatttctttctttcttttttttttttaaacatcttggataccaaaattagtcatttcaggtgttcaatacctccatgtggctagtggctaccacacgggacggcacagatatagagcatcatagaaagttatattacacagcattgatctagctctacctggtagatttaacaaaaagtaagatgtttaacaaaaagtaagacagtaccaaatatactgtttttgcaaataacttaacattttgagatttgttttgttttgtttttgagacagggtctcactctgtcacccagctggagtacagtggtgtaatcttggcccacagcagcctcaacctcccaggctcaaggctgcctcagtctcctgagtagctgggactacatgcatgcgccacatcgcccggataatttttgtattttttgtagagacagggtttcactatgttacccaggctggtcttgaactccttggctcaagcgatcctcttgccttggcttcccaaagtgctggaattacaggcgtgtcaccacacccagccccattcaatatttcatacctatgtttattgttcaatttcatgcaacaatttccctctgagtccctgctgttgtgcattcaagttgttcccagtttttccctgtgataaacaaaatggtagtaagctactttatcattaaatctttgtacctttaaatgttttcagataagttcatagggattggattgctagatcaaagggtcaacttacttttaagatttttaaaatagaaatacccaatttccctccagaaaggctgtgatctttctactgccatcatcaatacatgaaactccttgaagtctttgcaaagaatagtaattataataataaaaacaaggtcattttggtaggtaaactctttccctcttttggttttaacttgcctttccttttcaaagtgtcatctcccatgtttattggccgttgtatttctttgggcaggtcaagggtagtaaaggggattatgttcatggctttggttttaagaaaaaattgctagattttcagcacaggcctcatcaagttcctcaagcaaggtgacaatcacccaggctagagtgcagtggtgccatctcacctcagtgcaaccactgcctctccattcaagcgattctcatgtctcagcctcccaggtagctgggattacaggcaggtgccaccatgccaggctaatttttgtatttttaatagaaagggggtttccccatgatggccaggctggtctcgagctctgggcatcaagtgatctgcctgcctcggcctcccaaagtgctggaattacaggcgtaagccactgtgccaggcctcaattattcttatttactgctctgtgtgtgtgtgtgtgtgtgtgtgtgtgtgtgtgtgtgtgtgtgttgggggggagggtccccagaggtgacactaggaggtgaatgatttgtttggcagctttctatttatctatgtgtttactttatcttaattctttaattgcaaggactatagcgcttgtgtaatcagagatagggcagcctggattcctggacagcaggaggagagacctcagggttctacaagactccacagaccaagttatcagtgatcagggtgagtggggagaaccaagctgaactctttctctgcctttaaggtctgtactctccatccatccattcattcattatgaggacttggtgatcgcctgttgtcttgatgagcagttctttgtgtctttgattttgtcactgaaagattgcatcctctttccaaatacctctagaaagctgtgggggggctatccatccgtcacacctgagtattaattatcttccacacagcattttatacaacggtagaaaggcaccttcatcatatctagggtctcgtttatacccacgaaggaggtacaatctctgttgtcccaatttcaggaaattgaggatcaggaggcgcagtgacctgctccaggtcatgcagaaggaaccacctctgactcccagcgccctgtttgtcttccggagcgctggggccaggcggaggaaagtagctgggagcaagaagggctggcagggccctgagcgccgagatggggagtgaggtggggagggcgggatgctccttcccttctccgcaaaggaaccccttctgattccgactctggagctccagagaccggatccgagacgcgggtggaggtggagttacactcgcctgcagccctgagggtgtaaatggcccattaagatccaggttaaatcaacctatggagctgccccccagagggtcagggtccccacaacttgacgggggtcctcagccgtctcctccccagtcccaggactccctcccagccctcgcggtccctctggtgggtcccgccccagcccccgtctcccccgcccccggaggctggactctgcycccgccccgcctgccacctccctcctgggggcggtggcccgtggcgggcgcacccattggctgtggcgaaagcgagggccggggctggcggcgctgattggccgggacgctcggcggagccagggagtccggcgagtcgctgggggaagtcgagcagacacccagcgctgccggaactcggggcgcgcatcccgcaagtcggaacccggcggatcggatcccgcagatcggagacggggcctggaggtgagcgcgaggcgccgggtggcttgggacgggcccttccgaggggagccgagaggaggtccttctgccctgcccccaggagcaaaacctgggcatcttctcctggaaacggagccctcatcttcccaagacgcggggccctcccccgaaaagacaggggctcccaccccccagagagcaaaataccttcctttctccttcagaaatgggcccttcctcctggctccagctcyagacagaagtcctctcccttttaccgcttgaaatagaatgcggccccaaaaagtggtctccaggtctctagagccccctcacctcttgggagactgatgccccttccccatccttagaaaactaagtttgggtgtcttccttctcccctctctttcggaataatgggggtcttctcagcttataaattacagtgacctccccctccatgacaaatggaagctctccccccatcataagacaaggaaatcccggagcagagactctgcaagtcaccctcccaccccagatactgggctctggagagatagatgattcacccttagccctgcyggagacccctccctacccgtcagagaggcagggtggcctctgacaccaccacattaaaggcttttggggatttcccctctcctccccagtaaagatgtaaaatgagggaccttcatactcaggagcagggcaaaggtctggccacccctccaagtcatccacctccctccactccacccaagccctttcacacaaaccccatcctagtaaccccctgcaccatcctcccaccgctcccaatcccatccttctccacctcaccccaactccactcccacacctggctgccccacctatttcacatcctctcacctttcctcacccaccctggccaaggtaagactagagggggttcagcgagatttagtaagactggagctcttaaaactgggatctggggcctagaggcccttccaggagtcttcaaactctgacaacagagatggcctctgaggcagcaggaccagcagagaccacccgccacctctcccccrctccctrccccaacacacgcacaaaggctgtgttcaatgcattctctcttgcagtctgggaggacagctggccctcttccmagagggcccgcatttcccccctaaagtgtgcacccccgcaagcgcctgtggacattgcctggtggaattccctgggcactcagccaagagaaatgggtgctgctgggcccatccactggggaggagacagtgttggctttgctgctttgatgaagctagactaagggacaggatgttggtgacctgggggtggggagggggtgggaagagctcttctctggtgggtcaggttgggaggcaggagagagggaggcagtgagttgtgtcttgctctttggagcctgtgttgcggcgtggagtcatagagaaatgtgttttctcgaggcccaaagaggttagccacggggagaggtaaatggtccagtctggagtcctaagacctaaaagggcttctrcattaaagacgtggccccttcatttgacagttaaacacacagaggcacaaaaggggaagagacttgctcaaggtcacccagcctgtgggagacagctggccccaacccctccaggacccttaaggtgctaggatccctgacacaagccccagtcctcacatttacaatggggacttggggactgctgggtcccaagtccccacttgtcagaggaagcgccaaggctctgcaaaggtcatgaagccaggaasgggcagagctggaactcaatgccatcccccagcaggctgcctcgtggaatccattcctgggtgtcagcgcatccctgcttaccccgtgcgatctttgtgttgaggccattgccaaatctaggcttgccaaaatccaaactgacccaggatagctaataagatcagttgcagctaatgagaatgagatgctggagtggaggctactgcaggaacctcacttgcatagctgggtttgctccaagaactttggacaggtcctgaggatgtcatattccttccctccaaggtcccctccctcttagcccctgcccacgccctctggctttgagttccctgcacattgtctcatctctgttcagaggcctgcgtcttttctcctggggcattgcatgggaaaagagctgaaattctggcagattctctaggaccacccagctgggcagcatggtctgaagtagaggctctctctgtttctgcccccacccagttcccagctaaaggattggttgttgtgccccaactttgccaaggcgaagttcaaagcatgaggaggaccacggtagagaggccgagaggttggtccctggagacctcttatctgggtcgagagcacaaatctgccacttagtgtctgatcttaacctctctgtgacatatccttggggtaaaatgagttaatcctcataaaatgtttagcacacagcaaaatgagcagaaacaatgattacaagtgcaaagtcataaaacctctaatcatgaagtggggaggtgcttatgccttaaggcaaaacttgtaacccttgccgtagataatctgccagggccaaggtgcytggggacaaggggatgtcttcctagagagacagtgtagtatgtggaatggaccacagaccctgaagccagatggagtagagagttggccactggtagtggctgtctatggaaacttaggcaagtcattcatgtctctgaacctcagttcctcgtctttgaatgaggtttgttggggttggacatcagaaaagagacaggtctagatgaggggttctcattttgggcactgttgacagttgggtcagaggattctttgttgtgrgactcccctgtgtattgtaggatattcagcagcgcctctggtctctacccactagatgccagtgacactccctaccccatgagtcatgtccatcagaaatgtctgcagacattgccagatgtgccctggggagcaaaatcatccttttccttcgctattgagaactgctggtctaatacatggccttaaacatagttgatacttaatataaaacagcttcctagctgaggcgggtggatggcttgagcccaggagtttgagaccagcgtgggcaacatggcaaaaccccatctctgtaaaatacaggaaaaaaaaaatcagctggtcatggtggcatgcgcctgtagtcctagcaacctgggaggctgaggtggggggattgcttgagcccggggaggtcgaagctgcagtgagccatgatcacaccactgcattccagcctgggtgacagagtgagacactgtctccaaaaaaaaacaaaataaaaaccaaaaacagcttctttcttgcacaagctcctcgttttggtttctgtgtaatgaggagaaggagatgtgtctagctgtggagccttccaatattaataacaatttttaatttctcacatttacacaagactttcttgtctggtttttgtttttctytttagtagagacagagtcgggtggtctctaactcctaggcttaagcgatcctcccgccttggcttcccaaagcactggggttacaagtgtgagttacaaccaaagcgctggggttacaagtgtgagttacaggaataagccacagcacccaacctacacaggaccttatcatctccaaagcactgttgtgtctatgacactgtttctcactctacagataagcaaactaagcctcacaaaggttaaaagacttgtctaagaccatcacccgcttctccaccaggcatcagagaaacatccatgccagaaattgtttgagaaacaactgagttctgggccttcttcagattagttatcagggtctttcgaaacttcaatggcatgctctttggtccagcaatcccactttgaaaaatctcacacagaaatgctcacacttgcactgacataacataaaaatgtccatggcagagcttgcaacacyggtatgggaagggattacagtatatgcattcatgtgggagaatgagtagattttagatgaatgaggtggatccacattcctgaccttgaaaggttcctgagtcatattatttagtgaaaaagataaagtcacagaatcaacatagccagtatgatcctatttttttttaaatgtaaatatgcatgaacatggatagttagggaagtggggaattamarggacctagatagtatgtatgtatgagaacatattcctgggggaagaagaagaaaataaatctccgccagcttcccatgcattaaaaatgagcaaagtgggctggccaccttgtctcacgtytgcgatcccagcactttgggaggctgaggcggsagaatcacttgagcccaggagtttgaggctgcagtgagttgtgagtgagccactgcactccaacctgggcaacaaagggacactgtaaataattaatcataagataaaaattaaaatgaatagagcacaacccacagaggttgagagacttgctaacaccagaagttgccagtggtgaaattcagctttgagtttgctgatagttacggggccaagagacaggaatctgaggctcatctcagcaggycaagcctccttccttactgtggggaaattccttctctgagcacctagagggatcctggtgtcagactgacctcacctgaatcaggcttccacccacgtgatgacctcaggccagmcactttaactctcagtgcctcatttctctawctttaaaatagctaaaaggcaaaggaaaaaacatgaaagccaaaaaaaaaaaaaaaggtagaaggaggaggcaatagtagaacctctctcattgggccgctgtgaggattacataaaaccatgtgttccgacccccagtacttagtaggtgcttaattaacacgagccctggtctctcctgcctttttctctgcttgcctgctccttgccaggatgcagaagacaaaagcctcagaaaggacagtgggggctcctgaggccccaagaatgcttagcaggctgaatcagttgtcctcacttcttcactttgccctctgatccaccatgaccactctgctgcagragcttttaacagaaagcctgggagagcattctgagggggtctgtgctatagctcytcctccctggggtctaaccatccttgctttmtctagacactccacacattaaactgtcttgcccgttgcagggatgggatggcatcatgtggcctctaattacacatcccttcaataataagattgactctccaagggcaagttttcctcctccttcaaaagctatctcacattgcgtcttttacaggtagtcttccccgaccctcccccacctccagccaggaaaaccatttctcctcctcccaactcctgtcatccacatcctagacttcctgggtctgccacatcctattcttcctgggtccatcacatcctagatttcttgggtccatcactgtttgctggatttcttcccaatccataattgcctggaagcagccatcacatccatcacatttattcttgtgtcttaaatgcayagcacacttccctatgcacacagtagatatwcaaggagcattgactgaatgcagaaaagtattttttaaattggggtaaaatacacataacatgaaattgaccattttcatcattttatttttatgtatttttttggggggcagggggaatcttgctctgtcacccaggctggagtgcagtggtgtgatctcggcttactgcaacctctgcctcctgggttcaggcaattctgactcagcctcccaagtagctgggattacatgtgtgggccacaaccacgcccggctaatttttttgtatttttagtagagacggggtttcaccatgttggccaggctggtcttgaactactgacctcaagtgatccgcctgcctcggcttcccaaagtgctgggattactggcatgagccactgcgcccgacctccattttttgattattatcattggggtcactgtggcaggtgtgaagcaataccacattgtggttttgatttgcatttccctaatgactgatggcattgagcatcttatgtgtttgttgcttatttgtatattatcttcagagaaatgtctactcaagttctttgcccatttttgaattgagttgtctttttgtctttttgttcttgagctgtaagagttcttcttttctctttttctttttctttttatttatctwtttttttttttgagacagagtctcaccctgtctgtcacccaagctggagtgcagtggcatgatcatagcttactgcagccttgacttcccaagctcaaacaatccttctgcctcagtcttccaagtaactggcacaacaggtgccaccacacctggctaattttttaaaaagcatttttttgttgttgttgagatggagtctccctatgtagcccaggctggttttgaactcctaggatcaagcgattctcccacctcggcctcccaaagtgctgggattacaagtgtgaactgcctcgcctggcccagagttctttatataaataaatgtttctttgtgtcactatttcttcatccacttaaatatttgctcagctcctgtaggtcacacactatcttgtgatcctgggaataccaccagttcctgcctatcaggaactcacagtctactgcaaagtttctcagcctctacacttttttttttttttttgagagggagtcttgctctgttgcccaggctggagtgcagtggcatgatcatgtttacctggaacctatgaataggacctaatttggaaatagagactttgcagaaatagttaggttgaaatgaggtcttyctgcattagagtggcccctaatccaatgactgctatcttttttttttttttttttgagatggagtcttgctctgttgcccaggctggggtgcagtggtgcaatctcagctcactgcaacttctgcctcccgggttcaagcgattctcctgcctcagcatcctgagtagctgggattacaggcacccgccaccacactcagctaatttttgtatttttagtggagacagggtttcaccatgttggccaggctggtcttgaacttgtgacctcaggtgatccacccgcctcggcctcccaaagtgctgggattacaggctgagccacctctcctggcccacctctatactactgacgtggaagcgaggctgtcctgtgccggatgtttagcagcattcttggcctccacccaccagacgctggcaacataccttcctccacgttgtgacagccagaaatgtctccaggcattatgaagtgtcccctggggaacaagattgcccctggttgagaatcaccggttagaggctaagacagccgtgtatatctataatttcaatcagattgcttgtgcctaacaggatacacacacacacacacacacacacacacacacacacacacacacacacasaggaggcattcaggatgtatttgttggatgttggatggctgggggtgtagatggatgcatggatggacagacacaacccctttgttggttggctagattgatggatacatgtgtgaatgaatggatgaataaatgaatccaatttacaaattccactgtgggaaaacagaaygcyattcttccaaccagagtagcctgcccctttatctctgtctagcacagtgtttttcaaactttagcatcagaatcccctcaagagcttgttaaaacacagattgatgcccctgcccaccagaattatgatttagtagaatcaccggcggscagaatgctcccaactctatttccatgttctctaggaatcctggaccagcccccgacccctgccaaccttgtccttgtccagaggtcccgtaatcttcactgccagcatctcccatttaggtgctaacatctattatcttggatatyrgcaacttgccagcactctgtccctgggctgcactgagaattccttcaaaggtgggacccactgtattctagtaccttactactgaaagtgtggtccagcggccagcagcattgcatcwtctaggagctagctagaaatgcagaatcttgggccccacccagaactacagaatgtgaatctgcgttttaacaatatyccctggggtgatttgtgtgcacttttaagtttgagaagcgtattttagacagatctgtaaaccccacactcagagctaagctagggatagctttgctgataagttacattgacagcatctgttaccatgtaattggtgcctgagctgaagcatctttcaggcattactggccatttgtacctttgcctgacgttatctcttgaaatgtctacactggcctcgctttacccrtgggaaaccagaagcccagaggagcagtgccttgcccaaggtcacacgatgaccatgaaagcagagtggagatcactctccactccttaaagggaatgggatcaagaggattgaaatgctgtatccactgagaagggcggcacatgcctgtagtcccagctactcgggaggctgaggcaagaggattgcttgaacccaggagttctgggccgtactgtactataccagtcaggtgtctgcattagttcggcatcaatatggtgacctcctgggagtggaggaccaccagcttgcctaagaaggggtgaaccagcccaggtcagaaacagagcaggtcaaaactcctgtgctgatcggtagtggaattatgcctgtaaatagctactgcactccagcctgggcaacatagtggaaccctgtttctaaaaaaaaaaaaragagagagagagagagaaaagaactgaaatgctgcwatgatactgaaaatatggggtgyagggggagcattctgaagctacttaggtctgtcctctgaaactggagaaaggggagatgacttgaaagtgatgcaagaacaagaacttaagttgtattcttttgttcatccaaccagtgtttattgagtacttactagactccaggcatggttgtctggtatctatagtattgaacaaggaaagccaggcctcccttttgatggcttatctggagtggacagacgtagccatctggcattcattcgtcaatgagtgtgttcatttattgcatgatttccatgtgctgtgtacagtagtaggggtgtgtgcgtgtctatgtgtctgtgtgtgtgagagagacagagagagagagagagatggagggagagacaaagactcagctactacaccagcgcctcttctagactagccatgcggaaacasgccccaaaacaaggaccacacagtgaggagagtgccgaaggtgtgtgggagtgaatacaggttcaagctcaaagtaaaaagaggttaccactccctgttcctggggattctagggaagaaatttcaggaggaaaaggcagaaaagaagagaaagagactctgtgcagggagagcatcatgaasaggcccagagagttcataggaagccgttccaagaaaatcgcaggggaaaaaggaaggatagacmgcgtatggtggctcgcacctgcaatcccagcgctttgagaggccgaggtgggtggatcacttgaacccaggagttcaagaccagcctggccaacatggccaaaccccgcctctacaaaaaatactaaaattagccgggcatggtgatgcatgcttgtagtcccaactactcaggaagctgaggcaggaagattacttgagcccaggagtttgagaccagcctgggcaacatagcaagacccctcaagaccccttctctacaaaaaattttaaaaattagccaggtgtggtaatgtgcacctgtagtcccagctactcaggaggctgaggcaggagggtcgcttgagtcaaggaggccgagccaggctgcactgagccataatcatgccactgcactccagcgtgggcaacagagtgagatcctgtctcaaaaaaaaaaaaaaaaaggtggagggtaaaatcatgaatctcatacagatacaaaaacactcaatgattttattaggctcattcaatgagggaaccaggcagacattagaaccagttcaaaggaaaagtcaaataaagcacaaatatgtaaagagtaaagggaggtctaaatagattcaaaacagaggcaaacatggttggacaaggcagaatttgcttgtctatcagttttctacaacttacaaaggagtcagcaaagtagtttgaaaataatgaacaaggccaggcatggtggttcatgcctgcaatcctagcactttgggaggccgaggtggacagattgcttgarctcaggagttcgagaccaccttgggcaacatggtgaaaccctgtctctaccaaaaatacaaaaaattggtcaagcatggtggtgcgtgcctatagtgccaactactcgggaggctgaggcacaagaatcacttgagcctgggaaggggaggttgcagtgagccaggatcacgccattgcactccagcttgagcaatggagaccctgtctcaaaataacaataataatgaacaagtgaacaaggctagaatcagataatccaaaaatttgtgttgtaagtaggtagtgcataactctttttctataaaaacaaygttacgccgggtgtggtggctctcgcctgtaatccagcactttgggaggccgaggcaggcagattgcctgagctcaggagttcgcgaccaacttgggcaacacagcgaaaccctgtctctgctaaaaatacaaaaaaaaaaattagcctggcgtggcagcctgcgcctgtagtcccaactacttgggaggctgaggcaggagaatcgcttgaacccgggaggcggaggttgcagtgagccaagattacrccactgcactccagcctgggcaacagagcraaaccctgtctcaaaacaaaaacaaaaaaacaaacaacagcaacatcgaaaaaacaaaaaaacaaaaaamcaatgttcaagtgatggagaggcatgggtggatgaggagtggcaagaggaggctgtaggaagagtagatcatgtcccgccaggtgacccatgatsttgaatttggacttgactcagagacccatagggaaccatggaagagattaaagcaaggcagtgatgtgattttgttatcacttgagaaagatcctcctggaagctgaatggmgagtagacagacaccttctcccactagcctttgagctcagatttccttagggaaacagccaatcccaggggcagattgctgaccttcctgcaaaaggttttagaacgtggaagctccttcagggcaaggttggctgaacaccagccaaaagagcaaggcaccaccccggcaggacagggctgttttgtgcacgggaacaaagcctgcctcctctctctgcccagagctgtaaatagcactctgctggcttcgcaggctgagcgccggtctggggacaggctgaaaatgcacacaccaaggagcatttgtgcaaatgaatgcctgcatgcaaatttgcatgcctggcatcctgccccagccctaagtgtccagtcctgcaaggggctggaagcagggctcaaaaaagagccacacacagaagagtgtggacattctgacctggggacaggttccaggagggattcagaggcaggctggcagggtgagtgggagaaaacatgcagagaaccctggacagagttttggctccagctttacccatgataatgacaatgacccatgagtagtagccactcacattggctgtgtatttgtgtgtagttgctcaccttgtcgctcacaacagccctatgaggaaaggctgatcagatttcagagacaggaaatggaaactcagaaaggatgactgactcgcccagggtctcctactgaagggagcatttctagtgagaaaccgaggcttgaagactctggagccctggtgtctaggactgacccacatggacgcctctgcatatgcccactgctggctctgacctcagtttactcctccatcaaagggtgcaataatgtctttgcacctaatgatcacagcagagtttgggaaatgaactacccctgcaaatgagaaagacttgaaaagtcatcaatgctgaatatgaactgatggtatgtggagaaagtctgaaagtgctttccttagccccagagacagggtgtggagtgcaaggccaaccttgtttgtactcaggggctttggaagtgcagagtggccttggatgggtggaggtgaaggcatgctgaagcttgctgaaccactcccggatcataggtgagccaggttgggtctagtctgttttttttcccttgagaggaagagatggtgggtgcattgtggagagagagggaaacagtgaccctgaggtggggacgcacatctggacgsaaagtgtttgccgagagcacttggccgcctgccctcccacggagcaggtgctagtcttgggtcccgctcttccgggttcttcagaagctgagctccggtctgtaatcccagcactttgggaggctgaggcgggcgaatcacgaggtcaggagatggagaccatcctggtcaacacggtgaaaccccgtctctactacaaatacaaaaaaaattagctgggtgttgtggcgcatgcctgtaatcccagccacacgggaggctgaggcaggagaatagcttgaaccagggagtcggaggttgcaatgagccgagatcgcgccaccgcactccagcctggcgacagagtgagactccatctcaaaaaacaaaaaacaaaacaaaaacagaagctgagcagcttgctgtttgtttggactgagcagtccttccagcagcagccacctgtcaacaaatcagatcatttgcgggtcatccatcaggtcccacgcggtgcatcccctgaaaggcctgtggtggggcttgggctgaggcctgtgtcttagacctgtgagatcaggggaaagtcctgagtctggaaagcagctgtgctgctggctccctgagtgcccgggagccagtgatttctgtccaggcctcagtttcctcacctgtaaaatggcaacaacaaaactaccttttgaaacattatatgaatggttgttaaattggaaaactggatgataagagttgaatgctcttttttttttttaagagacaggggtctcactctgttgctcaagctggagtgcactggcaccatcgtagcttactgcagcctcggcctctaggctcaagggatcctcctgcctcagcctccccagtagctggaactataggcccgttccctgccccgctattttacttattttttattttttttgtagaggcaaggtcttgctatgttgccaaggctggtctcaaactcctggcctcaagcaatcctcccaaagtgctgggattataggcatgagccaccgcacccggccaaaagttgaatgcttcctrcctacaagacactgggtaacactgggtactacttggactatctcatttttaacctcttagtaagktgggaaaggtcttcttcttttaagcttcttcaccaaggtcacagaggtagcaagaagttgaaacaggacttgaactaggatctgcctggctccaaaacctaagtstccaaacatggggttattggaggacctcccagggccagggacttagaagccctcctccttcccttcctgtacctttattcctcaagtctgtatagacttactctgtttttttaacaatttactttttgaataggcaatcatggcacgtggtaaaacactcaaacactgcaactcaatctacagaaaaaaaagtaaatttttctccctcatccccatcctgtggacccctttgcctcattagaggcaaatagtcaccaaggccagggtcttactatgttgcccaggctagtctcaaactcttggcctcaagtgatcctcccatctcagcctcctgaagtgccgggattacaggcatgagccaccaagcctggtcttcctttatggttaatgctttttgtgtcctacttaagaagtccagctgggcatggtatctcacacctgtaatcccaacactttgggaggccaaggcaggtggatcacgaggtcaggagttcgagaccagcctggccaccatagtgaaattccatctgtactaaaaatacacaaaaaaattagccgggcgtggtggcaggtgcctttagtcccagctacttgggaggctgaggcaggagaatcacttgaacccagaaggcagaggttgcagtgagccgagattgcaccactgcactccagcctgggtgatagagtgagaccctgtctcaaaaaaaaaaaaaaaaaagtycaacgtcatttgtrttgtttcttctattatcttctggaagctttcatgttttgcctttcatatttatctccagcatccacctagggttgatttttatgtattgtattaggtagaatcatgattaattttttcctacatagatagttcatttggcccagtatcactgcctccattgtcaaaaatcaagtgtccatatatgcatgtatgtgtttctattctctgttcggttctattaatccgtgtgtttaatctttgcccccataccacatcttgactgctgtagccttagaatatgataggcattgcctcgttgccctctaaagagactgcaccaatcaagacttactaacaatttgacaaaaatgtattgggcttccagtacagtgccagatggtatcatgatgggaattcaagtctaatcatatgcacaacttctaccttaaagtgtatagtcttataagtgacaagacatgaaccaaataattccacaaatagaggtaacatatgaatgtgatggggccacaaaggggarcygtgtaggattctgtgctaaaaggaasatttgatctggtgggagaggttcagggaagtcttctctgagaaagtgagtcatgaactgatatcagaagtgtgagtagaamtgaaggaatcagaagcaagggaaaagcattttgggtggtgggaacagcatctgcaaagactgagtagaagccttcccaggacaaacagtagatcctcgtggccaaacccagagtcaggaaggtgctatgcacagaaattggaatggtgatagggaccagacctcaaggcctttaaactacattcaacagctggtttttatacctagaacaactatcctaagaacaataacaagagtcaccttgaatattccagatttagggtagttccaagagccttttcagcacaactagggttgcttcttggcaggagaagaatgtgtatggcaacccctggagtgacacatcagttttattaagcttcatctcccagctyctggcactgaacatttcatttttgctagcagtggaagcaacagttttactgtgcagtcagcccaggttctggcagcagcagcatctgcctggcaccatctcaggtctggaactcttttctccccagcctggcgagtgtcttgcttgctggagtgtcccttaaggtggacctggtgccagccgcagtgctgtgaacttgaactgtttctcctcattcaccatcatctctactcctcacccgtggaggcatgattcctactctatggataagaacacagaagcttagagagcttaagtcacttgcctaagaccacacaccttccaaagggcaaatataaaagtctccaacaatatatttttctacattttttgtggtacttttttccttttcaaaatatagagtgagtcatactcatcaggaattttacgtacagaatgacaacatttctggggagtaggacaggattctgagatgtttccaatctgtgccttgagcggatccgatgatttatccagatctaagaccctcatctcattctcggcagtgccttttaaatttggcagccaacatggggttttggttctttctgcaccaagtggagtaattaagaaggttttcatcaaggtaaatatctgctgggtttctatagaattgtggggaggaagttgaatatacaccagcacccaaaatctcattaaatgggtctgccccttgttccaggacaggagagccaaacatagcggacaggattgatgttgttttcatgaatgtaggtggccgctgtgttctytgtgggttttcaaggtgggaatttgtttgcaaatgaatgtatgaagaagccaggagttaacactgcttcasggaggttttagagcytgggggaaataatgttgttttagaatttttagaataagtattggcagtgtgttgggggaaaaaaaaaaaccctgaaaaatagaatacagatttcagttaagctctcccttcgtcaaaccacacttgcccatattggcacatagcttgatgctacagccacacctcctctgtttattatctacttagtgcttggtaatatactgtgtactatgagtaccctctctgggaaccccacaataaccctttgatgtggtttcaaacccattttacagatgaggggctattacagaacttgcaccaggtcctcagaaaccaagtgagggagttgggatttgaaccccttcacctgaacacttgcacctgcctgcagttaatacatcacattggagcagataacctgccacatttcctggagagcagggttctctgctgcaactgtgctccccagggaacttttttttttttccaagacagactctcactctgttgcctaggytggagtgcagtggcacaattttggctcamtgcaatctctgcctcctsggttcaagcaattctcctgcctcagcttcctgagtagctggaattacagtcgtgcaccaccacactcggcwacatttttgtatttttaatagagagggggtttcgccatgttggccaggcgggtctcaaactcctgatctcaggcgatcctctgscctcagcctcacaaagtgctgggattacaggtgtgagccaccgcrcccagtgccaagggacttttggcaaggtctggagatgcttttggttgttacaactggtgggggaatgaagaatgctactggcatctggtgggcagaggccagggattctgctaaccattctaactcctccctccgcaacaaagaattacctggccccaaaagtcaatagtgctgaggttgcaaaaccctgaataaaagagcacaacttctataccccttccagtgttttcacaggaagtttctgttacgaaccacacctgttttcagtaccttgtccctggtgactggttcttatcgggcttctgaactttccttccagtagagtggcaggacctgggttccatgttagagtcagtaaaacgtgggccagtcgccgtgggctcatgtctgtaatcccagaactttgggacgccaaggtgggaggatcacttaaggccaggagttagagaccagtctgggcaacaaagtaagactttgtccctacagaaaataaaaaaattagccaggcactgtggttcatgcttgtggtcccagctaccygggaggctgagttgggaggataagcccaggaaatcaaggctgcagtgagctgtgatcacaccactgccctccagcttgggcgacaaagcaagaccctatctcaaaaaaatacattataattaataaataagtaaataaataaatagagtccataaaatgctttcggcaacatggctaagaaggaggcagttgagcaggtgaggtttgcctcttggaagctgcattccaggacatttccagtactgcagactcataccttttttgctagggggattgagaggaaaatccccccaaaagggcctgaagctcttagcacttgccatgtcatattttcttcctcctgatgggaatggagcatgctcacaaattcacacctttgctgctgaacatggtatgccaaaggtcactgcactccgctgggctagctatctgcatttctatcttgaaggagcaagcaaacatgcaaatctcttgccttgccctttgtgcgggggttcggctacctggctgactgaaagaacacttcccctactacatttaaggagaactttgcttggctcagacctttgaaggatccaaaggtacctttttcttttttgagatggagcctcactctgttgcccaggctggagtgcagtggtgcaatctcagctcactgcaatctccacctcccaggttcaaatgattctcctgcctcagcctcctgagtagctgggattacaggtgcacaccaccacatctggctaatttttgtatttttagtagagaatggggttttaccatgttggccaggatggtctcgaactcatgacctcaggtgatccacctgcytcagactcccaaagtgttgggattacaggcttgagccacaatgcccagcctccatgtgtaacttttgactccccaaaaactttactactaatagcatccggctaacctgaagcctactagtaacataaacagttaattacaagattagcctctacgtatattttatgcatccatgacatacctagctttttcttaaattttttcaatgtttctaggctacacagtttgtctttgagtttttctagttgtcacaaatctccaaaaaaaattccagtatatttattgaaaaaaatcctcatattagtggagccatgcatttcaaatccatgttattgaagggaatactctttttaggtctttttatttttagttttttgagacagactctgagtgtcgctctgtcacccagactggagtgcagtggcrcgatctcagctcactgcaacctccgcctcccgggttcacgtgatcctcatgcctcggcctcctgagtagctgggattataggcatgtgccatgatactgggctaattttggtatgtttagtagagactgggttttgccatgttggccaggctggtcttgaactcctgacctcaagtgatctgcctgcctcagcttcccaaagtgctgggattacgagtataagccaccatgcccagcttgtttttaggtcttgaatttgcttggagggttttattttgtttcactttgcccattcttttaagtaaattttttgttttgagattagtgtagattcacacacagtcataagaaatgatacagagagatcctatgggtccttcatcctattttccccaacggcaccatcttactaacccatagagtacaatatcacaaccaagatactgacattgatacagtccatccattttaattttaatttttttattctttatttttatttatttgtttattttttgagacagaatctcgcactgtcacccaggctggagtacagtggcacgatctccgctcactgcaagctctgcctcccaggttcacgccattctcctgcctcagcttcccgagtagctgggactacaggcgccygccacaatgcccagattttttttttttttttttcagtagagacagggtttcaccgtgttagccagaatggtctcgatcttctgacccgcccgcctcggccttccaaagtgctaggattacaggcgtgagccaccgcgcccggcccastccatccattttattcagatttccccagctttacatgcattcaccttgcacgttttttgtttgtttgttttgttttgtttttgagacagggtcttgctctgtcacccagactggagtgcagtggtgcaatcaatggctcacaatagccttgagctcctgggcttaagcaattctcccgagcagctgggaccacaggcacatgcctccatgcctggctaccttttttaytttttgtagagatggggtctcactatatcgcccaagctggtctggaactcctgggctcaagccatcctcccacctcaacctcccaaagtgctgggattacaggcatgagccaccgcacctggggccagctatgaaagattttgttttgaggttctcagttgccattgccactttgctgaaaaaagsggctcaaattccagtggagtgtggagtcagtcatgatgggtgcattcccaaggctgagacatccctggagtaactttaggtgtctgtcctgggctgtgtcctggcagagaaggaagcacgggagaaggaaggcaggccgccgcatcctaacacctgagttcyggtttgggacacacagagaactctgtgctcccgcctacactctgccttccccgacttcctccccattcccgacgtttcacttgattgtcaggcccagctggcagcattctgctggagccactgggccagcaagcctgagaggtgatgaccctttagtacctggggacaagggcatttgaccttgtctgatcagtgactgtccctatgagctcagttctttgttctgggtctcgagtctggagagccccagctttgcttggggacgtcctttgcaagtaagagcagcatgtcaaagctacgcggttttgggagaaagtgctgagtctacaagacatctccccactggagctggcattgtgggagagagaggagaactcttcagagatttctgttgaaagactggaatgagaagcagatggttcatactggttaagaggccagcgccttgctgtagttttaatttcctgcaggatcccaatgattgtaaagattgtgtttctccacctctgcagaatcacccctaagcactgcattcatgattctgcagaaaaactaggcagccagacagacctggttcaaatcccaactgccgcttacttgtggcaagaataggatgagttttgctcaaccttatgtcagcctcagcttctcagtctgcaaactggcactactccactacatcagaagacgtttaaaagcatcagtgatgtctggaaatcagttagcatcgggtgagtgtagataaagcctaatccaccacagggcctttcggctttctttgcctccgttttctcatctgctaagtggaaagaaattttccttgcattggagtgatgttaagtctgaaaatacatagcactcgaagtcagtagagatacagagcagttttcagtggaaactgaacagagtggtttgactccagtacaccagctcaatgccagttcttggggcagagcagttgaccsgagggagtggataattaaacaatgcacagaaccttagaacctgggactatgagggatctctgagctgattgggtctaaaccaagtccctttgcctgatgcttaaagcctctctcctgcatcttagacaagaaggcgtccagcctccagagtggatcccgctccaaggcaaggagctttcttagttattgagccaaaatccrccttcgattttgtaacttattgaagattgcagccatagtacaggacagagctgggactcaaacccaggtctgagtgcacagcccatgaccctaacacctgggccccattacctctgtaatccaaggttcctactgttgcactccattctgtccaggactcagcacagcactgggaacccaggaggattaaagaagggccagggtgactgtgcagggggaccctggggaagaaggctgacctctggtcgggaactctcaaaaattttgggatcaggctaggcgtggtggctcactcctgtaatcccaacactttgggaggctgaggcagacggatcacttgaggtcaggtgttcaagaccagcatggccaacatgatgaagccctgtctctactaaaaatacaaaaattagccgtgggtggtgcacgcctgtaatcccagctactcaggagkctgagacaggagaatcacttgaaaggaggcagaggttgcagtgagccgaagctgtggagccactgtactccagcctgggtgacacagcgagactctgtctcaaaaaaaaataaatagagaagtttggtatcagcaacctgactgtggtccctgagctctggccagcccttcttctggcctatagatgctgataggcccatgggaccattacaggagtgaataggaagtgttcccagcagccgggtgcctggggggcagattggagaagcctggtcttggacaggcctcttcaagctgaccccagggcatccacttcccctgtggaggaagctcctcaggttaagtgaacattcattgattttaattttttctcctggaaaactggcttgctgctcccatccccagaggcatccatgtcccagggaattaccaactctcagcatgtaacttacattgcgcgtcgactgtgaaatcaaggagaacaagagacgaggagcttgcgtgctggyggagagggaccgatgaatcatgaacgaatgagaaagagacagataagggtgacaaaaataaaatgtgttggtctgaaagcagtgggactactttaagttggggtcaaggaaggctgttctgagcaggtggtatttgggctgaggaatgagacagccgtttcgggccccgggggaaactcattccaggcagggacacagcagatgcatggcaggtcccacgttgggaggacttgaggtcatcattagaaggttgggttttattctctctgcaattagagatgtttggtaggtttttaactagggagtgacatgatgtgtttcactttaaaataatccctatggctgctccgtgcaaagtggattgaacaagacctcgatgggatcagagagaccatttaggtggctgccacagtcaattacaagtggaagtggcttggattcaggtggagacaggaagagaggatgatctggaaatgcccggaacagtccaggcatgagcaattgcagtcagtgcctgggttcagatccaagcctttggaatmatgtatgaatttgaaactccctttcctcctgtgcaagttaaaggttttttgttgtttgttttttgktttttggttttttttttggagatggggtcttgctctgtcacccaggctggagtacagtggtgtgattgcagctcactgcaacctccacctcccaggttcaagagattctcctgcctcagcctcctgagtagctgggattacaggtacaagcgaccacgcccagctaattttttgtagttttagtagagaagggtttcaccatgttggccaggctggtcgcaaactcctgacctcaagtgatccacctgcstcagcctcccaaagtgctgggatcacaggcgtgagccaccgcacctgaccctgtgcaagctttaaattgcaggaggtgatcctttgtacattggaggtggtagtagtaatagctgacatgatcagtaaaaatattcattgagatcatacattcactttctggagctgcygcaaaaaaattgtcacaaactgagtgactcaaaacaatggaagtttattctcttacagttctagaggccagaagtccaaaatccagagatcagtaggactgtactctctctgatggctctagggttccaactttgcctgctgccrgaggagtggttgagaataactgagtacatggccctccttcagcaattgctctgttctgttgtgtggagagatcacattttgtttatctgctcatatgctcatggacccttgggtttgtttcccccttctggctcttttttttttttctttgagacggagttccacttttgtcccccaggctagagtgcaatggcacgatctcagctcaccacaacctccgcctcctgggttcaagtgattctcctgcctcagcctcccaagtagctgggattacaggcacctgccgccacacccagctaattcttgtatgtttagtagagatggggtttcaccatgttgtccaggctggtctcgaactcctgacctcaggtgatccacctgcctcagcctcctgaagtgttgggattacaggcgtgcgcatgcgcccggccttctggcttttatgaatagtgctgcarttggcagggcacggtggcttatgcctgtaatcccagcactttgggaggccaaggtgggcagatcacgtgaggtcrggagttcaagaccagcctggctaccatgatgaaacccatctctacaaaaaaaatacaaaaattaaccaggcttggtggcacacacckgtaatcccagctactcgagaggctgaggcacaagaatcacttgaaccaaggaggtggaggttgaagtgagccaagattgcgccactgcactccagcctgggcaatagggagaaactctgtctcaaaaagaaaaaacaaacaaacaaaaaataagtagtgctgcaacgaacagcagcagataagtatctgtttcagtccttgctctcagtctttggggtatgtacctaggggtggaattgctgggtcatatggtgattctgtgtctaactttttgaggaaccgcctgttttccactctgtgccacatagttttggttgaagtagttacagaaccgccccagatcaaatgtgggaagagatagatgccacctcccagtgagggactactaggtcacagagggaagagattggggaggggagatgctgttgcggccatctttggaatgtacaaatggccacttgagtagtgattacttcatttatttatttttgcagggaattattttttttaaagggcctcggatcacctaaggtcaggagttcaagaccagcctgggcaacatggtgaaaccctatctctacaaaaattagccaggcatgatagcaggtacstgcaattccagctacttaggaggttgagtcaggagaatcacttgaacctgggaatcagaggttgcagtgagccgaggtcgtgccattgcaatccagcctgggtgactgactgagactccgtctcaaaaacaataataaaataaaataaaacaggacctcactctgtcacccaggctggagtgcagtggtgtgatctcggctcactgcaaccttggcctcctgggcttaaacgatcctccaaccccatcctcctgagtagctgggactacaggtgtgcaccaccacacctggctgatattttttggtaatttttgtagaggcagggttttgccatgttgcccaggctggtgcagtgaatatttcctcttctcttctcttctctctctttctctttccctctttctttcttttgagacagaacccaggctggagtgcagtggcacgatcacggctgactgcaacctcgacctcttgggctcaggtgattctcccacctcagccttccaagtagctgtgactataggcgtgtgccacctggctaatttttgtatttttttttgtaatttttgtagagactgagttatacgatgttgcccaggctggtcttaaactcctaggctcaagtgatccacccacctctgcctcccaaagtgctgggattacaggtgtgagccaccatgcccagcctgcagtgagtagttcttgatgcttgtcctgaacgcacactgtgctgggtgtaggatacagacatgagtattgcaggtgtggtttttgccctctcacagcttgtggttacttggagaagagccattaactaaaattgcaaaattaattttggggaaagggggctggactttcctgatattctcttcctccttttatctgtaagttgatgaataacttaacatagcaaagtgcactaaacttacatacgcggctccatgaatttttacctgagaatgcaaccatgtaaccagcacctagatcaagatctagaccgtccccagcccccagaaagttccctcataccccagtgggtaactgctatttaacatcttcaccatagattagctgagcctattttagaactttataaacggaatcataccgtagatactccttgatgtcaggcgtctccctctgcactgtttgtgaaatcccacaattaatcccttttttaaagagacattgacttgctgtcacccaggctggagtgctgtggcttgatcatagctcccctgcagccttgaactcctgggatcaagcagtcttcccactcagcttcccaagttgttgggactacaggtgtgcaccactacacctggcgcattttaaaacattttttttttaaatttagagacagagtctcactatgttgctcaggctggtcttgagctccctggctcaagcagtcatcctgcctcagcctcccaaagtgctggcattacaggcatgagccsccatgctggccttaattctttttttttttttttttgctttgttttgttttttctctttgagatggagtgtcactctgtctgtcactcaggctgcagtgcagtgctgcaatcttggctcactgtaacctctgctacccggattcaagcaattatcttgcctcagcctcccaagtagctgggactacaggcacacaccaccacacctggctaatttttgtatttttagtagagacggggtttcaccctgttggccaggctgctctcaaactcctgaactaaagtgatctacctgggcctcccaaagtgcttggattgtaggcgtgagccacaataccagtcttgaccttaattctttaacaacagcagtatggactgtgaaggaaacatgttctgtgccacaggagcatatagtagtgagctgtaatcaaatctgcagtgaataacgtggtagtgagctgtaatcaaatctggagtgaataacgtgaacactgggaagagaagcactcacccttactaagcatgcactattggccaggccctgcccttagaaggagagggtgagacctgcctggccagaggccacaagctctggaacagtccccgatgggttggaccccacctctgctcttcactatccgatgtgactgagcaggtgacttcactttgctgtgcctcagtttttccttttgtataattaaaatactgatggttactgcattattccccaaaccttaatgatcaataaacatggagctctgtaatgagggagcttgcattgttctggggatgctgaggagatagaggtaaaataggagatacctgttacgcaggaagaggtgagggaaggggagagggagggcaggggtgcaactgaaaatcagacagccaagacctgaggaagacagggcgggagcccctggctctctgtggaagagatttttggggagtggaatgggcaggagcaggctcttgggtcaggctcatctggcacgttcaaggaaccacgagggggccagtgtggctggagcagagcaggagggggtggcagggaggggagggacatggaggtgtaggtgtaggggggtcctgcaggcctcctggaggccactctgatggcattggctgtcactctgcgatgggggtgtattggttcgttctcaaactgctataaagaaatamctgagactggagaatttataaagaaaagaggtttcattggmtcatggttctgcgggctgtacaggaagtatagcagcttctgtttgtgggaagacatcaggaaacttacaatcatggcaggaggtgaagggggagcaggcatcttacatggccagagcaggaggaagagagagagcagagaggtgctgcactctttttttttttttcttttggtgttttgcccaggctggagtgcaatggcacgatcttggctcactgcaacctccgcctcctgggttcaagcaattctcctgcctcagcctcccaagtagctgggattataggcatgcaccaccacgcccagttaatttttatatttttagtagagacagtgtttcaccctgttggccaggctggtctcgaactcctgacctcaagtaatcctcccgcctcrgcctcccaaagtgctgggattataggcgggagccactgcacctggctacactcttttaaacaaccacatctcatgagaactctatcacaagaacagcaccaaacggatggtgctaaactattcatgagaagcccacccccatgatccagtcccctcccaccaggcycctcgtccaacactggggattacgtttcaacgtgagatttgggtggggacatggatccaaaccatatcaggggaccactggaaggttttcaccagagggaggactggtgtgatgtgacctgacttttgcaaaggactgctctggctcctatgttgattgcacacagaccacagcccatgagaggagaaggttgatgcttaggacacggcgggagccctggggcttggatcacaggggaaatgatggaggcaggaaagtgggcagattctggatctgttttcaagatggagccaacaggattgactgatggactaggtgtgatgcatgagagtgtgccaggaagatgcaggcaccgagatccaggtagagttgacgaacacctctctactgtcaatgtattgtttttacgggtaccttgtatttatatgaaaggatactggctttctagatacagtaatgatataaaagtttccacttaaattactgctgttaagggccgggtgcagtggctcacacctgtaatcccagcactctgggaggctgaggtgggtggatcacctgaggtcaagagttcaagaccagcctggagtttcggccgacatggcgaaaccccgtctctactaaaaatacaaaaaattagccgggcgtggtggtgtgcgcctgtagtcycagctactcgggaggctgaggcaggagaatagcttgaaccyggaaggcggaggttgcagtgaaccaaaatcgtgccattgctctccagcctgggtgacagacagagtgagactctgtctcaaaaaaaaaaaccaaaaaattattgctgttaaaaagcaagataatttcaagcaaaagtcttacaaatgttggtaaataatagagcgtttaggtggatggcaaatggtgacttagggaaagcacacactttgtgtgttgctgacatgttagcagaaaaaggagacagtgtctgagggcaaaagtggccctcttgggtctgtgtccgttctctaaaaactgaactctgcttgaaattgagtgaaatggatcaccagtttgttattgggaagataggaaagacctatagtttgaaggcttggaatgcctacatgggggaccagcaaactgtttctgtaaagggccagacagtaagtatttttggcatgtgggccatgtggtttctcttgccactattcaaccctgccattgtagcgcaaagcagccatgaattaataggtgtagctgtgtttcaataaagctttatttaaaaaagcaggccagtggccatagttgtggatccttagcctacagtctgcatcccagagcacagagcctcaagagcatcctctttcctggccttccagaaatttgagacttcttaactccaagctttcctttcttccactatcttgggatgagtcgagaagtttccctttgtgtcaactgcaggtgcactaaactccctgaatgtgctgacctactttcaactttaagtatttccacctgggaactagaatcaaatttgactggttcaatgctagaaagctaatgtcctttttatagtctgtttggaagctcatctcctctttccacaccttcggaaaccaaacggaacacagatcaatttccaagtgcctctggggctctctgttaatgccacgtcaagttactcaatagttgttttcctataattaaatatctggacacattgggctgccatccactgaagttactctcatgccctggtgaagtatctctgtgcctattatttgagaatgctagagagacttcttttctccaaacatttgataaaattaataatacaggttattaatgaagaatcagaaactacaaaaaggtggcaacaaatagacggccatgccatggcctcatatccaaaatgcaacggtgctaaacagaaaacacatgtctttccagccttgctttattgtgtagcagtttatgattttgtttttttgtgcctgtaaaaaattgtagccagactgcatatacaattttacrttctttttttctctcattacatggcttaaaaaatcacttccctgtctttttacacagttttcagttaatgtcatataatcaagctgttgtaccacaacttatttgagcaatcctctaccattggtcatttacattgttttcaactgagcacgcttcttttttaaaaaaaaatttttaaatttttgtacaaatggggggtctcactatgttgcccaggctggtctcgaactcctggcctcaagcaatcctcccacctcggcctcccaaaatgctgggattataggcatgagacactgtgcctgtggctttcactgctctgaacatctctgagcatagaactattccttcatgtagtattgcttgcattagctaaatttctagagttgggattttttttttgatggggtgctgtattagtccattttcacactactataaagatactacctgagactgggtaattcataaacaaaagaggcttaattgactcacagttccacatggctgggaggcctcaggaaatttacaatcatggcagaaagtgaaggggaagcaggcaccttcttcacaaggtggcaggagagagagagagagagcacacagggaaaactgccactttaaaaccgtcagatctcgtgagaactcactatcatgagaacagtatgggggaaactgcccccatgatccagtcacctcccaccagatccctcccttgacacatggggattacaattcaagatgaaatttgggtggggacacagagccaaaccatatcaggggctttccagtctttacyggaaagcctgctagacaaattttaaaagagctataacactgagttgggatttcttgaggtcaaaatatttaatatctctttatgttgttttccaaaaggtctggattcagatactctccagcagtgtctgttgggagagagagagccaggggtgatggtctggctttcagacctgagatcagacaggcagatagctgaactcccaggcagttcgttggttggtggttggttttttgctaggttttagttgtttttttgttctgaatctcatttcaaagagagcagattgactccacacctaatgcacatcctcagtttcacaaagcagctaagagcaagtcaggtttcatagtccaaatgatgctattgcttgagtgtaattgtgcaccagccattagcccacatttcttggtagagcctcggtgcccttggattatgaatttgcacacagtggaatcgcaacaatttgttttatagttctgtcctttgagggagtgacatttcttccaaggtctcagctcctttaatctataaaatgggaataataagaattcactggacaaatattcagtgtgcctgttgggagtgttgggcatgtgcagtccatctctggggctagcatggaaggcgtacattaaaaagatactcatgctggctgcagtggctcgtgcctgtaatcccaacaccctgagaggctgaggtaggtggatcacttgagaccagtctgggcaacatgatgaaactctgtctctataaaaaaaaaatatatatatatatacaaaaaattagccaggcatggtggcacacaccagtagtcccagccgagaggctgaggtgggaggatcacctgagccctgaaggtaaggctgcaatgagctgtgattttaccactgcactccagcctgggcaacagagtgagaccctgtttcaaaaaaaaaaaaaaaaaaaaagaaaagaccaggcatgatggctcatcatgcctgtaatcccagcactttgggaggctgaggtgggtggatcacttgaggccatgagttcaaaaccagcctggccaacatggtgaaaccccatctctactaaaaatacaaaaattagcygggtgtggtggcacgctcctgtaatccagctactgaggaagctgaggcacgagaatcaattgaacctgggaggtggaggctgcagtgagccaagatcgtgccacggcacttcagcctgggagacagagcaagaccctgtctcaaaaaaaagatactcatgcaaataaatgtgtaagtactaactgtgatgartggaaagaattacgcaagaagctataagaaattacagcaagacaattgtatatccacaagaaggtttataaatgcttctctgaagagataacatggagtgtttgcgacctgagtgattcctaggttttggctaaggaggaatgagggaagcagacggggctgcaagaatggcaggtgcaaaggccctgaggctacagagctctgtgccctccmggaatcagagggtggaatgggtggggtggcatgtcagtactcagaaaagagatgcaggcagaggtgggttaggcaaggtcccagatgcctcatgaaaggctgggagccaccactgagctaagaagtgacaggctaggggagtggaggctggaagatgactctctccctgtgctagtgagcaatgcccatggtggtctagcagaataatcactttttttgttgtttttttgagaccaggtctccctctgtcacccaggctkgagtacagtggtgcaatcatggctcactgcagcctcgacctcccagactcaagccatcctcccacctcagcctacctwgyagctgggactataggcacacactaccatgccagggtaattttttttttttttttttttagcggagacagggtttcactatgttgcccaggtctccagctcctgggcccaggcaatcctcccatctcagcctcccaaagagctgggattacaggcatgagccaatgtgcccagcccagagttagagacattttagaggcaaatgagagtcccttttcttcctcctttccctaatttcaccctcaagctgatgaccatgtaattgtggttatgttcaagaagtgagagctaaaatgggatttacctttacgtcagtttgcaagaggcaagagagaagcttacatttctaaaacagcagccacaccgtggaacytaaaagctagctggacttmactccagtgcatcctagccaggaattagggaactttttttaaactttatttatttatkttgtagagacagtttcccaggctggtcttgaactcctcagctcaagcaaacctccagccttggcctcccaaagtgctgagattacaggagtgagccactgcacccggccaggagttagggatattggcaaccccaggttatcatcccagaaccagtcatgaaactcatgaaatcatcaccaccatccccatctccaagagaatctctctagtacttgcatgtcatgattaaaatcagtggtcagtcttggcctgagtaggaggagaaagctggaaccagtggacttcctgatatgtgatcccatgaaagagtgaagtccgtcttgtgttcctatgggtagctgctctggagggtggaagcctgaacttgatcattccctctaattctcagcccatctagacaaaaggagtcttgctgggagagagaawttgtttggtttattatcagttctgaaggtctcacgctggtaagaagttcagasttagttgcagactttttaactcaagagacaggatcttgctgtgttgcccaggctggagtgcagtggcatgatcgtagctcactgcagcctcaaactcccgggttcaaaggatcttyctgcctcagcctcccatgtaactgggaccacaggtgcacaccaccacacctagctaatttttttattttctgtagagacagggatggcagtggtggggtggtggggggcgcaggtggctcgggggcagggttgtgtgtctcactttgttgcccaggctggtcttgaactcctgrgctcaagcaatctccctgcctctgcctcccaaggtgctggaattacaagtgtgagccagcgcacctggccaatcaaattctttaaaattaagtgccacaagttaaattcttttcttagaggtttaaatgttacagacacatgactgacatgtaataaatattcagcattcattggcaagaacaggagaagccagatggctggatragctttgggctttggttcaaactgcagttccccagataaatagctccgggatcttgggcatgttctaaactacctgggctttattttttccctctgtagcttgtaagagcacctactccacagactcatgagaataaacagcaggtgctcaataaacggyggccagtattgttatttaaggtttacactcrctttaggtgtatgtcagtcccacctgagctacatttgccaatgagtcaygcctggctaccaagtgcccgaaatggggctcatctgaatgggggtgtgccgtaagcataaaacacacatccgattttgaagacttgctatgccaaaaaggatagcaaaatattaacatttcgctaattagttttcatactaattagttttatgctaatttattacctgttgraatgatgagattttgaggacacgtcaggttaaatagaattaacattaatttctttattttyagtgctttattttttaatgtattatttatcttttttcaacttttgcctttttccatgtgttccaaaagattaatttcatctgtttcttttcttttttgatgtgaccactagaaatttttaattggcacatgtgactcacatttttatttatttatttatttatttatttatttatttatttttgagatggagtctcactctgtcgcccaggctggactgcagtagcactatctcagctcactgcaacctccgcctcctgggttcaagcgattctcctgcttcaacctccagagtatcagggattacaggctcctgccaccatacccagctaatttttgtattttcagtagagacggggtttcaccatgttggccaagctggtctcgaacccctgacatcaaatgatccacccgccttggcttcccaaagtgctgggattacaggcgtgagccaccatgcccagcctatatttattttcaatagtacaggtctaaagacatgatatagaaagtaggaatggttaaggagtgagaaaagcgtggacttggcaatcagmaagatgtaggggcttatcagggtagcagtactccctgtatgctattagagcagtcagttaactttttttttttttgagacaggctctcactttgtcacccaggctggagtacagtggcacrgtrgcacaatctcggttctcaagccatcctccctccgccgcctgagtagctgggactacagacgtatgctgccactcatagctgatttttgtatgtttgtatttttttatacagacctgctttcactgtattgcccaggctggtctygaattcctgagctcaaggaatccgcccactttggcctcccaaagtgctaggattacaggcatgaaccaccaagcccagccagttaacctttgtgtgcctccactaatatctgtgaaatggaagcaaaaatccccagcacaaaagcattgtttcaatcaatgagataatacatggaaagtacttagctcagtcctaggcacaaaataggtgctcaaacacaaataaaggttatagcttttgttacatgtattagggatgtttagtattcagaagggggctaggtaaaccctgaagacaaatgaataacagtaactctcattggtttagcaagatagacttttgcatgccatttctacctccatgttgacatttgaccttcagaatgaccttgggaggtatgatcaagcccttagagagatgagaggctgggcatagtggcycacacctttaatctcagcactttgggaggcgaggtgaraggattgcttgagcccaggagttcataaccaacctaggcaacacagcaagtccccgtctctacaaaaaaataaaaacattacccaggggtggtagtgcatgcctgtagtctcccaactactcaggaggctgaggtggaaagatcacttgagtccaggaggttaaggctgcactgagagagagasagagagagagagagagagagagagagagagagagaggaaataggctcaggagcaagcaccttcacatctgagcaggaactagaactaggccttcttgtaccaaccctctggattctctcaactttccaagcytccaaagtttgtttctgtgtttacttcactctctggttaggtggtttctacaggagtctttagaacaagagagaagaccgacatttattacaaccagcaaccaacrttaatcactttcccatatcagtacataaagcgccatcgcattctttttgttgaatgcaggttattctgcatgatggatrtacccaagtttattttaaccagttcccactcatggacaattaggttattttcaatttatatcaatgagacaaattccttcaagtagaattatgctagggatcaatggtttgcgcatttacaattttacagattttgacaaattgctctccaagccatttgtatgaatttcctctcctgccagcaatgaatgaagtgccagttcccctgcatcgtgaatatggccaaatatttcatgataaaaattcagtgtggagaaagcagaggaaaggtgagatagcagctgggaggccgtcaggaggtgggggcaactgtccaggtaggaaacgatgggtacctgaacaaggacaaagtaaggagggagagggtggagcccagagctaccgtggaagtcaaattccgtggcgtggtggtgaaggaagataacaggaaggaggaatcagatttcttgagtttctggcttgaacaaatgagtaggcagtgggtctgttaatggagatgctcaacataggaaaggagataggtgtagtgaagagaagatgatgactgtgagaacgtattgcacttgawatgcaggacaccctgctgaaccagggagaggatttggggatagtgaatcatttgtggaaaccgtgagtgtccatgagctctcccagagatgggtgggtggaaggatggatggatggatgattggatggatggatggatggatggatgatgatggatggatggatggatgggtggatggatgggtggatggatgggaagatggatggrtggatggatgggaagatggatggatggatggatggatggatggatggatggadggatggaaaaatggatgggaagatggatggagagatggagggagagaaggatagayggatgaatgaacagacagacaaaaaacagaaacctagactttattgtctttagattgaaccatatgaaattactatttttggccaggtgcggtggctcatgcctgtaatcctagcactttgggaggtcggggggggaggggcagatcacttgaggatcagcctggccaacatggtgaaacaccgtctctactaaaaatacaaaaattagctggkcgtggttgcttgtacctgtaatcccagctacttgggaggctgaggcaggagaatcacttgaacccgggaggctgaggttgcagtgagccacgatggtaccactgcactccagcctggatgacagagcaagactccatctcataaaaaaagaaaagaaagaaattactatttttgttttaaaaattaccaagtgcttacttttatgcaggttgaaatattttggggggaaggatactgatgtctacagttaactttgaaatgcatcaaaaacaggatgtgataaagcacatgtggtaatcatgttaatggtagaggctagtagtgggtatataggtatttaccgtaaaattctttyggctttgctgtgcattggaaagtttcataaaaaatcatgggaaatggtctaggcgccgtggctcactggtgaatattgtcaatttcatgtggttcccctcaatttatgttttatttggycaaaaagatccttccaggttcccaatctgtagcatcaacagatctgctttgtggagtcccctttggcccttgttctgccccgatttgggggctgggggctgggggctgacgtttctccctctcaaagttcaggttgaattgccctaacgtgctgattactgcaccgaggatgccggtatctggcttgtaataattatagatttcctctgcgatttgatcccattggttgcctcggcaacggcgtaatagctcaaccgaagcgctgtcacggtgatttagaaccagtgtgtctctcctgcagcctccattctgggtgcctccacccccttgccgtcgtcatggtaactgatgagcagcatgtgaccgaaagctctctgcccccccaaccccataccccctccccatcttgtgatcaccctcattacctcttctgggccccctgtggacctgcgttgacccagcatgggctacaatgggggagttgggtaatcgctcccggtrggttcctccccaacccccgaggcggggtcaggtggagcgtgggcgccagagcagcccctctgccttgggtgtcttggagatgacttggcgccccccggagccccgtcatggctgtggctgcgtccacaacactgcatcagcagagtcctggggaagccatttaggaatctgaagccckggatttctgctttgtcccttcaggggttcctgagcctgttaaaaaaaaaaaaaaatctaggaagaggccctggaaggaaaaaggggagggagatagcctattttacaaggtctgaaatgatgtgtcttatccttctggcttaaaccaagctgggcttaaaacatcttttaaaaaaaatctgtattctatttttttctctctgtttatcgctctcyttctgcctctgttaatctttgtttctgtgtagttgcatcctgtttctgtctgaaaacccttgtctttctgaatccatctttcagtctctcacattctgtctttcccctcctccttcaccttccctccgtccctctcccttgcgcacttgccgggtaccagctgagtgcatccttttcccaaacctgctctgcttccaaggggcccttttctgtctcctccacctgtccccatgttttggggactgcctggaaatcygggacaccctcctgaggagggagctggtgcccaacggcacctcttaggatgaacccagccagctgcgttcctggcctctgcagaatggcatacagaaggcattttaagcaagcgagctgagctcgccgcaggactccgactaccaggcaccgtgagtgcaaatgtgtatgtgtgtctctgtgtgcatccttacatgtgtatgtatttgctgccatggggaggtggtgccagtgtctgtcagtgcctgttatctgtggtgttggggtgtgcaggtcgggggggcacacacccttgtgcatctgtgtacatgcgtgcacatgtgcctggctctctgtgtgtaggacacacaaatgtacttaacagatttttcaaggacactttgtgaacacagcaggaggagaccctttaaagtggggacaaaataatgaaagatggatatagaaatgatgagataaggaattgctcttatcaataggcttgcaacaccacagtccgcctgcatctggtcctaggaaatgaagtgagggtcaccttgaaaaggcatttttgttcaagccgctaaataaatcctttcccttcgttctaaggacaagaacagcacaaacacacacacccctttctctttgaaactcaggggaatggaaggctcagggggcgctgtcactgggcatttcagatagagtttgcagtgagaatctcagttgacagccagggcggctcacgccaagagtagatgtcaggaagctctggacagccgctctcttcacatcttgtggctgattagaagttcattttgaattttttcccagaagcagcctatgccccaagaggcaaccagaagaaagcaattttagaaaatgcaatttcatttgcagggcaagatgtgggaatcctgaaaggttggcgctgaagatcctgcagttggtgtgtgcaagctggcagccaggccgctgccggaggaagggggtcctctgtgctttgcatgtccctgggtatttgggaaacttggcagccggttgctctaagtgaaccctgactctggagtaggcactgggcaccctggcggagaggacagagccggagacaaggactggcctcagggagtttccagttcaaataggaacagacccgatcacacgcgatacgctcaccctcagacacattgctgctgcctgcatttcctccgggctgccatcccccttcccctaccctggcctctgtctgccacgrctgcccttgtctacctgccaagctctaattatcgttaaacatcccgtcactgcttcccggaaatctttaacttccacccaagaacagctaacactatacgccctcctctacctgcagaaatcacttggaccctctgacatcacrtgtccaaccgacctctttctccacatttgcccgtgagctgcacttcattttgcaaggacataaagaagactattcacgcaactacatgcaaaatgactggctgggattcctaaaacgccaatgtcttttaaaaggcaaaagggctgagaaatggttccaggttaaaagagattaaagagccatgagcccaaatgcaatgtttgatcctaggatgaagcctggatcaggggaacagaaaacacttgtgggctgggctcagtggctcatacctgtaatcccagtgctttgggagtccgagggaggaggatcacttgaagtcaagagttagagactagcctcaggaatatagggagaccccatctctacaaaaaataaatataaaaawaaactaaccagacatagtggtgtgtgcctgtgatcccagctactcaggaggctgaggcaagaggatcacctgagcccaagagttcgaggctgcagtgagccrtgagccatgatcatgccactgcactccagcctaggtgatagagcgagaccctgtctctaaaaaaaaaaaaaaaaaaaaaacaattaaagaagttttagggataagtgggaatatctgaatatagattgtatgttagataatagtatttatagtatttttatgtcatgaatatgccaataataaataaattaaaaaaagataatagtattttattaatggtaccttcatgagagtgactttgtatctcagatcatttgtactgaggttaygtaagagaacrttcttgttcttagaagatacaggctgaaggattcaaggatgaaatatcacaatgtccacaactaactcaaataattcagaagacagataatagagtgggcacgagtgtggcaaaatgttaacagtttcgaggattacaagcggctgtggaactatgttcataacttttatgtgggtctgaagattttccagtgcccaggctgggcactctgcttagctttgcgcgtggattatctcatttcatcctcagagcagcttggggatgggagagctctatcacacccattttccagtggagaaaacagaggcacagctagttgtaagcccaggccacattatgcccccaccccctgttttgtgaaatttagtactaaagatactacatggctgtgtgatgtcgggcaaatcacttaacctctctgtgatctgtttccttttttcttttttttgctacgagtggataattataatatcagaaggttgttctgatgggtattatgatatataaagaacttagaacagggtttggcctaaagtaagcgctgagcaagtgtctgctgttgctgctgctaattgtatttgttgctgcagtcgtgatcccagcaccctcaccttggccagtgatggggaaacctgaagggtgttttttcttctgtacccagggcgtgcttcatgggtttgtgatctatatggtcacacagggtcccgtgttcagaagatccccccatgtcactgacttgcaattcgtaaccattttctcacaaggggcctcgaatatttattttatgcactgggtcccacacatcatgtagccagccctgtctgctctccctttttattggatcccgttgagagcctctcctagactaaactacttgtgcctacgtcattgcagcagacaggcccaggcaggccgtggcatttcagcaggtcagattgtatgttcctgtgaccacactccaattctgatgcaatgcgtcagcccgcacaggccagtacagtagscgttcatcacatctggtcattgagcatctgagacgtggctattctaaactgtgatgtgctgtgagtgtgaaattcacaccagattttgaagacttagcacacatccgaaaaagaaatgcaaaatatcttattaataactatattgatggccgggcacggtagctcgcgtctgtaatcccagcactttgggaggccaaggcgggtggatcacttgaggtcaggagtttgagaccagcctgaccaacayggtgaaactttgtctctactaaaaatacaaaaattagccaggagtgatggcacacacctgtcatcccagctactcgggaggctgaggcaggagaatcgcttgaacctgggaggcgaaggttgcagtgagccgagattgtgccactgcacttcagcctgggcaacaagagcaaaactccatctcaaaagtaataataataactatattgattatgtatcaaaattattacattttagatacaatgggttaaataagatacatgaaaaaaattggtttcagctgtttttgcttttttcatatggctaccagaaaatgtaaaattacctatgtggtttgcattgaaagcttgtgttatatttcttttgggcagtactgtcttagagcatactacctgtgccttcattgtgactccaaaccaaaccagaccagcaggtgacagtgcagtgaattgatttctaagttacattaatacacwctggccctggtgctgtagcttagaccagagtctcccaatcaatccatcaggcacctctttctgttccttcttttctgttcctttctctcttaagatagtccaagacactgatttttatacccagtgagtttgtcaagtagcctaaagatatttttgaggcaacgtattgggtaaaaagaaactgaagttggaatcagaagractaatttaagaattaaattaaaatcccaaatcacctctttttttttttcttttagagatggggtctcgctctgtcacccaggctgatctcaatctcctgggctcaagcgatcctctcaccttggcctcccaacatgctgggattacacatcaggtcccaggtcacctcttctccatgaggtgagcttgggcatgttatttctctgtgcaaggaaacagaacagcactagctttaaagcctcacagacccgagtttgaagactggctctgccgttgacaagctgtgtgacacaggataagccacaaccctctctgaacctcagtctcatcctcagtctcatagcgctgatgatgcatactgtgtaatactgttgcaagaatggaataagatgaagcagaacaaatgtccaacccagcaactggcacatggcaggtgtgcgcttaatccctgcattcttagtgggatcagtattcccaagagagtgaacatttatgggaaagaaaagaaatcttactctttatgaataaagtacagatataaaatacaatacataagcagatgtacaatttatctgtggaattaaaatttcatggggtatgtagctaataaagaatctttaggggaatggcaatgaaaaaaagtttgagaaacattgcattaatctgacggatgggactcagaggttgcttttcagttcagttcctgtagttgtcagagtatagggctgaaactccatgattgaattcaacaagtgtttttgagcacctacaatagccagacaccgttctggaccctggaaatggagggcaccctccaggtacatgcttcccagagctggtctctgaggtcccctgagccagcccctgcctctgggaagatgacccctaaatggcagcctcagtcagggggcagggttttagagaacaacaggaatagaagtatttgcctccmaggagtagataagacggtgtatgtgaaaccttgacacgattggcattcattcgtaaaatcagagcagatacctgcacacacaggcataaatgaaagatactttgaattacagaaaagttaaggtctttgcaagtgcatgtaggaatgctgccaggcacacagcgtgactccagccaccaacaaagtgtttccaagtctggagctgtgtggtccttgaaggaaatataaatgtttcacttgttatacgctgtgatttttgcgtacttagcggtttctggagtccgtgaaagtggtttgttttctctgaacgggaagtgcgtttcctccaatcacaccgacctgatttgtttgttgcttgttgggcctccccacgggaacacgagatcccacagaacacagcaggacgtgtccttgtttactgaggaatctctggggctcggcacaggtgtgcagaaagcatttattgaactgaacaaacagattttacaagccggaccttctgtggcgttggcccgggtagctacttcagcatgggtccaagcatcctttctaagccaattccattctttcactcctcctcccttgtaggatcagaaatccaaagctagcttatccttttgcagatgtttctttccatattatttcctacctccagaacaaaggctatctgtgtctcacattcggaggcttggatktgaagccctgtctgttcatttttctctccagttttttcacaggctgggtaactacctgcctgctagcaacgatgtgttcgttctccctggattcctgattgaggtgggcagagaggactctgagacaggagcatgaggatgaggcagatcagcttctttctcatgaaatctggatgttgaggctggtagcaggaccaccgcatgtgccaatagtctttagcagctcatcaggccatagaagaagtgcctttactaacttcaagtccagcctgggaaacgtagtgagaccttgtctctccctgtctaaaaaaagaagaagaaagaaggaggaggaggaggagaaggagaaggaaaaaaagaagttgttcacaatttttgtttactcgtttacttatttttgagatggagtttcactcttgtcgccaggttggagagcagtggcacgacctctactcactgcaacattcggttctcaggtttaagcaattctcctgcctcagcctcccaagtagctggaactacaggcacctgccaccacgcccagctgatttctgtatttttttgtagagttgggacttcaccattttagccaggctggtctcgaacttttgacctcaggtgatctgcctgcctcggcctcccaaagtgctaggattacaggcgtgagccatcgcgcccagccaaaatgcacaattttaaagagctctttggaaacagaaaatggcctgcaacaggcatctcttccacatcctatgtactttcttcaattgaccctaagccagttgagtgcctcctgaccccacaaatagatttcattcttcccattttacagatgcagaaactaaggcactgatgagttcagcaacttgcctaggtaatatatatggcccagccacactttagacccaatttctggctcttgttactttccccacatcattctcagtctttcttaggaatggacatttgcctgtttccaagaacagtatttctgtctccctatacaagtcactgataattttatgatgcccaagaggcaggtgataggaagtcatgcctgcagggagagagggctggggcccatgcggaggggaaagtcagaagaggctgttgcagctgaagtcggaggagaaaagtggatgtgagataaagcctctgtccctgtgccactgcccctgaatggggccctgttaaccccatctgcacaggcccacggctccggctttatgggttgctatggcaacccctggccttgacaactgaagtgcacttggctgagtgtgtctttgtgtccctttgagtctgcagagaagccagcagctggggctgcagacgggaaaggaatgtcctcagcgtctgccagcacttttgtcttggtcccaacggctgataggaaaatgagaggcagggtcttttctagagagatctggggggtccatttctagccgatgatgcatgcaaagagttcgtgttcacaggacctgggaagcagcggagtagaaaggtgagtcagacgccatcttcataggctgcttgttgagcatttactgtttattcaatgattgtttgcaggcaggcactsstctggggctggggaaacagtaaggacttctgccagcccacaaaatagttccaattgctattactcccattttacagatcaggaaactgaggcacagagacgttacttaatgtgcctgaggttatacggcrggtcagtgagaggccagggatgtctagtctgggggtaagatcattttgaaggatgcaagattggggagatgcagggaagaagcagtttcatatccagcacctcacactctgcctccacaggcttttttctccctgtatccatgggatgtttgacctccagttccagggatttgaggatcatgaagtcctgtggtcatatgcagggcccaccgtccactctttatggtaattaacagtagttctcagcctccgagcctccagagcttcccccggtgcccaggtcacacctgtgagactcagacctacttagtctgggtggggctttgacacaagtgtaagcttctggtgagcgagcgtcaggtgcagccaacgctagaaatttctggcttttgagctctaagaccttgaamaagccttttaggcttctgaaccggttttataacgccagccaatcctgcagattaccgaaaggatctatggaaggtctattgcatgtggtaggtgaacagtaagtaaataaatgggagctggtacttttactatgattattctttctccagagcaaattggaagagtttgtttccactttcacctgaattcctctcacttttactgatttaaacattgaactcggcctcttagctcatctcgcccctccccgcaatgcaccagacacacgaaggaagcagagagagctaatttgcattttaatcaaaagaaaaaggacgaggagaggtgkgtgggactgaagagctcactatctggctagaccagggttttgacttgttttgactgagacacacagtaaggaatagaacttacttcaggcccactgcacagctgaaacaaaaattaccagcatttgctatgtaccctgacaattcctattctgtttgatttactgatggatttaaatttctctttcagttctgatcatgtcaaggaaaaggtccccatgtgaygccagcctgcctttaacacctgtctgctctctgccagtctctagggaaaggagggggccaggcctggggctatagccttgggcggtccactctgtccggcttttaattgaataacttgctttgattttattatgttcttttcctagttgccttcgtagcaaataaaacttgacgggggaagatagcaattaggtttttttatttgttatatttttctttgtagagacaggggtttcactatgttagccaggctagtctcaaacgcctggcctcagctgatccatctgcctcggcatcccaaaattctgggattacaggcatgagccaccacacctggccagaaggtagcaattggaaaggatcctaggaaaattacttttttaaattgaaaaagcaagttgatttcaagaaaaatgttaagtcaacacaagtcatatgagacataagagctcaaaggaagggtagtatgccaagaactgaggttcgggaaatgcatgggggagattgggggtctcagagaccaggagggccaacaaccagcctgctgtaacttcagattttcagatttctccaacctccttggtcacaatttcatggcgtgccagtgctctgaaagcacctcccttctaaccaggaatccttcacctgcttctttccccagatgcgcccatccagggtctagcggattgcaaagggcctggtagaatcaaagagggatatactaatgcaacttcgaggtaggagcaaggcttggggaaaatgctgtggcaaattctcagtaatatggaactcttagcacgcttgtcaggtgtttcttagagtccgaacgggccttagaaacaatgtgatscagccaggcaaggtggctcatgcctgtaattccagcactctgggaggccgagggatcacttgaggtcaggagttcaagaccagcctagccaacatggtgaaaccctgtctctacaaaacatacaaaaattagccaggtgtggtggcgtgcccctgtaatcccagctgctcaggaagctgaggcaggagaatcacttgaatccgggaggcagaggttacagtgagccaagatcacaccagtgcactccagcctgggtgacagagtaagatcgtgtctctcaaaaaaataaagagaggaagccgagaggctatttaggatatcattgccttcatccaggagaaggatgatggcaagttggaccagagcatgttggagacttgtgcaccagcagggatatactggaaccctgggcacccagctcccttctatcatcattggtgcttcaggcttctgtaccaagaaagagagccttcccttgtggcagcctgcatctggggtttccagtgcaagcctgcagggaaagtctgcctatctgtggggcctctttccttggcaactccagaaatctccagggatctcagaccatagggctctagaatcaatgactacatcttcagcagcaagtataagacaggagcaagtcagagacagagtaaatgcaaatgacttgtgtgcctatgattgtccaggatgtgttcatccattatccctaattcccagcgcaaccctgcagtgagagaggcatcactatctccaatctacaaatcaggaaactgaggctcagagcatttttgtaagtttcaccctgttgtacaagtacctaagatagggcagtggtttggatccaagctttttatatatatatatatatatatttttttttttttttttttttttttttttgagacggagtcttgctctgtcgcccaggctggagtgcagtggcatgatctaggctcactgcaacccccacctcccgggttcaagcaattatcctgtgtcagcctccccagtagctgggattacaggtgcacgccaccatgcatggctaatttttatatttttagtagagacaggatttcaccattttggccaggctggtcttgaactcctgacctcaggtgatccatccacctcagcctcccaaagtgctgggattccaagtgtgagccactgcgcccagccccaagctttatattctaaaacccaggctcaaataccacctccatgcacaacccacatatcttaattatctattatggtgcacataacagacatcactaatctatcacattttttcccctgaaaacctraaagagtgcttcctgctaacaggtcaaaaaataatgaaaaataaaaaataagtaaagctaaaagaggccgtaaaatctttttgttcgctgctccaaataggcaatactcattggccagcactggcacgtgttgtaacatttatttgccatttcaatactgcacagaaaattagcttctctcagctaggcatggtggttcacacctgtaatcccagcactttgggaggccaaggtgggaggactgcttgagcccaggagttcaagatcagcctgggcaacatggtgaaaccccatctctccaaaaaagaaatacaaaaattagccaggtgtggtggcatgtgcttatagtcccagctactcggtaggctgagatgggaggatcacttgagcctgggagccagaggttgctgagatggcaccactgcactccagcttgggcaatagagccagaccttgtctcaggaaaaaaaaaaaaaaaaaaaacaatggcaatcttggggtcacacagcctgtagcaggtggaaattgaagaataagtttgtgtgatcagagtgtgtcattactctacacacagttctttggtcctctcccttcccatctacaaaagacagccaactccaatatctctttttcttttttctttttttttttttgagatggagtctcactctgttgcccaggctggagtgcagtggcgccatctcggctcaccgcaacctccgcctcccgggtccaagcgattctcccgcctcagcctccaaagtagctgggattacaggcgcctgccaccacgcccggctaattttgtatttttagtaaagacggggtttctccatgttggtcgggctggtctcgaattcctgacctcaggtgatctacccgtctcggcctcccaaagtgctaggattataggcgtgagccagcgcgcctggctttttcatttttattaagataaacataacattaacctttttaagtgaaaactcagacccttttagaacatccacaatgctgtgcagccaccaccgctatctaattccagatttttttcatcaccccggagacccccgtacccattaagcagtcatctctcattcctcccaggcccctgccaacccctgatttattttctgtctttgtagattcacctactcttgaaggttcctataaatggattcgtagactatggggcattttacctctgcattcattcatatagcataaaaaatrttttgagatttatccatgttgtagcatgtgtcagaacttcattcctttttatgactgaataatatttcgttgtaaggatagaccatgttttgtttattcattcatccaytgatcgacatctgggctttttctacctttcggcgcttgtgaatagtgctgctatgtgtatttgtttgagtctctgttttcagttctttgggttgatgcaaaggtcatttccttttgcaccaacctagtacttaggggtggaattgctgggtcatgtagtagtaattctatgcttaactttttgaggaacttgtaattcttaaaaggccatgccaactctaggactgagggtttaagagctaatccctgccttcttactcctcatcaactcccaccccagtgggtgccctccaacacacctgcctcgagaaccccctccccagctcagtgaccccagcatctcattgacatgctgagtgcatgctccctgcccctccctgggagcctgcctaaacacagacccttctattctttctaattttttttgtacccattaactatccacctcccattcaacccgccactacccttcccagcctctggtaaccatccttctactctctatgcccgtgacttcaattgatttgatttttagatcccacaaataagtgagaacacatgccacttgtctttgtgtgcctggcttatttcacttaacatgatgatctccagttccatccacgttgttgcaaatgactagatcttttttttttttttttttttttgagatggagtctcgatctgttgcccaggctgragtgcagtggygccatctcggctcactgcaacctctgcctcccgggttcaagcgattctcctgcctcagcctccctagtaactgggactacaggcatgggtcaccacacccagatgatttttgttttttgtagagatggggtttcgccatgttcgccaggctggcctcaggtgatccacctgcctcagcctcccaaagtgctgggattacaggtgtgagccactgcgctgaatagtactccattgcatgtatgaaccacattttctttatccattcatctgttattggacactcaggttgcttccaaatcttagctattgtaagcaatgctgcagcaaacataggagtgcagatatctcttcgatatactgagttccttccttttgtgtatttacccagcagtgggattcctggatcatatggtagctcaatttttagttttttgaggaacctccaactgttctcyatagtggttgtactagtttayattcccactaacaatgtacaagggttccctttgctccacatcctctcyagcatttgttattgcctgtcttttggatataagccatgttaactggggtgagatgacagctctttgtagttttgatttgccttctctgatgatcagtgatgtcaagcaccttttcatrtgcttgcttgccatttgtatgtcttcttttgagaaatatctattcaaatcttttgtccattttttgatcgaattatgagatttttttctatagagttgtttgacctcctttttatattctggttattaatcccttgtsagaggagtagtttgtaaatattttctcttgttctgtgggttgcctcttcgctttgttgrttgtatcctttgctggaggacagacccttctggatgcaactagagcagctgggctccctcctccctttgagagggtctccagagggccctatcaatcaagatcagcctagaaattgttgctcgagttggctccagatgaccgcaccttcaccttccctccaagtgctctatgatttcttaccacacccactctcactgtgcaccaggatccttagctactccgtgtcatcatacacctccgagcacttgccttatccctgctttcttcattgccttctgaaatcgcctaacttttgaagatgcagctcaggcaacacctccctgacattgtcaccccagccagaaagaatctccccgtattcccttagcacttcactcacaccagcaaaatagttgtgattctgttctatcttatgcagaatttgttgttgacagtgaactggaaaatttttatgtacatatcatgctgagttattttaagaaagtattcacatgatgggtaaagcagcctagtacattaaattcttccattttctttccgctcatagttctctgccactaaattatgagcttcagaaagaaagcaatttatccatcttggtttctcctaagagaagtgatgacttggccaggagcggtggctcatgcctgtaatcccaaccgtttgggagtccaagatggtaggatcacttgagctcaagagtttgagaccagcctgggcaaaatagcaagacctcatctctactaaaaatttaaaaaaattagccaggcatgatggcacatgcctgtagtcccagctacttggacggctgagatgggaagattgctagagcccgggcgatagaggctgcagtgagccctgatcgccccactgcactccagcctgggcgacagagtgagaccctgtcagagagagagagagagagagattgattatatctaaacgatgcagtgccttgctsataacaggtgcctaattaacttktgttgattgaattagtggrtgagagggagtgaatgaatgacrttaactcttccaattgtttgaaatatattgtgctaagaattaatgtctaacagagatcagattttgttataaggtcaattttcaactgcaggccaccaaaatgtcaccacggtatattttccaatgtgacattttgtaattgaaaacgtgtgggwttggctctcacttttgcagaatattcaaatgttgagttctctgagacattcggagtttcaaaaacgtgtttaatggaaattgaattgtgtgacgcctcagtgctccctgtttcagacaagtggttttaagggaaagacatgaactgcactttctacacagttactctgttgctaaattaataggcttgcattgagtcggatatcctggaatagaaaaaaaaatccattgagttattaagaaaagagtttgggccatgcacagtggctcacacctgtaattccagcactttgggaggcagaggcgggtggatcacaaggtcargagattgagaaccttctggccaacatggtraaacctcatttctactaaaaatacacaaattagccaggtgtggtggcacatgcctataatcccagctactcgggaggctgaggcaggagaatcgcttgaaccagggagtcagaggttgcagtgagccgagatcacgccactgtactccagcctggcaacagaacragactccatctcaaaaacaaagagtttggtttctcagttaattcatggccacactttccaagcccacactttctcaraaagtttcctctggtgaaaagcaataaaatttattctgtgaactasgtcatttttattcatgaagcctcatatcaacaatagctaggggccgggcacggtggctcacgcctgtaatctcagcacgttgggaggccaaggcaggcagatcacttgagctcaggagttcaagaccatccttcacaacgtgacaaaaacctggctctactgaaaaaaaaaaaaaattagctgggcgtggcggcgttcgcctgtagttccaggtacttgggaggtggcaggatggcctgacactgggggaggcagaggttgcagtaagctaagattacaccactactctccagcctgagtgacagagccagaccctgtctcaacaaaaacaaaaacaaaaacagctaggagttttgttattagctggattaactgatgttacaatgcatagaggcaggggctttggggtcagacagtctcaggtaagcctatgactgaggccgaatgtcataacctctctgagcctcccttttatcatctctgaacagggagattaccctactcctatagatgtttgagcaaagagaagggagtaatgtacccttcagaatgtctcacaaagaccaggcaccatgsctcatgcctataatcccagcacttcaggagccaagatgggaggatcatttgagcacaggagtttgagaccagcctgggcaacayagcgagacccctgtctctaaaaaatatatatatttaaaaattagctgggtatggtggtgcatgcctgtagtcccagctacttggcagggctaaggtgggaggatctcttgagcccaggagttcaaggctgcagtgagcaatgatcacgccactgctctctagtctttcttttgtctagcccttttttgtcttaaaaaaaaaaaaaaaaaaaaagaccctgtttgaatgctggatcatctcagtgggtagagagtgtcaggactctggcccagccctgtctagtcaaccatggccagtagggccaggtctatgcccccgcagaggaatggggaagtatctgagaagggggaggaaggaagtgcagagcagacaccccagaagatacttcctgcaccaaccccaccccacccgtgatagtacctcagttgcctgaagacaggataatgacctgtctctgtcttctaggagctgcctcctagggctctggggatgaaacgagatggttctacagcaccagctgagagcctgcacatagcaagtgcccagtacttgatgatgcttagagggtaaggacggcctctaattgatctttatgtgccctagtgcccagtgaagggtctggcacacggtaggtgtaccatgaatgttcgtagcacaaaygcatcaatggcaaccgcctccctccttcattcactctttccttctaataatacagccaacattctattagctctgtgggcagccacagcgtgctggaactcgccatcctgggctcggtgcctgattctccacactattcctgccctgtgctgctgagcccacgtgtttcccagcacctgaacctgtactctgaacccgcctgtcattcctccttgccctgttctctctccttggatacaggcctcccctccagctgtgggatctctctaggtctgtatttatcacctctggttggcacttcctatatgctgtcatcacagaagcagggggtgggagaagcctcttggtcttcatccaggtctaggatggaatttctgtccactgtggggctgsgtagagttaggcagcccaagccagggctgcatgaggaaagggctgcgtccccagggtctgtcacagagtaagtttcaggtgttgcaactcgcaataaatccatgcattaggcacaagccaggactcctgagccagatatctctcaaccccaacgctggctccaccagcaacttgctgtgtcctgggtaaaccacatggcttcttttaaaaaaaatagttttactttgtttactgtccaaagtactcattaattgtttatttatcaagagaaactatttctaattttttgtgtgtgagacggtgtctcactctatcacccagactggagtgcggtggtgtgatctyggctcactgccatctccgcctcccaggttcaagcgattcttgtgcctcagactcctgagtagctgggattacaggcgtgcaccaccacacccagctaatttttgtatttttagtagagacagggttttactgtgttggccatgctgatctcgaactcctgacctcaagtgatccacctgccttggcctcccaaaattccgggattacaggagtgagccaccctgccagcccaaagagaaactatttcttagcccccatattcatgtttcatagttcaggaacacaggtcagtgataaacttctaggtaactcaacccaaagaaattctttatattccaaaatcactttgcactctgaacaataacagccatcctcatcgcttctacatatgccttstttcttggttcagccacagcaaacttatagagagctgcaactctcagggatacaatgactgctccaacaatgtgaaatggcagactctggaccagaaggccacacacctgagttttgtcaaagcactggaagccgtggtagttgtctagttgtccttgataggtatgtcaacctcaacaccaatgtctttcctggatcacttttctttttttttttttaattgttattttaaaaatcacacagataacataaaatttaccatcttcaccattttcaagtatacagtacggtattataagcacttttgttgtatagtgaagctccagaactacttcatcctgcaaactgaaactccaaacacactaaacaatgtccttttttcccttcccccagccctcggcaacctctttttcctctttttctgtttctctttttttcctccttgaaacagagtctcgccctgtcgcccaggctggagtgcagtggtgcgatctcagctcactgtaacctctgcctcccgagttgaagtgattctcctgcctcagcctcccaagtagctgggattacaggagctcacaaccacgcccgggtaattttttatgtttggtagagacggggtttcactatgttggccaggctggtcttgaacacctgacctcaagtgatccacccatctcggcctcccaaagtgctgggattagaggcatgagtcaccatgcccagaccctctatctgtttctaggaggttgactactttaggttttttttgttttttttttttgtttgtttkttttttaatttatttattttttattgataattcttgggtgtttctcacagagggggatttggcagggtcataggacaatagtggagggaaggtcggcagataaacaagtgaacaaaggtctctggttttcctasgcagaggaccctgcggccttccgcagtgtttgtgtccctgggtacttgagattagggagtggtgatgactcttaacgagcctgctgccttcaagcatctgtttaacaaagcacatcttgcaccgcccttaatccatttaaccctgagtggacacagcacatgtttcagagagcacggggttgggggtaaggtcacagatcaacaggatcccaaggcagaagaagttttcttagcacagaacaaaatgaaaagtctcccatgtctacttctttctacacagacacggcaaccatccgatttctcaatcttttccccacctttcccgcctttctattccacaaaaccrccattgtcatcctggcccgttctcaatgagctgttgggcacacctcccagacggggtggtggccgggcagaggggctcctcacttcccagtaggggcggccgggcagaggcgcccctcacctcccggacggggcrgctggccgggcagaggggctcctcacttcccagtaggggaggccgggcagaggcgcccctcacctccggacggggcggctggccgggcggggggctgacccccctacctccctcccggacggggcggctggccgggcggggggctgatgcccccacctccctcccggacggggcggctggcctggcagggggctgatccccctacctccctcccggatggggcggctggccgggcggggggctgacccccccacctccctcccggatggggcggctggccgggcggggggctgaccccccccacctccctcccggacggggtggctgccaggcggagacgctcctcacttcccagacggggcggctgccgggtggaggggctcctcacttctcagacggggcggccgggcagagacgctcctcacttcctagatgtgatggcggccgggaagaggtggtcctcacttcctaggtgggatggcggccgggcggagacgctcctcactttccagactgggcagccaggccgaggggctcctcacatcccagacgatgggcggccaggcagagacgctcctcacttcccagacggggtggcggccgggcagaggctgcaatctcggcactttgggaggccaaggcaggcggctgggaggtggaggttgtagcaagccgagatcacgccgctgcactccagcctgggcaccattgagcactgagtgaacgagactccgtctgtaatcccggcacctcgggaggccgaggctggcggatcacttgcggttaggggctggagascggcctggccaacacagcgaaaccccgtctccaccaaaaccagtcaggcgtggcggcgtgaggctgcaatcgcaggcactcggcaggctgaggcaggagaatcaggcagggaggttgcagtgagccgagatggcagcagtacagtccagcttcggctcagcatgagagggagaccgtggaaagagagggagagggagagggagagggaactgaatcttaatctactttaggtttcatatgacaggaatcatgcagtatctgacctttggtgactggcttatttcacttagcataatgtcttccagyctcatccatgttgcagcatataacaggatttcctccttttttaaggctgcataatattccactctgtggatacagcatattttttcccattcatctgtcaatggacgtctaggttgcttccacctcttggctattgtgaataatgctacagtgaacatgggttaaaatacctcacttctggagcctcagtttcctcatctgtaaaatggggataatcacgcctgccccattgttgctggcacgtgaaagaagcctgataaatcatgctcctagcacctttcacttttccttcaaggcacttctccccattataatgatgcccttgtttatgttatgattcatttcattctctttgttcctcatgaagatgtaagctccaggcctgcctcattcatccctgtatgtccagtctgagaaacagtacttggtacaaagtcagcactcaatggagtacttgttgcaaaataaatagagggattttgttggagtgtttgggctaagtgttgcgtgactgtgaggtttgctgactctggggtcacacacatgtgagttcggctttcagatccaccacttaacctctctgtgcctcaatttcctcctctgtaaaaagaccatggagcatggttgtacatgttaataatagtaataaatattaatcatactgtatgtaaagcgttttgtgcagcatgcgtcacacagaaaggactcgggaaacagggtccatgaagaggaatgacwcatgaatggtgctgtcgctgttctgagatacaaattttgttctgagatacaataccatttatgtaaaaaatacacataccaattaacaaaacaggtttttagcagaaagatgtacagacagaaggaggcacacaaaacacatttaaatgrtgttctggggagagggaacagggagcaaggagagatgataaaaggaaacaaactgggggataggggctgctccaggctcccaataagaatggcaatcagggctggacacagtggttcatacctgtaatcccagcactttgggaggccaaggcaggcagattacttgaggtcagaagttcaagaccaaactagccaacatagtgaaaccccatctctacttwaaaaaaaaaaatcactgggcatggtagcacatgcctgtagtcccagctactcaggaggctgaggttgcagtgaaccgagatcgagccactgcactccagcctgagcgatagaatgagactccatctcaaaaaaaaaaaaaaaaaaatgtgaattgaagtatatattcagtataatatagttttgggttggttttttttgttttgttttggtttggttttttttgagacagggtatcactttgtcacccaggctggagagcagtggcgcgattatggctcactgcagcctcaaattcctgggctcaagcgatcctaccacatcagcctcctgagtagctgggactataggcaggcaccaccacacccagctartttttaaagtctttgtgaagatgggatcttgctatgctgcccagactagtctggaactcctggcctcaagaagtcctcggtctcccagtgtggctgagatgacaggtgtgagccaccttgcctggcctaatatataaagtccatgttcagtataaaacccaagcatttgacaatgtcagaagaactttctctattaggtgggaagtggtggggatgggatctttggctgagaggggagtggtcttcatgggcctaagtctgcatttctggtttctttcagggtggcagcacgcaaagggtgtccctgtccctcaaggggtcatggcctccatgttgctcgcccagcgcctrgcctgcagcttccagcacagctaccgcctgctggtgcctggtaagccccgggggtcttgataagaactggtactaatggaagataccanccagactaggrattcctgggctggaagagcccttggggataaagggaccagccagtgagtgtttctgggactgtcccactgtattagtctgttctcatgctgctaataaaggtacacctgagactgggtattttatgaagaaaaagaggtttaatggtctcacagtttcatatggctggggaggcctcacaatcatggcggaaggtgaaggaggaacaaaggcacgtcttacatggckacaggcaagagagcrtgtgcaggggaactcccgtttgtaaaamcatcagatcgtgtgagacttactcarttgactatcatgagaacagcatgggaaagacccacccccatgattcaattacctcccactgggtccctcccatgacatgtgggaattatgggagctacgatttaagatgagatttgaatgaggacacagccaaaccacatcacccactatccataaaactgtcaccatcgccacctcctttctctctcccatctctgtcgtatgatcctgtcccaagtgcctcggtctgatgggattggatccaccctggagmcactctgcctgcaggtaggcggtggcctccacagccagatggccccaggccatctstgcagggaccgctggggaaaacacacatctgggatcgctgctaaggaacaaagaaagccataagcgactctgaaattgacctagagcccagctgtgcttcagggtcactggatcactggatgggaggcaccatcttaggaatgtctcacccccactctgccccacacccatggccacttgcactggctccttcttccttctgtttgacstctttgagacctccctcccaatagtcccatgagggagggaggctcaagtgaatcctattttacaggtgagagaactcaggcttagagaagcaaagccatttgcccaaggtcacacagccacttgcaagcaactctgtccggctccaatgctaactactcctccgtgtgcctccatgtggctctggagacagagccgccagcaggagcctcccttcacatgccccgagagtggcctcctgcagagatataaagtgcctggctcggggctggccatgaaataggttcagraagaccagtgagcctccagcctgtccccagctctctcacagcccctgtgcttgtcatcatggtgtcccttgttggcaggccttactgccttctgaagacaaactgctagccgtgtccttggtctgcatgttgaatgctggtgtgtatgtcctgggtggcataaacagtaggagcgttcgcccctccccaaggagtatgagtaggctttattttaaaataaacatcttggccgggcgcagtggctcacaactgtaatcccagcactttgggaggcgaggtgggcagatcacctgaggtcaggggtcgagaccagcctggccaacatggtgaaaccccgtctctaccaaaaatacaaaaattagccaggtatggtggtggatgcctgtaatcccaactactcagcaggctgaggcaggagaatcgcttgaatccaggaggtagaggtggcagtgagctggatcgtgccactgtactccagcctgggcaacatcgaggctctgtctcaaaaaaataaaaaataaataaataaacatcttattttttaaaaattttagatttacagagaagttacaaagatattacagggagaacccatatggccctcaccagtttcctcccttgttaacatcttacatcaccaagatgcagttgtcaacactaagaaactagctggccaggcgcggtggctcacgcctataatgccagcactttgggaggccgaggcaggaggatcatctgaggtcagaagttcgagaccagcctgggcaacatggtgaaacctcatctctactaaaaatacaaaaaaaaaaattagccgggtgtggtggcaggcacctgtaatcccagctacttgggaggctgaggcagaagaagcacttgaacccagaaggcggaggttgcagtaagctgagattgagccactgtacttcagcctgggcaacagactgagattaaaaaaaaaaaaaagaaaggaaaggaagaaaggaaggaaggaaggaaggaaggaaggaaggaaggaaggaggaaagaaagaaagaaagaaagaaaggaaagaaagaaagaaggacagacagacaagacagtggctcacagctgtaaccccagcaatttgggaggctgaggcaggaggatcgcttgagcccaggggtttgagaccagcctgggcaacatagggagaccgtgtctctgtgaaaaatacaaaacttagctgggcatggtgacatgtgcttgtagtctcagctactggggaggctgaagcgggaggattgcttgagcctgggagatcgaggctgcagtgagccatgatcatgccacagcactccagcctgggtggccttgtcttaaaataataataatagataaataagtttttaaagacactaagaaactgaccttggtatgttaccattaaccaaactccagacttttatttggctttcactcatttttcctttaatgtctttttctgctccaggatccaatccaggtacacacattgcattgatttgtctcatcttccatggcctcctctggtctgtgacagtttctcagtcttttccttattcttctcgacctgggtggttttaagaagttatcaatggcttttgaggttttgcttttccttttttcttttttgtttttgtttttgtttttktttttkttttttttttggkgtgtgtgtatgtgtgtytgagatggagtctcactctgttggccaggctggagtggtgccgtggtgcaatctcgactcactgcaacctccacctcccggattcaagtgatcctcctgcctcagcctcccaagtagctgggattacaggcacctgccaccatgcccggctaatttttatattttttgtagagacagggttttaccatgttggccaggctagtctccaactcctgacctcaagtgatccacccatcttggcctcccaaagtgttaggattactggcatgagccactgcacctggccaaggttttgctttatttatttatttataagagaagcatattaatgtttacccataattatgctaaactaaatcagaaagatgtaggtatggagggttccaagtcagaaagagagtctggcacagatgatccattcattccataactaaggctgttgggcacctactgcatgccaagtgctgtgctgggtattaaggatgtggcagtgaagaaagacatgtggctcttgtggagctctagcctggtggcgcatgtggcaccatctttaaaggtcattctccaggacatctgagcyttcctaaggagacaccatgggaagagcactaggtcaagattcatgtgattggrttgctascttcaccacacattaaccaagtgagcctaaccgatagaccttatccaagcctcggttttctcatcaggaaaacgggtctaataatcatatccttcctatttcacaaatttcttgcattagaagaaatggttcatatgggccaggcacagtggcccacacctgtaataccaacactttgggaggctgaggcgggtggatcacctgaggtcaggagttcaggaccagcctggccaacatgatgaaaccccatctctactaaaaatacaaaaattagctgcgcatggtggtgtgcacctgtaatcccagctacttgggaggctgaggcaggagaatggcttagaacccaggaggcggaggttatggttcatgtgaaagcactttatttgtatttacagtaaggtgggaagtgtcctaactcccattttacaagcatggaaatacaggcacaatgcaaaaaacaaaaaaacagaaaaaatagaaawggctaaatcacagagtttcttacctttacctcttctgcattttcttggctggagctgaatcttttttggcacatttatgatttagaaaaccatatggtgagattttgtcttctcttttgacttattgatttgggatatctagtaagccagaatatggttttttaagaatactaaaacacagtgttggcaaagatacaggaatacrtgtactctcgtacactgctattaggcaagtagcaaccaggggaaggattaaaaaatgataggaattacagcttacttktaacccayttagccctcacctccactccttaaggtaaaggaaacttcaagtcagggaaattaagttgccagagccacagagctgatgagcggctgagccaggcttttgagctaagcccagttggctccaggacccgagccactgtattgrttatctgccgccacgtaacacatacctccagatttagcagattgggatcctatgtttattatctcacagtttctgcgggttgggactccaggggtgacttagccagatcctctggctcraggtctgtcatgagggtgtaatggagctgtcagctggggctgtggtctcatatgatggctcaacttggcggttggacgatctactggcagtcccacttacggggttgtggctggattcagttccttggatgctgtcagccagaagccactctcagttccttgatacgtggacctcttcacagagccgcttacaatgtggcaactgctccctcaaagcaagagagggtgccaaaaatggaagcctcagcctgcagccatacccacagcattttcctgcttctccatggtgtctccaccaggtccctgtgaggccattaaagtgacgatagttaacgatctgacatggtgttcccaatggcatcattttatgcctccccaaaattaataatcttatgttggtaaatagaatacagagagtgggagaccacatcaaaattgttatygctgggtagaaaattaaatgtgttttcttttttccatgttgcttattggtatcttcctcaataarcattttatcacaaaataagtggggtggacagttgcaggagcagataaaaaaaattttttaacagaaaagcagagcaaacaactccagttggacttgaccttcgttctggccaggctcaygtacagagctttggctgtttgggaacacgacattcgtttatcactctcggtctaaagatcaagagaacattaacaatgtttgctagctactgtgtagtttggagctaaaaatagactctggcttggcatggccattgagggctgtgagccccagagggccaggctggatggaccattcacatattgtgtctggtcttgtgtgtcaataacatactcttgccttctggatgtgttattttattcaagaatgaaaatgcttgatcattcagtattaattcaaaccggttttttgcatctttgtgatcatgatcaaaatttgcctttaggagaagtgtgttgttttgctgcaaakgtttcattcaaaggctagcactcgatgaaatcaaagatagcctcagttccattcatagcttctaggaaacaggtcagatgggcaaatttcctgctaaccacttgctagctgtgtgatcttgggcaaattaattaacctctctgagcctcagcgtcttcttctgtaatgtaagaataataacatttacctcataggagtttgtgagaattaaatgagataagccatgtaaattgctccagatgattcctggttgttaccctaagtgctcagtacacacttgaatctgcttctgtgtcttcatagatgagatccaagagaaggtttacttgtcccttcaatttttgttctgttctcttgtggtgtattgttatatgtcatcattaagagaatattcattgtaatagtatttggttattttccttttttaaaaatgccaacattgagatatagaaggaaaagcagaagtattgggattgcaagaacctgggttccaatgctgactcttcaactcactagctgtgtgacatcgggaaagtcacttaacatctctgatcctcaactgtaaactgtgaacaacaatactatctatatggttgtatttaattgtggattacttaaaatagatggaagtttgcctaaatagggccagcctagcattttagtaaagactgaatatgtgttaatttccccattccccccctttctgatagcgcagttgcaaacaaacttatggaaaacatgataggarctgatacagttctcggaacagacccatctgccttggacctgtcctcagcattcctggcttgygccccatagckcccagttrgccagttctcaccctttcttcaccacctctcccagctcctgtttccccatggccttgacatgctcattatcgcagttccacttgatcccacgstctccagtcatttctctctggatccattcagccgcagctccccctgtgwactgctcccattcccagtatttccacactccggttcccaagaaatctgattgctacaatgcaatgtcaagacactttctggagaaaagaaaggaggacgcgtgtgtcctcatttaagaacagcttgctaatttctgatttttcattttccccctttgctggaaacaaagcaagatctgcactggtgaagagctatttttatcaaaatatgcgtccctgaagatctagttggaatcaatgctgtccagttatcctgagttctggcaaaggaaaagataaatagtttagtgtaaaaaactagggccgggtacggtggcttatgcctgtaatcccagcactttggggggccaaggcgggtggattgcctgagctcaggagttccagaccatcctgggaaacatggcaaaaccccttctctgccaaaaatgcaaaaaattagccgggcatggtgacgcatgcctgtgatcccagctactcagggggctaaggtgagaggattgcttgaaaccgggatgcagaggttgcaatgagctgagatcgcaccactgcattccggcttgggcgacagagtgagaccctgtctcaaaaaaaaaaaaaaaaaaaaaagtagccgggcgcagtgttgtgtgcctgtagtcctagctacgtgggaggctgaggcaggaggatcacttgagcccaggagttcaacgccaggctgggcaacatagcgagacctcatttctttaaaaaaaaaaaaaaaaaaaaaagtcatcgatatgttctaggacctttagctctcttctaatggaatacttttaggaattccctttttcagatcaaagagaagaaaataaaagstgtttttcttcatccttatataagtatagtgctgtattttaacggtactttatgttcaaaagacagcatgatgttacataattaattcagaaaccttctttgataaccaaagcaattatggaaaattaagagtgattttaaatatgtttcaaaatctcatagctttgtatagttcgacaagctatctgcatgtgtgtctctgtgtgtgtgtgtgtstgtgtgtgtstgtgtgtgtcacgggagatcttggcacatttcttaacttctctgagctttagagtcccctcttgtgtaatggaaacagttatatatatatatatatatayacacacattttataatatattatataatatatattttagttataatgtattatataatatatattttagttatagtatataatatgtattttagttataatatattatgtaatatataytttagttttaatatataatatattttagttgtaatatataatatatattttagttatatgatatatattttagttataatatatatatattttagttataatatgttatatattttagtgatatatattttagttaaatatatgtagttatataatatatatttttgtttattatatatatgaagatgaaattagattatttatgtaatttatataaagtgtccactgattccctagtttggtacaattatggcaaccccagtaagaggaactaacatttcccaaccaccaaatagtaccaggaaggtgaaagatcaagagtaacactgaagggatttctaggggttcctgacagtaaaccctcacacacttgtcttggatacaccgcacctgtctttcactcagggatcagcaagkcttgggcttgagctaccctttgtgtttcagcaacatgtggagctaaaaagattgtgggattcacccrggaaatcaaacaccctctgtaaactcattacacattatgtggaaaatgtgaaatgcattcaaacaaatgatgggtgaccatgtattagtctgttcccgcaatgctacaaaaaaaaatacctgggattgggtaatttttaaagaaaagaggtttaattggctcatggttctgcaggctttacaggaagcatgatgctggcatgtgctcagcttctggggaggcctcaggaaacttccaatcatggtggaaggcaaagggcaagcgaggtgcctcacatggtaggaataggagcaagagagcaagcagggaggagccacacatttttttttcttttgagatggagtctcgctttgttacccagtctgaagtgcagtggcacaatcttggctcactgcagcctctgcctcctgggttcaagcgattctcatgcctcagcctccctagtagctgggattacaggtgcctgccaccacacccggctagtttttatatttttgatagagacgggatttcgccatgttggccaggctggtcttgaactcctgacctcaggtgatccacctgcctgaacctcccaaagtgctgggattataggtatgagccacggtgcccagccagccacacacttttaaacaaccagacctcagccaggctaaaaatactaaaattagccgggtgtagtggtaggcacctgtaatcccagctacttgggaggccgaggcaggagaatcacttgaacctgggaagcagatgttgcagtgagcccagatcgtgtctctgcatgctaataccatgggcatctttccatatccacaaatatttaagatgtcaacctcaaaacaattaatgggtgcataatattccatgaaatggttgactatgccacattctgcttagctgacctccggtgctggacatgtagrttgttttccctttgttttttgtttgtttgttgagacagygtctcactctgttgcccaggctgaagtgctgtaatcatggctcactgcagcctcaacctctcaggctgaagcaatcctcccacctcagcctcccaagtagctggaactaaaggcatgtaccaccacgcccagctaatttttgttttgtggtagagatggggtttcaccacgttgcccaagctggtcgtgaacttctgagctcaagggatccacccaccttcgactcccagagtgctgggattaccggaatgagcgaccccatctggccctctttgctgttaaatagacaatatatgatgaatattgtctacctccatctttgtgtactggtcccattattttcttaggatgaatcataaaaacgagattactcagttgaaagcaatagaaagctggcatcagatcaggcatggtggctcacacctgtaatcccagcactttgggaggtcaaggcaggtggattgcttgagcccaggagtttgaggccagcctgggcaacatggcgaaaccccgtctctactaaaaataccaaaattagccaggcatggtggtgcgtgcctgtaatcccaggtactcaggaggctgaggcagaaggatcaactgagcctttggaggtcaggggtgcagtgagccttgttggggccaatgcactccagcctgggcaatagagcaagactctgtctcaaaaaaaaatgaataaataaatacaaagaaagctggcatcagcttgtactcatgccagtaaaacaggagcatgcctatttgcctacaactttgctgacactgggttttcccttttttaaaatctacagtgtccttgtggtggcccagttggtctgtccagacacagtgttctggggtggtctggctgggatgaggctaaggtcctggcactacctctgttagggacattgggcatctgtcagggcagaatcctcatgatctctgctgtcaccagggatttctcattgtctttgtttactgcaggatccagacacattagtcaagctgcagccaaagtcgacgttgaatttgattatgatggrcctctgatgaagacggaagtcccagggcctagatctcrggtgagttgagcrcacctgagtggggtattttggaaaagggaaaaaggcgcctaagaagcaaaagcacagncaagcttagggacctgtattgattgtcagctgctttcagagagttcaccaccagagatctgagatactcaatgaggccattttgccatacaaagccaaagaagggctgggcgcggtggctgacgctgtaatcccaacactttgagaggttgaggcgggcggatcacttgaggtcaggagttcaagaccagcctggccaacatactgaaaccctgtctgtactcaaaatacaaaaattagccaggagtgatggcggttgcctgtagtcccagctactcgggaggctgaggcaagggaatcacttgaatctgggaggcagaggttgcagtgagcctcctgagtagctgggattttaggcacgcaccaccacgcctggctaattttggtattttgagtagagacagggtttcactatgttggccaggctggtcttgaagtcctgacctcaagtgatccacccgcgtcaacctctcaaagtgttgggattacaggcgagatggtgcctctgcactccaacctgggcaacagagcaagactctgtctcaaaaaaaaaaaagaaaaagaagccaacgagggcatcacagaggagatgtatcagttttmtcctaccacagtaatgcttcataacaaacagccacaaaaatcccactagcayagagcaagccaattgctcgtgcatttaaggttcattgggagttgggtagacagctctgttgrgcagacagctctgttgggctcacctccatgcctgggggacagctggctgttggttgatctaggttaggygtggcttgaatcactgcagtgatttggttctgctccatgtgtctgccatgctccagaaggctagatggggcttgtcctcatggcaatggcaaaggtgtacaaargcaagaggagaacatgstatagttctgctgaggcctgggttccgcatgggtccgccatcactgctgcctccttctgctggccaaagcmmgtcatagcttgccttaagtccagagtcaagggctggggtacaacatccaaacaacagtgaaagaacatggcaatgttacatggcacagggctcagagatcaaatgcccacctttctaatgcaaatttattttttctttgcacattttgcatattttgtccataatgtcttttttttactgtcaaaacatacttcttttgtcattgcaactattttataaatccagaaatctttgtactaatataagtgattgtagttattttggatagtgttttgctaacaaaacgggagacattttaaatgcatrtttctattggggagatagattttaatctagtagtagtaaaattcttggaatactttttcatattcttgtcatgaatattatcctgtatttttattkgaaatatataattttatgacactaactgctaacatctattttatattgaattacttttggaattgaaatctttgtaatatcaaagcggctagtktctaattccctgtttctgtataggataaagtacaagtggtttatggastgtttggattataattataaatggttctttgatatgcaagttaatattttcagttatttatattcttaatgaagtgttaacaccttttttcccctaaataacagagaatctgtttttatggacactagataaacaccttcagcttaagattttcttgctaaatattttagtttattttatctttcaggtggctgaatttccagcctgtctatcgtactagtaatttaagcgtgtaatggaatagttkcctgccaactatttatatcaagtaattttaaagtaatatggttgactaataaaatatttagttattggcaaaagaaaaaaatgccaagacttrggaaaacatgaaagattttaagctattttggcaagagtgtggacttgctataatgcttttgttgttcttgccygcaggagttaatgaaacagctgaatataattcaggtaagtgaggaggaggtaactttccttctgttgcttctttatcacaattgagctaaaagacagatgcttaatctgttctggctcttttttaaaaaaaatgtagttgacttttgttctaaacattttttctcatwtcctttgtgatttcttctttgacccrttagttacttacatgatgtttaatttctacgctttggtaaatttcccaaatttctttctgttattgatttctagtttcattccattatggttggaaacatatttttgtgatttcaatcctgttaaatttattgagcctttttttatggcctagcgtatggtctagcctggagaatattccatatgtacttgagaagaatctatattctgctgttgttgggcagagtgttctatagatgtttcttaggtctggttgcttttagaatattgttcaagtcttctatttccttgctaatcttctscctagttgtcctatccattatggagtgccagatgttgacatctccaactattattataaaattgtttttccctttgattctgtttttgctctgtgtattcagggctctgtttttgggtgcaaatatgtttataattgtcatatcttcttagtggattgaccctttataatattctctctttctctctagtaatatttttatagtctattttttctgatatgagtacaaccccttctagctttcttatggttgctgtgtgcatcagattcctttctccatctttttactttcaaactatttgtgttcttgaatctaaagtgtctcctgtaaacagcatcgagttggttctttttatccagtctgacaatctctgccttttgattggattgtttcatccattcacagttaatgttattattcatatggttgtgtttacagctgccatttattgttgttctctatatgtcttctgtcttttgttcttttgttcctctttttttttttttttagacggagttttgctcttattgcccaggctagagtgcagtggcgcaatctcggctcacagcaacctctgccttccggtttcaaacaattctcctgcctcagcctctcaagtcactgagattacaggcacccgcctccacacccagctaatttttttgtatttttagtagagatggggtttcaccacgttggtcaggctggtctcgaactgctgacctcgtgatccacctgcctcggcctcccaaagtgctggattacaggcgtgagccaccgcacccggccttttttttttttttttttttttttttttttttgagatgaagtctcactctgtctcccaggctggtgtgcagtggcacaatctcggctcactgcaacatccgcctcctgggttcaagtgattctcctgcctcagcgtcccaagtagctgggattacaggtgcccgccactatgcccggctaatttttgtatttttagtagagacaagatttcaccatgttgaggctggtttcgaactcctcacctcaggtaatccacctgcctcagcttcccaaagtgctgggattacaggcgtgagccactgcacccagcccttttgttcctcttttaatgtttttgttttttatttgagatggagtctcactctgtcgccccaggttggagtgtagtggcacaatctaagttcactgcaacctccgcctcccgggtgcagtgattctcctgcctcagtcttctgagtagctgggatcacaggcgtgcaccaccacgcctggctaatttttgtattttttagtagatacagggtttcaccatgttgcccacgctggtcttgatctcctgacttcaaatgatccacctgcctcggcttcccaaagtactgggattacaggcatgaggcactgcactcagccctcttgtgatgttactcattttgcattaagtgagtactttgcagtgtaacatttttatttctttaatgattactacatattttagttttctttgagtttgctctaaggtttaccatacatatcttaacagaatcgacttcagatttgtatctctttttttgttctgatgtataaaacacatacagaaaawttcataaaaaataaaatcacagcttactgaactattataaagcaaaccacccatgcacttagccaaaacaagaaatacattgctggcacccasagatgcctctgtgtgtccacagatagtcaygatatggtgtacttcactgattcaagcttaatcctaaaagcccaagaatctagggagtggcagtgagcctgagttggtcttttctttctccaagaatgcagaggctgtgcattttttctgcaattacgaagagagccgaggcaattacctggttgatgtggacggcaaccgaatgctggatctttattcccagatctcctctgtycccataggtaagagctgggaaatcattccttggatataacctctgtttctgtctctcctagtcgtggctatccaggtattaggatgtggcttccagcaggcacatcccagagtgttgcctgacacttcacccaagggtaggaaaaaaataaataatgtgtaaagggtatattattagacatattatatgtcctctctcatctactccttccccaaattccacagggtaagtatgtattaatatccccattttgcagataggtaaacaaagcatagaaaggtttggtaccttgcgtaggaatcatagctagaatgcaaacccatctgtgtgaccacagtggcacccaggtaggtgtcttaggttgagtttcctcgaagaagagcctgaggtggggatttcctttttccctgcttttttttttttttttttttttccagacgaagtcttgttctgtcgaccaggcgggagtgaagtggcgtgatcttggctcactgcaacctctgcctcccgggttcaagtgattctcatgcctcagcctcccaagtagctgggattacaggcacacgccaccatgcctatctaatttttgcatttttagtagagacggggttttaccatgttggccagggtagtctagaactcctgaccgcaagtgatctgcctgcctcagcctcccacagtgctgggattacaggtgtgagccactayacccagcctaatttttttattttttgtagagatggtggtctcactatgcgctgcccaggctggtctcgaactcctggactcaagtgatcctcccaccttggcctcccaaagtgctaggatttcaggtgtgagccactgaacccagccagaggtagggattcttgggcaggttattgattgagggagagctctcaggagaaaggggaggaaaggaaacagcctggggcagggggaataagctaagaaggatgaggtcttagctagaactatccacagcctgaccccacttcgggctctggtgcatacaccacaccccagagttggtctcagactgaagcaaagggcctggctttttatgacccttcaccagccagtcatcgcccatcagctgcgagaggggagaactygtataatctcctcggaaaagtggcttccatttgccaagggcgattttccaggcaaggaggcagctggagttattatcaatcaacacacacagcagctggaaaacggtgacctgcccagtaaaagtgacctcggtgggatgcccacagcgtctgcctccccagcctcgcctcccagccatatagagtgttcactcgctgtataaaagggcacacagacaggatggacagggctaaattggaaatgcaggtagctgytatttgcagcttggatggttaatgtttctttggctgatggattcctggctacattgagtagtccataggctgtgtctgatgaagcctgtcccttcacaggtaatgctggttcttctgctgcagaagagcccggggcatcctccgctccccatcagcacctccctttggaccctgctcagaagcctggagcctttccctgagacccagccttggctgtcccccctcctcttcttcccctgctcatttcctcacacctatttatttsccactaacatgagattagacagtaagcggatgactcattctttgggggaagtccatcattcaggaatgcctcagctatggaaggcattttggagacaagaatttaaaaaccccatctcccctttgtgtgggagtggaagggatgggctcttgagttgtcctgggttcaaatcctggctctactatatattagctgtgggactgtgacccacccccgaggactccctcagtctgaatgcccagctagccactgtgtgcatgaaggtcagggaatcagattagcagcatttgtttaaaaaactagaagtttggtcgggcacggtggagcacgctgataatcccagcactttgggaggccaagggaagaggattgtttgaggccaggagtttaagaccaatctgggcattatagtgagaaccaaccccaatctctacaaaagagttttaaaaattagctagtcatgctggtgcatgcctgtagtcccagctactctggaggctcagtcaggaggatctctggagcccaggagtttgaggctgcagtgggctatgatcactccactgcactccagcctgaggcaacagtgcaagaccctgtctcagtaaaaaacaaaaacagaaaaattctagaagttctaaaagttctctctctggccacctgtcctcccrtatctgtagtctttgaaaagatttttttaagttaatacttatagagaatttactatgcacttggcatattgccaagtgccttatacattatctcattaaatggctacagccaccttggagtagggtcttctaacatcacctccagttgactgatgggcccgagtctcaagagcttgcaggattttcctggcatacacagggagtccaaggctaagccaggctgtgcacaaacaactctctgcctcccaagcttattcttttttttttttttttttttagacggagtcttgctctgtcgcccaggctggagtgtagtggcatgatctcggctcactgcaagctctgcctcctgggttcaagcgattctcctgcctcagcttcccaagtagctgggactacaggtgcccaccatcatgcctggctaattttttttgtatttttagtagagacagggtttcaccgtgttagccaggatggtctcgatcttctgacctcgtgatccacccaccttggcctcccaaagtgctaggaatacaggcgtgagccaccgcgcctggccctcccaagcttatttctatggtagctgccttgcagaygcctgcccctgccctgccctgaaatgtgggggtcccacagcatagaaagcccaaggcaggatttccctgatcagagggaccagctccgctttcatctcttcttcagaagccagtaaggcacgccacatctgaggcttaatgaggtctacctggaacaggcttagctctccaaaggcagaaaagtcatgaacacacaggcagtggtgataaggarccaggacttaaagacctttggccccgaaacagttggagaaacccagagtgttcctttcttgagtaaggtgtacttttcagtcttggggccagcgtgtgttggagtaggatgggggagtgccagggatgaatgttaaccaccttggtccccctccaaggctctctcatccatcttctcgaccagacagagtggaaccccaaggcatttcaaatcactttcacttttctattctattagcagaaagtctccccygggtgatgccaggtctttaatacctgtctccactggctgatctcttactgtggaggagtgcgcggcccaggctcagaggcttgggcaggcaacagaaagattgttcctactgcattcaacctctggccacattgacataaagtctcctttcaaagcaaatgtatttggatggacacagtggctcacgcctgtaatcccacastttgggaagccaagacaggaaaatagcttgagctcaggagtttgagaccagcctagccaacatgttgaaaccctgtctataaaaaaaaaaaaaaaaaaaaaaaaaaaaaaaaaattagccrggcatggtggtgcayacctgtaatcccagctattcrggaggctgaagtgggaggattgcttaagctagggaggttgaggctgcagtgagccatgattacaccactgcactccagcctgggcaacagagtgagaccatgtctcaaacaaagaaaacaacaaaaagaaaaggttcaaggggtggattctgagattagccggtgactggtagaaggaagagggggtggtctggaaagtcctcaggcatggacagttatatccatgctactgcagcgattgcatgttcaaattcagcaggagttagtgtgaaccttgtggtggaaattcaggccatgatatcagcaagctcgttttgcacaaactccatttgaccatcttggtcccaacagatttcagctcgtttctccttgatctcataagcagagagagtttcagcattttcagcaagttgatttctttctttctttctttctttctttctttctttctttcttttttttttcttgaaaacggagtcccattctgttgcccaggctggagtgcagtggcacaatctcagctcactacaacctctgcccccctggttcaagcgattctcctgcctcagcctcccaagtagctgggattacaggcacctgccaccacgctgggctaatttttgtatttttagtagagatggggtttcaccatgttggccaagctggtatcaaactcctgagctgaagtgacccacctgcctcggcctcccaagtgagattcctttcttatctgctattcttcaaactcgagaatttctgttagttactggcttcttactctttggggcacagtttcagcttttcagcacgttctttctttcttttctctgctttcctgtaagcccaagaatatagtcgttgattcgtttttgtttttttttaactctytgaggcatggtgtcaagtcctggttggccccactggctgccatgggtgtactaaccctgaggtgggtctcctacgcctccctccctctggtcttctcgacagggaggkccaggtgcaaccacaaagtgtcccgggcctgtggagtggcatcaccatggacaggggactctgtgtaggaggcagaggtgggaatgagcattgtccaccatcactggccacagaggtgatgtggccacttcccagggcttcaagacacatgaaagtgaggatgcattcatcagggtgagagctgtgatttttagaaactcaagtsaaacaaatgaggtcggctgctgagttcttttctcagagagagaccctgctgccctgttgtgctccaaccttatgtgtaattatctcccagtactgactgggagatgacctgcagggcaggtgcattaatwaccaggagatagacaatggcttgacttcaggccgggttcggtggctcacacctgtartcctagcactttggaaggccgaggtgggtggatcacttgagggcaggagttcaagacgagcctcgccaacatggcaaaacctcatatctactaaaaatacaaaaaaattgtggctgggtacggtgactaccgcctgtaatcccagcactttggraggccgaggtgggtggatcacgaggtcagcagattgagaccatcctgggtaacacgatgaaaccccgtctctactaaaaatacaaaaaattagccaggcgtggtgatgggcgcctgtaggcccagctactcgggaggctgaggcaggagaatggcgtgaacccaggaggcggagcttgcagtgagccgagattgctccacttcactccagcctgggcaacagagcgagactctctctcaaaaaaaaaacaaaattagccaggcatggtggcacacacctataaacccagctactccggaggctgaggcacgagacacgagaatcgcttgaacctgggaggcagaggtcacaacgagccacgattgtgccactgcactccagcctgggcaacaaggcaagactctgctgaaaagaagaggggaggggaaggaatgggagcttgacttgttaggggaggccaacatgcgatagaatggttaagaatgtctttcaaaaagccctagaagattacaacaatcttgcttgagtttaacataactacagagtaattcttattaattaacrtcaaacatttttattttaatttttttctttttttatttcttctttttaaaaaaaagggatacatgtgtagaacctgccggtttgttacataggtaaacgtgtgccatggtggtttactgcacctattgtctcgttattttaattttaatagagtggggaccagtgcctttcctaagcctaatccccatctcaattcctctctcagaagcaacctgcttcttctagagagatactcagtgcgtgcgtaagcatacacatatcctgtgtctctccttcttcacttagcagatctcagagattattctaactcagcacaaataaatctctctcacccttttctacagctgattcgttacattagaaggcttatttccctgacccactactgatggatgttaggttgctttcaagtcttgagatatgagagtgtcacaattaagatccatgctcatagatctttatacacactggtaggataaattcatagaagagcaattgctgaatccgagtgtgctaagccttgttgtgcaatgtcaggcccagtctggatggtaaatgctgtaggactctgggaataagcagatgtgtgaaggcaggatgaggcatgcgggtcacagattgcaggtggcatcactactcgctcagtctctgagcaaacatttgtcgagatttgactcagcccatgggcgctgggaaggaaggtgaggatcctatctgcaatccagcactagggcctgttgaaccacactccccagccagccccaggcttgaaattttcttgcatttatctccctttttatttatttatttattwaaatagagtctcactgtcacccaggctggagtgcagtggcgtgatctcaactcaatgcaacctccgcctcttgtgttcaagagattcttctgcctcagccccccgagtacctgggattacaggcacgtgctacctcgcccggctaatttttgtatttttagtagagacggggattcascatgttggccaggctggtctggaactcctgacctcaagtgatccacccgccttggcctcccgaagtgctgggattacaggtgtgagccaccacacgtggcgcatttatctcaccttatgtttatgtagtccagtaggtctcaaatctgaacaagcatcagaatctcctagagaatttgttggatttctaggctgccccttgagagattctgagtcagggatgttaggtggggccccaggaatctctttttgtcaacaaaggataaaagaccctttggtttttaaagagagttggggggttggaaaggaagggagagggaaggagaggtgggaggggcatggggaacccttggatgcaatgaggtctctaacaatactctcctgccctcaggttacagccaccccgccctgctgaaactcatccaacagcctcaaaatgcggtaggtcttggggttacacagaagaaagacaaaatatgttcatggccattcacagaatcactgggcagactttggcaatagtcctttcattcattcattcatttcataaatatgtattgagcccatactatgtgccaggtatgtggcatgccttgatgaatgaaaacgcagtgccgacattcccacggaggcagtcaattaaccacacacatgaatagagaattgcaacaatattaagtgctacagagtaaggtaggcagcgctttgtgggcataaaagaatgatgctaatagttaatgtttatggagagcataatttgtaccaaacactgtgttcagcactttatagcgacaatattgacaagtctgtgaagcaggtacttttgttatccccatttttcagatgcagaaactgaggcacagagtggttaagtatttgcccgaggtcacacagctagtggaggcgctgagaataaacccacaggagctgagctatttggggatggagagggtgggtgtcagggaggcttcccagggaaatgacttttcagctgagatctgaaggagaggaaggtctggcaggccacgagtcgggaggaatggtctcagcagagagaagagggcagcggcaagggcagcagtgtggctggagcagagagagtggggagggacccaaggaggactggagtagcagcagggcacagggttttcagacgccacctaggccaggggttcagaactctcacactgttgacatccgtagccagataattctgtgtggtggggggctgtcctgtgcattgagacattgagcagcatcccaggactctacccactaaatgccagtagcaactctctcctgaggttgtgataaccaaaaatgtctgcagacatggccagatgtcccctggtggatacrgtaaccccacgtgagaacccctgcaatacawgacacctgtytctatccgaagagagatagagagccattgcacatttatactaaagaatatggccaggcacggtggctcacgcctgtaatcccagcactttgggaggctgaggcaggcagagcacttgaggaaggtcaggagttcaagaccagcctggccagcatggtgaaaccccgtctctactaaaaatacaacarttagccaggtgtggtggtgtgagcctgtaatctcagctacttgggaggctgaggcaggagaattgcttgaacccaggaggtggaggttgcggtgagctgagatggtgccactgcactccagcttgggygacagagggagactttatcccaaaaaataataataataataataataaataaaaagtacaacacccatgcaggcatgcatacagcctaaatgcaccactcaatgaatttcccatgtaaccaawgtttcacaactctttttgttattggaacatcccttaaggagcatttttagacattattttcctagttgttccctatcatgaaattgaaatagaaaaatacagtacatatggagtgtatctgtgtgttgtatttatgtccgtgctttacatggaacagagtaaaaawttttttttttttactcccactgagaatgcatgagttgtaatgaggaatcagaacatgcccccacccagttattattccttccaaccaaattaagtagacccctccccttacttttaacagattgctgtatttctccagttttgtttgcttgtttttttcttgagacagagtcttgctctgctgcccaggctagagtgcaggggtgcaatcatggctcactgcagcctcgacctcccaggctcaagtgatcctcccacctcagcctcctgagtagcagggactacaggtgcccaccaccatgcccagctcatttttggttttttgttggtttgtttgttgttttcttttgtttttggtagagatggggtttcaccatgttgcccaggctggtctcgaactcctgggctcaagtaatcctcctgcctcggtctcccaaagtcctgggattacaggcgtgagccaccacacccagttgtatttctccagttctttattgccatgtaaatggagttttgcagtgtgtatctttacctcgtctggcttatttcattcaaaattacgtctgggtgattcctcctggtgtgtgtaatcgcagactgtgtatcctcatggctttagagcgttcccctctgcggatatcctgcaatcctactgtccgtgggtatttgcatagctccagttcagggctcttatgaagaccactgctgtggacgttcgcgtgtgtgtgttttgctgtacccatttatgtgtttctgttagacacgaagcttggagtagaactgctggccatgtacagctcctgcagatcctgccagacagttctccaaatcgatcgcaccaactccactcccacagccgggggagggttccagtcttgccacatcctcgccaacacggggtatcactggaagatttttctttgactcagagagtaacatacttatccacacatgacaaggaacttgatcccagaaagaaatctaagaaaggcagaaggaacaaagacccaatcctggtcagaaaaggggtccctagccctaaaacgtacttcactttaaataaacagagttggagctaataggaaagaaccacattttcttctgtctgaatgggtgtgcccygcctgggaggggccaggggacactcttgcctccgattagttgagaggtttaggagctgcygtatagggaactggtgtcctcctgaaggtgtctgatgaggcccactgmggccggaggctcccgaatgtgtttacatctaaagcctggctttgttttgaaatgttgtgcgaatcccagatgccttggcagttggtgctgaaaaaaaatgtgtcaacaaacacatcagacacatttgcagtgtcaaccgcctccagaggcagaagcgtcctcaacaacacacgacgtcaaggcccagagattccggctgcatgtggtggctcacgcctgtaatctcagcactctgggaggctgaggcagaaggatccctgaggccaagagttggagaccagcctgggcaacatatcgagaccctgtctctacgataactgtttttaaaaaattagccaggtgtggtggtgcatacctgtagtcccagctactcaggaggctgaggtgggaggatcgcttgagcccaggaagtcattgcagtgagccgtgatctcgccactgcactccagcctgggtgacagagcgagaccttgcctctaaaacaaaacaaaacaaaacaaaacaaaaacatatcccagaaaacaaaggcccagggattctgatttcagggacagtactaccctgtccctgccaggagcttcccccaccttccctatccccccatcacctttcacctctctcccccctctcacctcgtcagggactggtcctaaccctcacatctcccacttggctttctgccagcaacctctccccatcgatccctcccacctcccttctcaycccytccaaaccgtccaccaaactgtgccgcgtgtggaacccttccctggtacttactgccttccggctgtgtcccartctcctccacctcaaatgctaagcccttggagggctgcctcccactttcttctttagccttattacttgacatttgctcattcattggttattgactgaatgcttccaatgtgccaagcactctttttggtgctgggatttgatggtgaatccacgttctccgtcccagtctgggttgggttgttctgcagaggaactgggtttgaggcctgatgaaaagagcaccctgacgcagtcttagagaggtggcagctgacctccacgggctaaaaggtttccagcaggacatgcccagggcagtaggccggggcaccactggctgacatcttgggtcttccgcatttttggctggagatgcactcaggtggtggcaatggtattctgcttgtacagggcaggttcctgccaggtcaccaaagtcycaagaaggggtttatcaacctttttgcacccaaaccaaaccaccctgaaactccaccataattacttcatgtgacttcctaaaaatgaaaccatgtcccttagatctaatatctggattccaattatgatttcttttttcttcttctttcttccttcttcttccttctccttctccttctcctycttctccttcttcttctttcttctttctctctctgtcacccaggctagagtggagtggctggatcatagttcattgcagcctcgaactcctggactcaaaagatcctcccacctcagcctcctaagtgactgggattataggcgtgagccactgtgcccgacctccagttactatttcttatgtcaccaggcccatctcattacattgccaacaagttatacaataatcatggacattgcatgtgcacagtcacattgcaatgaatgcacatagcacagcaggcctgaccaagtaagacacctgccatcctatgacctstgggtctttccctctgcataactcttcctttgagactgaactcctgcatcctctgtatgscatatcatctcactggcttcttacaagcacctagtgaagagtctccagtttggcagatgagaaacccaaagctcagagaggttaagtgagttgcccaaggttgcacagccacttaagccaaagccaattatcttcatgctgtaccctaagcctgttgagctgactgcaagggtttagaaagctatcctcatttgatcctgatacccaatgtcccagatatcttctgttcttaatgtcacgctttctcgagcaagaacatcacccccacgtcgttcctagacccagacggctgtcaagctgccagccagccctacccttctgggagccatttccctgctgctagtgagggccagcttgcttccaccctattctcatgatgtgatttcttaggagccccactaacaggtcagagccagaaggaaatgttccttaaagtcccctccaaggttgggcacagtggctcacacttgtaatcccagcactttgggaggctgaggcaggcagatcacttgagtccaagagttcaagaccagcctgggcaacatggcgaaaccctgtctctataaaaaaatacaaaaaattagctgggtgcggtggcatgtgcctgtagtcccagctacttggaaggctgaggtgggaggatcacttgagtctcggaggttgaggctgcagtaagctgatatcacgctactgcactccaacctgagagagcaagaccctgtaacaaaaaaaaaaaaaaaaagcccttccaggcaagccaaggtctctgggttgtgccaagcatgagcattttcgggcagaggctacctggagtatctgacagagagtggcatctaaagtcagtaaacctagatccgarttgtggttctgccccttcttggctgtgtgacttggggcaagttgcttgacctctctggtcctcagttcccccaactctacaatgaggacaattaacttccctcactacttatcctagacccaactgagtgatcgtgaagcagaaaaagcaagaggtaggaatctgccagtttctagcagcacaagtcaagtcctaaagctactgggagaatcatctctgggaacccctctgcccttagggtgtcctatacagtgatgctggtttttggatttgcactgagtgcattacactgattttgcccaagacactctttctctactccaaaagtccctttttgtatttttagcagagaaaagstttcaccaygttggccaggctggtctcgaactcctggcctcaagcaatccatccgcctcggcctcccaaaatgcagggattayaggcgtgaggcactgcactctgcctgttttttagccattctgatggttaaatatataaagaaagagactcacgggaagttgcaaaaaccagtacaaagagccccatgtacgcttcgctcagttttccccagcggcagtagcatcctatataacgccaatgcaatatggcwaccaggacactgacccttttttaaaacatccacagcaatcctrgtggatttctctaaaggtttaaggaaaccggccatgccccackctgacagaacgtcatcatcctgcaaccccatttggaggctatttgaacacaggggctatgaaaagcaccatttgtgggcagggagctgggtcaggcccccagaagtcaccatttgtctcttgcccttttgcagagcatgtttgtcaacagacccgccctcggaatcctgcctccggagaactttgtggagaagctccggcagtccttgctctcggtgagttctggagaagcaatcccattgtcttcagacgtggtactggcaggggaagggaaaagtggagacgccaacaatgaagaataaggtgttgctacagaaatctttctctctgagcttattcttccatgcagagtattttaaatttttcttttaaaggacagaagggattctttgtgtgcaggacaaaaggagctggggaaatgaatatgtgtcgcatgataggagccttgcatatgtcattcaatcctgcccccacttctcggttttagttactacaaacgattaaagccattgggagcctcaacgtcccgcctggaacgtgtaggtgtcttagacagtggcaggtgcatcaggagtgggcttttgccccccttctttcctctctgccagcctcagggcctccctgggcttctccgccacccctggaaaagcctgagcccaccctcccagtccgacaccttccaggacagccctggttctgtctgtccccggtacggcccctgcgaagattcagctccagccaggggaagcgggaggacaggagtcatgatgagcctgggctcacggctawttccctccccacaggtggctcccaaagggatgtcccagctcatcaccatggcctgcggctcctgctccaatgaaaacgccttaaagaccatcttcatgtggtaccgggtgaggtttggggcacacacacacacacacacacaggctycccagcacccagccacacgctcaccccttgtctkactgttcattccaatgggctggagtattagacatcagtaccagggttaaaatacagggagggccactgctggatggtactttgagacggcacagtggggtatggtgcagagggctgaggctttggcatcaaaactatgcaatgggggctgggcgcagtcgttcacacctgtaatcccaacactctgagaggcaaaggcgggcagatcacttgagcccaggagctcgagaccagcctgggcaacatgacgaaaccccatctctactaaaaaaaaattcaaaaattggccaggcatggtgacgcatgcctgtagtcccaactattctggaggctgaggtggaaggattgcttgagcctgggaggtcaaggctgcagtgagccatggttgtgccactgcatttcagcctgggtgacagagtaagaccctgtcwcaaaaaaaaaaaaagaagaagaaaatgctccttaaattcccctccaaggttgggcacagtggctcacacttgtaatcccagcasttygggaggctgaggcaggcagatcacttgagtccaagagttcaagaccagcctgggcaacatggtgaaaccccgtctctataaaatatacaaaaaattagctgggtgcggtggtgcctgcctgttgtcccagctacttggaaggctgaggtgggaggatcacttgagcctgggaggtcgaggctgcagttagctgatatcatgctactgcactccaacctgagagacacagcaagagcaaggagcaagaccctgtaaaaaaacaaaaacagaaacgaaaacaaaaacaaaaaaaacccttccaggcaagccaaggtctctgggttgtgcctctaggttattttatttaaatatttaaatttaaatttatttaaatattctaaattgcagagacagagtcccactttgttgcccagcatggtctcaaactcttggcctcaagcaatcctcctgtcttagccacccaaagtactaggattacagatttgagcccgcacatctggcctccattcttcctggcaaaacatgcaacgctctcagcagatcttaatccaacagatcttaatcgttgctgatggtgcttaatgcattatgtgtgttagtttcttttgttgcgagcacagttggtagcctcacgtttcagtacagacctgcaacaattaatacatgagatccactcctgagaaagcactttctacttgtctggactgaatatcggtttsgttggaaagatgaagccccgactaccccagagcatctctgagattttgttctgttctattgtttcagagcaaggaaagagggcagaggggcttctcccaggaggagctggagacgtgcatgattaaccaggtragtgcagctgggcttgcaccacgtacatctggggaagctgcacagcctctcccgggctgttgctggctggctggcactgtcctcaattaggaagggccaggccaggcgcggtggctcatgcctgtaatcccagcactttgggaggccaaggcaggcggatcacccraggtcaggagttcaagaccagcctggctaatatggtgaaaccccatctctactaaaaagacaaaaattacccgggcatrgtggcacatgcatgtaatcccagctacttgggaggctgaggcaggagaatcatttgaacccaggaggtggaggttgcagtgagccgagatcacaccactacactccagcctgggtgacagagtgagactcctctcaaaacaaacaaaaaaacaaaaacaaaaacaaaagkccggctgctgtggttcacgcctgtaatcccagcactttgggaggccgaggcgggtggatctcccgaggtcaggagttccagaccagcctggccaatatggcgaaaccctgtctctactaaaaatacaaaaattagccagaygtggtggcgggtacctgtaattccagctactcgggaggctgaggcaggagaatcgcttgaacccgacgggcgcggaggttgcagtaggccgagatctcaccactgcactccagcctggcgacagagcaagactccatctcaaaaacaaaacaaaacaaaaaaagtacaagagggtttctggaatctgtgggaggagttcttagggtttttcccagaggtctcagggaattggtgctcaaccagcctgagacaatgccaacctccttgagacttgggggcccccacagttccctctgaggcacctccagcagttctgcctgaatcagctggaaacatgtttggattcccttgctgggtgaagagtcagaaaacaatgcaaggagttgcagctgtgccatttgcttggggctggaaagggacagggcgtccatgcacccctcctgaacccaaggcgcagctgccatgggagagtgcccggagaggggctcccctcacccgctttctagcaccacagaccccttccaaaggcctgggggttttcctgcaaggtgcccagctcggccccttgccttggtcaccctgggatgcaggcgtgcacccatcagcacctgacccgcctgacacctgaggaggcctgagtagtagggagccaggggatggggaggaagttgaagagcctgtagaacaggggctgaaaacccaggagtccccagcagctggaggtaggcgggcagtgggtactgcttggccacttacagctgccacaggaggaaaatgggtccaaacagtgcagcactggtgagaagccagaagttcaggtctctatgtgaaatttcttggttttaaattttgcaacttgttttgagacagagtctcgctcttgttgaccaggctggggtgcagtggcgcgaactcggctcactgcaacctctgtctcccgggttcaagcgattctcctgtctcagcctcccaagtagctaggattacaggcccccaccaccatgcctgtctaatttttgtatttttagtagagacggggtttcaccatgttggccaggctgatcccaaactcctgacctccgatgatccgcctgcctcagccttccaaagtgctgggattacaggtgtgagccaccacacccagcctaaaatttgtgacttaaaaaaaaaaaaatgtaagtatgtatgcaaataaaacgtgtgtcttggatatagaccccattggtcccatgggtaacttttgcctgagaaggattcctggttcttctgatagatttctgtgtccctctggacttgcaggggcaacaatacagttcccccatccttacaactatgactaatgactgatatttcttggttttaggcccctggctgccccgactacagcatcctctccttcatgggcgcgttccatgggargaccatgggtaaggagggaccattgcgctcccaaggtggcgtttagaatagtaataataacggcaacaatagcggcggctgacattagcagtttacacatattgtcycactgattgcacacaatcccactgcagagtggggattattattcctgctttgcagatgkgggaatcagtgttcaggaagaggargaatttccaaggctattcagtgacagagccgggactggaactcttgactctgtcttcaaagcctgcgctgcatctgtgattaatcgcaatgcaaacacatacccacgcacgcatgccaattaagggttcgagagtcccccttcagcttccggatgagaactggggttcagtatcaaaacatctcatgtactccccaagtatatacacctmctatgcacccagaaaaattaaaaattaaacgataaaaagaactggggtttcacaggcaacaggcctccctgcccactgacagcctygcgctgaaatgtctatcatctcctttacaaagacggtactgcctgcttcccsaagccaagcgtctgcttttctgttttgctgaactcaggttgcttagcgaccacgcactctaaagccattcacaagatcgayatcccttcctttgactggcccatcgcaccgttcccacggctgaaataccctctggaagagtttgtgaaagagaaccaacaggaggaggcccgctgtctggaagaggtaatgctcataccctgcggatcctccccaaccaccagtcctgttgctcttgccgccccaagacttggggagaagagaaacagatgaagggtttatctggggatctgtgcagtgctcccccagagkgaagcagggacacagaggccttgcgtcccaaatrttctatgttgggagagttcgtgagacacactgtttctgtcacagcatccatcacccaactctgataccaatttctgtatcacttaagtttcttggaagacaagagtcaatgactctaaaataagagaaaacagatcagttgaaagaatatggggctgggcacggtggctccgcctgtaatcccagcactttgggaggctgagacgggaggatcacctgaggccaggagttcgagaccagcctggccaacatgrtgaaaccccatctctactaaaaattagctgggtgtggtggcacatgcctgtaatcccagctactagggaggctgaggcacaagaatcccttggacccgggaggcagaggttgcaatgagccaagattgcaccactgcactccagcctgggtaacggagtgagactctgtccaaaaaaaaaaaaaaaaaaraaagagagagagagaaagaaagaatatgggatatcccacaggaaaaaatggttccacaagatcctctaaaccactggttttgtcttctcctgagtcttggggctttgagttgctgtgggtcgggggatgctatgggagaggctgaggacaggcagcacccccctaccccccgtttccacgtcatctaacacagccctctttagatccactcagtatatgggggttccagggaagacattggaagtaatctgcagctggaaaaaaatatcactgtttgggtatagatttgaactcaaataaggctgctggtttttttcttaggcacatcatcattttcaatcagttcatatttattgagcacctactagatgtcaagcaaggtgctaggtgctgggtattcagtggtaaatagaaaagacaagataatggcatcaagtacagcactgtccaatagaaatataatgcaagccacatatgtaattatagcttttccagtagtcaccttttctttcatttttacaccctgcctggaaactgccaaggagtcacatttgctttrttttgttttgctttgtttttgagatggagtctagctctgttgcccaggctggagtgcagtggcgygatctcagctcactgcaagctccgcctcctgggttcaygccattttcctgcctcagcttcctgagtagctgggactacaggcgcttgacaccacrcccggctaattttttgtatttttaatagagacagggtttcaccgtgttagccaggatggtctcgatctcctgaccttgtgatccgccygcctcggcctcccaaagtgctgggattacaggtgtgagccaccgcgccggccttcttttcttttgttttgtttgagacagggtctcactctgtcacccaggctggagtgcagtggtgcaatcacagctcactgcagtctcgacctctctgggctcaggtgatcctcccacctcagcttcttgagtagttggaactaaggcacatgacaccaccacacctggctaatttttgtattttttgcagaaacaggttttgccgtgttgcccaggttggtctcaaactcctgggcccaagtggtctgcccacttcggcttcccaaattgctgggattacaggtgtgagccaccgtgcgtggccaggagtcacgttttttaaaattacaaagaaataggtgaaattcattttcagagcattttattgaaccgaatatattcaaaatattatcacgtaaatgtgtaattagtatttttaaacaatgtgatttttatattcctttttaaaaattcctttattttaaaaattcatttatttaggtctaaacaaactaagatagtccttttcttcgtattcagtttttgaaacactgtgtgtattttacacttacagcacaatgctctaaaaacaaagaaaaaccgggcgcggtggctcatgcctgtaactgcgacactttgggaggttgaggcgggcagatcacctgaggtcaggagttcaagagcagcctgactaacatggagaaaccccatctctactaaaaatacaaaattagccgggcatggtggtgcatgcctgtaatcccarctactccagaggccgaagcaggagaatcacttgaacccgggaggtggtggttgcggtgagctgagattgcgctattgcactccagcctgggcaacaagagtaaaactccatctcaaaaaaaaaaaaaagaaaacmaagaaaagtatctcagagcttccttggggtgactggtggagaccaaggtcaaaatcatatcacccaaacagaggctttttcttaattgtacataayaaagaaagctttcacttgttagtctatctaggtgtacggtttrgggtttttctttctttttttttttttttgagacagagtttcactctcttgcccaggctggggtgcagtggcacgatatctcggctcattgcaacttctacctccygggttcaagcgattctcgtgcctcagccactggagtagctgggagtacaggcgtgagccaccatgcccaactaatttttgtatttttagtagagatggggtttcaccatggtagccaggctggtctggaactcctgacctcaggtgatctgctcgccttagcctcccaaagtgctaggattacaggtgtgagccaccatgcccagcctctttctttttaacaaagacaggatcttgctgtgttgcacaggctggagtgcagtggtgtggtcatagctcactgcgatctcacagtcctggttcaaggggtcctcccacctcagcctctcaagtagctgagactacaggcacgcagccaccatgcccagctaatttctaaatgttttgcagacatgaaccgcrctatgttgcacaggctggtctcaaactcctggcctcaaggtatcctcctgcctcagccacccaaagtgctgggattgcaggtgtgagccaccacacctggcccttagaacagttttttaaccgaggatatatctccgattctgccccaaaaggattctcacaccaatcatagcaataatactgtaagaataggaacaataataatcaataataatatagtcrtgctaatcgtaatagtagcagccaccactttatgtgtgccagactctgctgtattttctctctgtctctgtgtgtgtgtgtgtgtgtgtgtgtgtgtgtgtgtgtgtgtgtgtgtgaatgctctcacctttatttctctcaatatacccgtgatgtagctatttcccacataacaaggttaagtgacaggtgcatgttccatgtaaaacagaggcagaaccacagctaaaacatctggcccagcaatcaactcatagtgctatattttctcattcagtcctctccacgaccctggaaggtggattctgtcagtgtgcccatacaacacatcaggaaagtgaggcttctgaagctaaattacttgccccaatttattagtttgtatccacccaggtgctagcaccgatttcaagtaggatacattcccatccacacacatagcttctaacagaggcttcactggtcttaggaaatgcacacaaacacatttccaataaaattgcatggggctcatcgaaccccagattcccacccacggatactggtcacaagcctctgccatcggtggtcactttcccctttgggatccaggtggaggatctgattgtgaaatatcggaaaaagaagaagacggtggccgggatcatcgtggagcccatccagtccgagggtggagacaaccacgcatccgatgacttctttcggaagctgagagacatcgccaggaaggtcagtggacagggccgaggttggatggagccattgggttttctgggttgagttccccgagtaacgggccagcagcacctctgccttggagcttctgtcaatctccagacttgcagaggctgtctgtcagcatcaggggtgggagaagttggggttggtgaaagaatggggattcttcccttaaactttacacacacacacacacacacacacacacacacacacacayatatatatttttttttttgagacagagtctcactctgttacccaggctggagtgcagtggtgcaatctcagctcactgcaacccctacctcccaggttcaagtgattctcctacctcagcctcccgagtagctgggactacaggcacacgtcaccatacccaactaatttttgtatttctaacagagacgagrtttcgccatgttggccaggctggtcttgaactcctgacctcaggtgatctgcacacctcagcctcccaaagtgctgggattacaggcctgagccaccacacttggccttaaaatctttttaaaaaacytttttggatacataatagttgcagtgcgtaatgatcaaatctgggtaattggatatccatcacctaaaayatttatcawctctttgtattgggaatattccaaatccactcctattttgaactatgcaataaattattaactaaaatcaccctattgtgctactggacactagatcttattcttctatctaactgtacttttgtatccattaaccaacccctatttatctccacctccccattagccttgccagcctctgataggcrtcattcgactctatttcttcataagggaartgtttttagttcccacctgagtgagaacatgcaatatttgtgtatgtgtggcttatgtcacttaacataatgtcctgtagttccatccacgtcattgctaatgacataatttcattctttttatggctgaatagtatttctttgtgtatatgtaccatattttctttttctttttttttgagacagtctcactctgttgcccaggctggagtgcagtggcacgatcttggctcactgtaacctctgcctcctgggtccaagtgattctcctgcctcagtctcccaagtagctgagattacaggtgcacgacaccatgcccagctaatttttgtattttcagtagagacggggtttcgccatgttggccaggctgattggctcagactcctggccttgggtgatttgcccgcctcagcctcccaaagtgctggaattacaggtgagagccaccgcgccttgccgagtgtgtatatgtaccatatttactttatccattcatccatcgatggacagattgattctgtatctcggctattgtgaacagtgctgcaataaacatgggagtgcaggtatctctttgacacactgatttgctttctttatattgtgtgtttgttttaatgtcttgtgcatatataactggcaatcaaaccgataagttcacagataaaagttataagacgtgagttgacttaacacagatgctgagttagaaatagccttggtgacaagcagaacatggcagctgaagtctgagaagcacattcgaggcctcactgttggacacagctccctctgacgaggtcgagacccgagactgaagccagatgacataccgctctgtgttggtgcagggagtatttaatgttctgggtttttttggtccagcttagcagttttaggaaacactcagattcagctctggttggaactgctcagcttaagtgttttgattagttttttttgtgcacagctcaagaacatggggctggtttgctcttcagaaaacaagyacgatgtgtgtggacccagggtttggcagttagctggctatggagggcatgaatttctggcctcccacgggtgtttatttctccctcctctctcttctccggccagcatggctgcgccttcttggtggacgaggtmcagaccggaggaggctgcacgggcaagttctgggcccatgagcactggggcctggatgacccagcagacgtgatgaccttcagcaagaagatgatgactgggggcttcttccacaaggaggagttcaggcctaatgctgtgagttggagccaaccttctctctacatccagggcagagaagggagcatcctcttctcctaactgttcctttctcaccatcgaggagctgggtgggcacttactgggtcgcaggttttctaagtcccagttcttatcaatgcaattagcagtggtgtgccctcccagctctctctgtaaggccaactctggaacagtccaccatcagccttttcctgttttctctctgtgtgcacacacaataatatcatcgacagctgccgcagcagactgagcatttgctatgtgcctagttctaagtatttctcatatacttttaatcctgagaacaatctaaccaagtagctgttatttttatcctcatttgactaatgaggaatcaggcacagagaggttaagtaatttgtcaaaggtcacacagcctgttaagtgacaaagccaggattccaayccagagcccatactcttacccactacactgtgtactgccatgtgtgcatacagatttacacacacacacacacagccatcaggggccaacgtcctttcaccattcctacatgtagtttctaccctcaaggttgcctcatggtccaaaatggcttctgatgctccagccatcacatctcaattctaggcagtaggaaagaaaaagaagggaaggacaaagtggcccccttcttgtctttagcagcctttctagaaatctcacataatatgtctatttccaatacttgactaagacccagtcacatggccacttctagccataagggaggctgggaagggtgtttcagttagccgcatggccaccctaaatcattcatggaggggtaaagtggatgatctttgagggtcactgccagcaatccagtcccaactccatctgtaagtcacgtttgccttagacaaatcacttagcctcccagaacctcagcttcctcctgtataaaatgagggttataggagttaaggaactgactgtcttggtttcctgggactgagggatttcccagtgcatgggacgatttggtcctccccatagcagttcctacatgcagggctgctgttggaagaattcagcaagattgggtrtgttctcctgctagcctctggtagagaagaattcagcgagattgggtgtgttcccctgccagcctctggtagatgcccactagattagtttctctcctcttcaagagaggaggcggggcgcctggggtaagtgactcctgcagggtgtgcatgtgtgtgaagccttccaacacccgttcctcattccagccctaccggatcttcaacacctggctgggggacccgtccaagaacctgttgctggctgaggtcatcaacatcatcwagcgggaggacctgctaaataatgcagcccatgccgggaaggccctgctcacaggactgctggacctccaggtaacaccccctcccctgccccgcyyccaccacccatggctccccgcagcagcctccggggcaacactggagctcttcggcatggtgttgtgcctgctgttccagcagttcgtaacgggctgtgctgctcctagccttgggggctttgcacatgctgtgtcctctgcaggggatgcctccctatccctccatcccattccaacccctattcctgaactcctggttttctttgttgttgttttttttaatttattttttatttttttaatattgagacatggtcaagctctgttagccagtccggccttgaactcctggcctcaaacgatccttccacctcagcctcccaaagtgctgggcagcgcctgccggcactggttatctttcttatttattttattttattttatttgtttatttattttttgagaccaagtcttgctttgtacccaggctggagtgcagtggcgcaatctcagctcaccgcaaccgctgcctcctgggttcaagagattctccggcctcagcctcccaagtagctgggattacgggcatgtgccattatgccctactaatttttttgtattttgaatagagacagggtttcaccatgttggccaggctggtctcgaacccccgacctcaggtgatccgcttgcctcagcctcccaaagtgctgggatttcacgagcatgggccaccgtgcccggccctggttatcttttgacaccaawttcagacatcccccctttgagagtcccccaagcactccctctctcaccccctctagtgtgttcattattcccgcctttgtgcaacctgttgcatacttaccactcggcagcactgccctcccctgctggagctggattactctctaccctcaaggtttcgtcatgggccaaaatggctcctggagctccagccatcgcatctcaattccaggcaataggaaggaaaaagaagggaaggacagagtggcccccttcttgtctttagcagccttcccagaaatctcacataayacttctaacacttgaytaagagctggtcacgtggtcactcctaaccgtaaggasgtgtgkggatgtgtgtgtgtgagtgtggcasgcaggcctaaaggggtgtctaaatggaagagactttaatctaaaccatcccagggccacactctgtgggagagggaggggtgtgttcaaactgccagctccccagcaattgacaagtgcaaggaacatgctagagtaagtgctggaaggacttctgagcctcagtttccttatctgtgtagaccaaagtgagcccttcttcactggcaggggattcaagaatgtgcccactgccaggcacaggggctcatgcctgtaaccccagtacttagggaggcagaagcaggaggattgccttcagctcaactgagtttgagaccagcccgggcaacatggtgagaacccatactccacaaaaagaaacaaattgtgcacataagtgtctaacacggtgcccggctctgtcacccccagaataggaccatgtctccagtttctaccaatgagctgccgtgaaataagacttgctcccccarctcagcccccagtaccctgaaattatttggggttttccaagcccttgtttgctgtccttcatatggacagcagagagtaaggtgaaatcaaggtcctccagactaggcacctgcatttgtttccttgtctgctgtaaaaaatcaccacaaactgtgtgggttaaaacaagaatttattctctcacagtttggaggccagggtctgaaatcaaggtttcagcagagttggctccttctcgaggctctgggggagaatctgttccatgcccctctccaccttctcgtggctgccgggaatccttcatgttccttgacgtgtggaggcttcactctgcttctggcgtcacttggtgttctccccactgtgcctgtgtctgtctccagattgtcktcttcttataaagataccagtcattgagccgggcrctgtggctcacacctgtaatcccagcactttgggaggccaaggcaggtggatcacttgaggtcaggagttcgaaaccagcctggcctacattgtgaaaccagtttctactaaaactacaaaaaaaagttagccaggtgtgatggcaggtgcctgtaatcccaggtatttaggaggctgaagcacaagaatctttgaacctgggaggcagaggatgcagtgagccgagatagtgccactgcactccagccagggcaacagagtgagactccatctcaaaaaaaaaaaacaaaaaacaaaaaacagtcattgcattaggggccattctaatgcaggaagacttcattttaacctaactaattatttctgcgaagaccttatttccaaattaggtcctagtcataggttccaggtaaacatgaatttagggggcagtgggaggaaactattcaatccagtacagctcccagtctcaaagccctgagggaggacaggcatttcttcttccagaagaaccacctttctagaagagctgacgatggagatggctaacatctgtggagcatccaccaagtgcccagccccaggcttaggacttaacatgtgaaccttatcgtgctaaagtctcaccacggccccagtggggtcaacagcatttaaatccttcagtttatagcagggtaaacagaggcacttgagtggcccaaggttatacagtgagagggacagagctgggcttggttgttgttgctggtggtggtggtggtggtttttttcctccacacaacacacatgtgcacagctgggctttgaacccaggcctgaatgtccccagagctcttaaccccctggaggtcctgccagtccatgcagaggccgaggctggaccatgggaggcctttgacgaagcacagccattaagcccagctggtacacaggtgatgggctttgacgccagccttgtctcctcccactrcaggcccggtacccccagttcatcagcagggtgagaggacgaggcaccttttgctccttcgatactcccgatgattccatacggaataagctcattttaattgccagaaacaaaggtaaggggncaggagtggctgctgagtttcatgagcatccagtatntcctgctgtagctgccacatgttgctaggtactcagcaatattttgtgtggggggcaggtggtacacaggtctgaaaagagcctgaatgctctttctccaaagaagagaacattacaaatgggatttctttatccatttatttactcaacaagcgttcrctgaggaggtgagttgtaagtggacactggagacagttacagtgatgatgaagaccmtcagagccccttccttcaggaagcatgcagtgtagcaggaaggcatggctttacacatggcatttcacaaccaatccattgcaattttaagtcctgggaaggagaaaacgcagctaagagagcagatagctgcagcagttggtgagggtaggaaatcagggcaggctcccttgaggaagtagcattttaccctaagtcttgacraacagggattggctgggtgaagaaggtaaggaagagcattctgggcrgagggaagggtgcatgcgatggcctgaggtgggatggagcttacagaggtggtaaaagggaaagaagggggcgtgaaggcgaacggttgggaggggatgaagctgggggaggagaggccaggcccgggtcgcatgggcctgcagatcaggcttagcactccagacttcatcctaggagctgtgggaagccactgaggacatgtgtggcaggggtaagggcagacgctgtggtgagatcagagcacgtactctatgtcaggcacattgtcagttcttcttgtgccatcttacagaatccttgcagcagcctcagaagggcagggataatcaacctccattttaaaaatgagaaaacgtggtctcaaaggcataaacaggccgggtgcagtagctcacgcctgtaatcccagcactttgggaggccgacgtgggcagatcagctgaagtcaggagttcgagaccagcctggccaacggggcaaaacctcatctctactgaaaatacaaaaattagctggccgtggtggcggcacctgtratcccagctrcttgggagactgaggcaggagaatggcttgaacctgggaggtggaggttgcagtgagtgagactgggttgccactgcaccccagcctgggtgacagcgcgagactccatctctwaaaaaaaaaaaaaaaaggcataaacaacctcgacaaggaaaggacaccagctgtaactggtgaagtcaccctttaaaataagcagagcctgtccctcctccgtaatagctcagcacctcacacatgcttccgactcagcctgtgcttttgcaacttayttgcttacctattttcttttcccactcctccatgactttgtggaaggcaaggactttatctcaggatttctctatcaccagacctagcttggggcagcaaagcaggcactcaaaggagagagggagggaggaagggaaaaaggaagtgtggagggaaggaaaggaagaagagaatgatggaggagatgaatgaggggagagagaaaggaaatgaagactggatgggtgggtggtaggaaggaagcccgggcttccatgatggaggatgatggatggatggatggatggatdagcgttgccaacaggcatcactttccccccagctctcccagcatgtgactttgagaaaccacgctcctcacctacctcctgcctctttcaggtgtggtgttgggtggctgtggtgacaaatccattcgtttccgtcccacgctggtsttcagggatcaccaygctcacctgttcctcaatattttcagtgacatcttagcagacttcaagtaaagaagccatttccactacagtgagaaagcccrgatcccaacagttgtcaaattgattagtttgcctaattcatgttttcacttaaaagtatcagaggtgaatgcacagtgaagggtgatttgtggggagggagcatttttggtggtcttgggggaggggaggggagggaagggctggtgttgattttcctccctgcagagccaatggtgcacattggtttaagcccagagatcctgcttgakcmctggactcatcttsggaagggccatgggaggtcctggctagagttctgcccaaycttgaccaaccccagcaatttttccaaaagccagtcaagggcattacatttgttcctgggactggcagctgggcctcctgggtgccagtccatctcaagtgccatattctgtgatcacggatgttggctccccctcgccctatgcaagcaaacacactctcacctcctctcccagccycccggagctctgagcacgccccacgcatggtgcagragggactggacagatctgaggaaggccgtaaaatggggacaggaggattcagctcaggmgtragggaagaggtcctctggccccctgaagatgagaatcacccctctcagtgcacctggggatccccctaaactgtgaattctgccctggacagggctttgcccttggaggatccccaggtggccttacccgtgattcttactcggcatcctccattccccaaactccctcctccctgttaaatgtcaacctagacctggacctgggtgggaggaaactgtagcctgagtgtccacagggacacacgtgagccacagggctagaagcacaggcccgtcaccccaggaggaaaagcccagggtctggggcagcagagccatcgcatcatgtttcccagggcaasttgaggtctgacttttggctccctcgccctaagaggctcttcctctcttttgctcatccaccttcacaccacttstgagctgacccccaggaacagcttggctgttccaccagagcagagggaatcattgctggactggatttcttctggagggaagcaccatgaattaaaggtgccagagctccatgcatggaaaagtggcctgttggttcaacrtggtttccttgtacttgatcctcctgaaatgagagattttcctgagatgactgagtatggagattaccaggcagatgataccgaaatgcttaaaggggctgtggctgaggctgtagcatctctgctggaggtgagacactctgggaactgatttgacctcgaatgctcctaaaagagaacttgatagcctgacagcagagaagtattatttggtggggagtctgagaaagcctggcttgtattatctgtccaaaaggaagcctcttcatctcccggtgccttggttgactattttggaaataggcatatcaaggttcctgattcagcactttgctcttttaataacaaatcgtccaaagatctcaaagtaagggtttttttttttagcttccactcttccgcagacttggtcatcgacctatttttrttgaagaatgaaaggcratgacaagtttaacatawacaaattcgtgaattcttgttcattttgcattcctgcagtcagtgctaatccgtcgttcttaatcaggagttctgccaggtttaaggtcacctgcactcccagccaagtggtgatgtatgcctcccactctctgcaaggttttcctcatttttatattcatttattcatcattcattcattcacctaactttcattaaatagctgcaccatcccaggccctgtgcggagcatcgggaatacaaagatgagataaaacattgtccctgcccccgggggctcacatgccactggaaacaacagactcttaaactaacaattcaagcaggcgccaagtgctaygacagaggtgtgaataaaagcatcaggaaatcggatggagaaccaccattcacccaagggtcagaggaggtttcaaagaaaaggtgtcattggagcagtgttttgcagaatgagccagagttcaccaagcaggcaaggcaaggaagggtgttgcagagagggaacagcatatgcaaaggcrtatcagttcatggcatcacatctttcactggggaagccagtttccacaggcagcatcccaaggttcaataaggccttatttaacaagcaagcaaaatgcaaaccaaaccattattcatttattggcttaagtatgctttctcctgaaaactttagcattgggtgcaaatattcagtatggttctcggagwccaaagggttttaagccagggcacaaccagaaaagtggctctctttggtagggagaggggctccaatatttcgttctctccccatggggcactgacagagaaatgaaatagttttatctggaaaattccagagctattatttactccttaccaagggaagttacttcttgtaaaaacttttaagccatttatcaacaagttcttgttgactcagggcataatgagttcctgagacatgctyttttgggggctggggctttagstagaagaatttcaaggaaaagaattctcagcagagctcaagattgtagaaactcagcagaagctggtaaaaacatggggagcccggaggacaggctgctgtccagggcagaggccatgaagaagtgcttccgtggccgacagtctggaaatgaatccatcatacattagtgccatagagtttagtaaccgtccagcaagtgtcatcacttttacagaaaacaaggtccagtaatagcaagtcttagtacatcctcacttttattataaatgggtgttttttcataatttttactgacgctcagtaaccatgcaaaaytgtgtatagcattaatgtatctacatacctacacctatctatatataagctcatggtagaaaaccatagctaagtagcatcgcagacttaagcgtacaaagtgatcttgttcacaagtaatctgttgacagtgccaataaatgataaaaaaaaaattaacatgtcacaatgtaacggatgaccatatgcacaattccatgaattaaatctgtttcctgtgttagtcagtattcttaaataaaatttataattgaaacatgagtgaatgtggacttttttggtggaaatggtcttgttaaataattaggtgacaagtacttattaaatgcctgttatatacctcttagggatgtcttggggaacactctacatgcataactctgccttgggatcaggaagcactgtaaggccatgcatttcattaagtaaatcgaggacatgctatgtgacagggacacaaggatggacaacatgtggtccgtactcgcagctcacattctttttttttttttttttgagacaagagtctagttctttcacccaggctggagtgcagtgacatgatctcggctcactgtgacctctgcctcccaggttcaagctgcctcagcctcccgagtagctgggattacaggcgctcgccaccgcgcccagctaatttttgtatttttagtagagacgaggtttcactgtgttggccaggctggtctcgaactcctgaccctgtgatccgcccacctcagcctcccaaagtgctgggattacaggcgtgagccaccacgcccggccccccttttttttttttttggatggagttttgctcgttgcccaggctggagtgaaatggcacgatctcggctcactgcaacctccgcctcccaggttcaagcaattctcttgcctcagcctcccaagtagctgggattacaggcacctgccaccaggcccagctaattttttgtatttttagtaaatacaggtttcaccatgctggtcaggctggtctcgaactcctgacctcaggtgatccgcccacctcaacctcccaaagtgctgggattacagacgtgagccactgcgcctggcctcgcagctcacattctagcaaggtaaagaaaaataaaaaataaaaataaaaaaataaccaaaaaaaaaaaaaacagtgtaaggagcaggacgtgggaaaacactggatgcagcagaggcacaaaggctgggcccctcacatcagtcagggtggcagttaagcccctgagtttcatcttcaaggctgagcaaaagctgctccagagtgatggaaggcattccacaagagaagaggtccacgaaggcacagagacagggcgacagcaggcgtctatgaaaagttcagtatcactagatcacaaagagtaggagactagaagagcccagaaaacaggcaggagctgggcccctcgagagccttctgtgccacatgaggggcgtgggctttccatgctggtgatggagccaccagaggcttgatgcaagggagcaaaccgaggggtgttttagaaagattgtcctggctggacgtggtggctcacacctataatcctagcactttaggaggctgagccaggagaatcacttgaagctgggaggcggaggttaagatgagccaagatcacgccactgtactccagcctgggcgacagagtgagaccccgtttcaaaaaatatatatagaaaggttgtcctgagtgttcacggtgaagaacagggaggcagggaggccagttaggagtctattgcagccacgctcacctggtggcctgaatgaattaggacaataatggggacggagagagagaaaagtagagaatccaaagcatccgggacggtgattctcaacgctggacgcgcttaggaatcacccgaaagagctttttgaaaagtgccactggccaggcacagtggatcccacctgtaatcccagcacttcagcaggccgaagtgggcagatcacccagctaatttttttgtatttttagtagagatgcggtttcgccatgttggccaggatggtctcgatctcctgacctcattgatccgcccaccttggcctcccaaagtgctgggattacaggcgggagccaccgtgcctggccatcaaagggttactgaccttgaagttccggtgccttcaactcacctaccttaggaatgtgcatgtcggagctcacactcaacgccgaccaggtcaagttgaccttccaaggctgatggccaggctggccgagagaaagttccttgagcgattgacagttcctaccctcagctagtcctgagttgactgcacacaagtgcacatacactcacatctgtccacatgctaatattacagcatccttccacatcagtgtgtatcaaatcctaactttcaagttgtgtgattgggagcagattcccttaacctctccaagcttcaatttcctcatcttaaaaacaggcatacaagactgggtgtggtagctcatgcctgtaatcccagcacttcaggaggccaaagcgggtgaattcgcctgagctcaggagtttgagaccagcttgggcaacacggcaagaccctgtctctactaagaataaaattttaaaatttttattggcatggtggcatgtgcctataattccagctacttgggaggctggggtgggaggattgcctgagcccaagagattgaggctgcagtgaactatgattgcaccactgcactccagcctgggcgacagagtgagaccttgtctcgaaacaaaaaaaagtatacaaatagtaagtcttcacttaatgtcacagataggttcttggaaatggatggcaggtcctcgaaaacatcatttcattcaaagttgtcttgttataacattgtttctttcaacatcttactattatgatgaggaaaaaatattggtttcattgtatgtcgtttaacttataatcagtttcccaaaacttactgatgacattaaatgaggatttactgtacctacctcacccgtctgttgtaaaaattataaagcactggccgggcatagtggctcactcccataatcccagcacttggggaggccgaggcgggcagatcacttgagccaggagtttgagaccagcctgaccaacatggtgaaaccccatctctactaaaaacatataaattagccaggtgtggtggcacatgcctgtagtctcagctacttgggaggctgaggcacgagaatcgcttgaactcaggaggcggaggttgcagtgagccaagatcgtgccactgcactccagcctgggtgacagagcgagactccgtctcaaaaaacaaaacaaaaccaaaaaaaaattgttaaagagtcacagttttcttttctttttttttttttttttgagacaagagtctcactctgtcgnnnnnnnnnnnnnnnnnnnnctgtcgcccaggctggcgtgcagtggtgcaatcttggctcgcagcaacctccacctcccaggttcaagtgattgtcctgcctcagtctccccagtgactgggattacaggcatgcaccaccaaccccagctaattttttgtcatttctagtagagacgggatttcgccatgttggacaggccggtctcggactcctgagctcaggtgatccgcctgcctcrgcctcccaaagtgctgggattacaggcatgaaccactgtgccggcctgttttctatattctgtccttcccctggggaggcagtggaatgacccagctctactgttttctagacgggtgatcgtgggcaagtcacttcagttctctgaaccttattctgccaaaaaaggatgattatagtattgctagctaacatttattgagtgcttgcctggactgagcactattttaagtgcttttcatgtagtaagtcatgtaatcctccccacaatcctgggtaggtggtgttattatcttcacttcacagaggaagaaaccgaggcagagaaagaggttatacagctgggaattggcagggctggaattcaagcaggcaagaagtttggcttcagaagccatatgcttcacccgaacactctaccacctctctggggttctccaactcaaagtgttgctggcagattaaatgaaatcctataataattgcccagcacacagtaggcatttaatacatgctggtgtcctttactgcttcttctccatgaatagctgagtgtgtctcatatatagttctaaaaggcaatattatatttctgtgagagttaacttcccactggtaaatattaaatctacttcacaccataggtgcaagcccagctgaatctgagagtgtatttcaactgttaatcagtaaaatgaatgtttgtgtccttagagttggtatgaacatggccatacctagacggwactggccttgcctgatgggactctaatcaggcaagattttacaattgaatggcgcaggatcaaaacaaggccattaaaagttggactctgcccggagttyaaagggaccctgttgctytctatttaggaactcacgagtcttgcagtcataaagcagcaacataaagcaagctcccaactctagttctccaggcaattcatccaggctgtcccctgcaagctgctcagcccaccagatctgctttggggagcgcattaaacatggttatgcaatgattgggtggcggatgccatagacatctggccctatgacaaggtaagtctcatttttggtaaccagcataggaaggaggacaacagctaccactgggctgtgcttcccacgtgcacactgggagcatcgtcaccaggtccccagttgatgcagacctcatgtgtggatggtggccatatgaaaactgacatgtggctgggcacagtagctcacgcctgtaatccccaccctttgggaggccaaggtgggccgatcacttgaggccaggagtttgaaaccatcctggccaacgtggtgaaaccctgtccctactaaaaatacaaaaattggctgagcgtggtggcgtgcgcctgtaaccccagctactcaggaggctgaggcagagaatcacttgaacccaggaggcagaggttgcagtgagctgagattgcaccactgcactgtagactgggtgacagagcgaggatccatcttaaaacaaacaaacaaacaaacaaacagaaaaacaggccagacccagtggctcacgcctgtaatcccagaactttgggaggctgaggcaggtggatcatgaggtcaggagttcaagaccagcctggacaccatggtgaaaccccgtctctactaaaaatacaaaaattagccggcgtggtggtgggtgcctgtaaccccagctccttgggaggctaaggcaggagaatggcttgatccccgggaggcagaggttgcagtgagccgagatcacacctgtgcacttcagcctgggcgacagagcaagactctgtctcgaaaaacaaaaaaataaaacggacatgctccagaccaccctaggcatctaaattatttacatggccacagcatggcagggagacgggggcaaaatccagacaagaaggaaagccacttgacaagggacaaacatggttaaatcacagctgctttaactgagttttcaaagactgcatgtttccttccatctactcagcttctgagtccagaattggaattcatggttgagaaactttcctttgcctagaaagctggtgggaggagaagggaatggaagaacagactgtttattacagcgtttttcttcatttgctaggatgaatgatgtgctcattatacccctctcaccctcaatcctctcccgggggtagccactcttcacaatttgcaatgtatgtatgtatgtatgtatttgagatggagtctcacactgtagcccaggctggagtgagatgttgcgatctccgctcactgcaatctctgcctcctgggttcaagcaattctcctgcctcagcctcctgagtagctgagattacaggcgtctgacaccacccccagctaatttttgtattttgagtagagatggggtttcaccatgttgaccaggctggtctcgaactcctgacctcaagtcatccacctgcctcagcatcccaaagtgctgggattacagccactgcacctggccaacatgtactttttaaaaacacaaataagatcacacagaactacactgttctgtgacttgctttttttttttcactacctacctcgtggtcttt

SEQ ID NO: 94818 - DNA, 22502 bp, Homo sapiens
ataaatgcatttggaaggcttgcaggatacaagatcaatacacaaagctcaattgttggccaggcgtggtggctcacgcctgtaatcccagccctttgggaggccaaggcgggtggatcacctgaggccacgagtttgagaccagcctggccaacatggcgaaaccccgtctctactaaaaataaaaaaaaacaccagccaggtgtggtggcaagctcctgtaattccatctactcgggagcctgaggcaggataactgcttgaacctgggaggcggaggctgcagtgagcagagatatgccattattgcactccagcctgggcaacaagagcgacactctgtctgaaaacaaacaaacctcaattgtctgttatacacttgcaatggacaattcaaataagaaaacaattccattcacaatagcagcaaaaagaacaggctttttcaagactcattaagtaagttctagcagtgggagacctaaccatttcaaatagtagcatgctgtgctatctacccaaatattaccgtacctgtgaattctgttggtgacaaagtcacaggccctgcaactatgaatgtggcttcttccttatatccgcaattgaatgaattagaggaatgcagtcacatcagaggccatttgagaataaaggtcggatttttccccattcaaattcacagaccaggctcacatctgtaatcccagcaccttgggaagccaaggcaggaggatttcttgatcccaggagtttgagaccagcatgggcaacatagggaggccccatctctacaaaaaattaaaatattagctggttgtggtggcgcgggtctgtagtcccgcctactcgtcctggccgcagagtcagcgtctccggagcgcctccttctcccgccctggggctcacgtgggaatttcaccctccattggagggggctcagaccagggcttctagacctccttttggtccgtgaatttatttttgagacagagtcttgctctattgctcaggctggagtgcagcggtgcagtcacagctcactgcagcctcaatctcctgggctcacgcgatcctcctgcctcagcctcccgagtgggccttcctccgtgggaaagcgttaaaacgatagttaacggttgcgtcggtgtaaagacgaatgcaattcgagaaggattcattattattttgttttttcttctgatttttaacagaaattggcgttgaacatttcccccgtgagcgccgggccacgggggtccggggcggcggggggctccggggcggcggggggctcccgggcgggcgggggcgggtctcgggctggcaccgccctccgcgcccgctcctcgcgctcacagcggcccgcgggccgggcgtcatgggcggcctcttctggcgctccgcgctgcgggggctgcgctgcggcccgcgggccccgggcccgagcctgctagtgcgccacggctcgggtgagtggggccgcgcgccccggcggggacgcggaggggaggaaggggcgcgcgccgctcggcctttgtgcgcgcacgtgcgggctggggtccgactcccccagaggcctcggggcgcgggctgcggggtccgtccgagttggggaaggcgccggctcgcacccgcacgcccctccagtgcccgtccggctctgcggctccttctcgcctccccaggccccaggctgcaggcgcccggcgagttggcagcctgggcgggtccggggcgaccgagggcccgggagcgcaaggaaggcagaggccggctgcagcactgggcggggagggggtctcccggccggggtgggggtgggggtgtgggggggtgagggagtcggggggtgggggtgggggtgtgggggggtgagggagtcggggggtgggggtggggggagccgctccgctggggcgttcgctgaaggccaagttaggccagaatctgactgggacgtcaggccccaagtccccggccccgccgctgcccggcccccccagctgccacctcacaggacgatccatgtcccagggctccctccatcggctctgaaaagtgagccgccgcctgcaatgcccgcaccagccgcagcagagccccaggctacacaaggcgccctgcaaactgggttttgggggaacaaaccaaccagggggtcttcctcccgtgggcttcagccgcctgctggggttaacttttcctcctggcctggcggagcccctttggctctgtccagattctgtgggacatacagggtctgggctcctctggaaaccagggacccgatgccggagggtagcttggctctggagcagcctgggactataggaaggtgaggacgtcttctgtttccctggcagcgtcccctccagaggaggacggctggggcggagctcagcgctgaccctgggtctggaagcgacaggccttgaaactccacagcagcacaggccccgtctcctggctcggacagaaccctgctaccttccctcttcaatcttcaggcccctttttgtccgtgtttccagggctcacctggtggggaaagtgtgtttctccctggttccctgccactcattcacctcagacacagggtgggctctgggttcttcctcatgtggaaagtcggggcttcagaccatgtctgtcgtcatccagaagggatggagtcaaaagtgaggctggagttttgcaggatctccagacttccctgaggccactgagctgggctgtgcctctgtggacctcagggtggtcgctgagctgggctgtccctccctggaccttgaggtggtccctgagctggctctgcctctatggaccttgcggtggtggtccctgagctgggcagtgcctccctgaacctcggggcgatctcaggcagcctctgcctctgctgggaggagccatggcccctgggagaggctagaagccctggggacacattgccttgggtgtccctgacagggactatcatgggggtgtttgtggctgtgggcaccatccctgtcccttccagagtgccctgcatagaggcagacaccctgaagcctggtgacccctgggctctggctgggaaacccgggtcgtggggacgtgaaagggtgaggtggcagtgcctctgacctcttgccttttgaaggagggccctcctggacccgggagcggaccctggtggcggtgaagcccgatggcgtgcaacggcggctcgttggggacgtgatccagcgctttgagaggcggggcttcacgctggtggggatgaagatgctgcaggtagtgggactctgggcttgtgggtgtccctgtggggatggggttgggggatccttctcggcctttcacatcccagccagcgccggggcagggcctggctttggcagttgaaggggcaggagggatctattctgcggtgggggtgctgcccatgctggtgttatctgcaaggtgcctgaggtcagggcatcacagctgctgtgctagtgcccacgtttactgtctgcggctcctccttacctcaatgccacccaggcaccagagagcgtccttgccgagcactaccaggacctgcggaggaagcccttctaccctgccctcatccgctacatgagctctgggcctgtggtggccatggtacggcagggcaggggtggtggaagggcctgtgggtaaagggcgtgtgggtgtgtctttccccccagcaaagggaggggccctggattgagcccaggggcccttggtgttccccacttctccccaaccattatctctcgctgcaggtctgggaagggtacaatgtcgtccgcgcctcgagggccatgattggacacaccgactcggctgaggctgccccaggaaccataaggggtgacttcagcgtccacatcagcaggtacgggggtcctgatacaccaggctgctgctgggggcaaggagggccatcacttggggtggtggcagatccacgagacctggctgtcttgctgtgctaggatgaagccaggtcggacatgacagctcacactggtgagagccgtgttctcccagggcacacagggcaatgaggtgttccctttgtgttgtgtgtaccgtgccatcgttgcctgttacctgacaccccaaggggttggcacggggcaacttggggggaaatgaggctcccaaaagctggggcctgggcgggtccacgaggctgtaagaggccgaggccaggctggaacccggtttcccagctccactgttactccttccctgtctgcagtcacaggcttgctcccctagacagagggcaacgggagcagcagatggtccctgggattcctcagggtgcacatgaagcctgagcctcacattgctcctgtcctggcacaggaatgtcatccacgccagcgactccgtggagggggcccagcgggagatccagctgtggttccagagcagtgagctggtgagctgggcagacgggggccagcacagcagcatccacccagcctgaggctcaagctgcccttaccaccccatcccccacgcaggaccaactacctccgtcagcaagaacccaagcccacatccaaacctgcctgtcccaaaccacttacttccctgttcacctctgccccaccccagcccagaggagtttgagccaccaacttcagtgcctttctgtaccccaagccagcacaagattggaccaatcctttttgcaccaaagtgccggacaacctttgtggtgggggggggtcttcacattatcataacctctcctctaaaggggaggcattaaaattcactgtgcccagcacatgggtggtacactaattatgacttcccccagctctgaggtagaaatgacgcctttatgcaagttgtaaggagttgaacagtaaagaggaagttttgcacacccagttccataacgttgttggatgtatgagccaggcaggggtccagagaccaccagcctgcaatccggagaacccaagctaggcgcgagccggtgctgtgatcccgccaaaggagaagctgccttcccggggaaggggcagagaggggccggcgggctgaggccaaccagcgcagaaagggcctggcagccattactgtagcgctggcggctctgtcacgcccctgaagccgctggcccgcgggtgtgttcagctcaggagcggccctgcgtgtttttcccccgtggccgtcgcggacccccgtcttccaacagtggtgcgggcggggcgccccgtcctgggttcgcggcatagccccgcccgggcccccacgcggaacagaagtaacggacccttttttttttttttttttttttgaaacggagtgtcgctctgtcgcccaggatagagtgcagtggcgcgatctcggctcactgcaacctccgcctcccgggttcaagcgattctcctgcctcagcctcccgagtagatggaactacaggcacccgccacaacgcccggctaatttttgtatttttagtaaagagggggtttcgccatgttgtccaggatggtctcgaactcctgacctcgtgatccgcccgcctcggcctcccaaagtgttgggattacaggcgtgagccaccgcgcccggccccggacccttctttattggcctcaaaacgggtcattttgggaagcggcgcggggctggccgcgcttccctgggccccggccctccccatggtgtttacggggaggcgaacggggagcccagaggctgcgagcctggcctggacccaggagccaggggtatcccacaagtcctggaggctctgaacgcggcgctgacgccgaatacctgtgaaaaagactcggggaggagacccgcagaccgccgagcttctgccgcgggaaccgcgcccccggccccgcaatgcgcctgcgcctcgcgcgccgacttccagtcccagcaggccgcgggcgggggcggggcctccggggagaattcgggggaggggcggggcctccgggaagcaatcagggcaggggcggggcgtccggggagtggggcggggctcccggttccaggcgagttcgcagctgcgcgccgggtcctggaggccgaggccgctcccgcccgttgtccccgcagtccccgacgggagcgccatggcccagccgccgcccgacgtggagggggacgactgtctccccgcgtaccgccacctcttctgcccggacctgctgcggtgagcggggcctgggaagcgagcgcagccttggtgcggggtccggtccgcgggcgccggcgcccccacgtggtccccgagggctcgcgtgttaggaaacctgtcttgcctggctcctttctttcttttttctttctttttttttttttgagacggaatctcgctgtgtcgcccaggctggagtgcagtggcacgatctccgctcactgcaaactctgcctcccgggttcaagcgattctcctgcctcagcccggctaatttttatttttagtagagagggggtgtcaccgtgttggtcaggctcttttcgaactcctgacctcaggtgatccacccgcctcggcttcccaaagtgctgggatttacaggcgtgagccaccgcgcccggcccaacctggcctctttcttaacagaaaattttaggttgaaatcatttttccggaagacccagaaggcccaggaatgccaggttttgcccagcagctcttcattttcctgcaaacgccttggtgttcacaagagaaggcagcccgggcaaaggtcgatcctccccggtcacctgccctcactcggctaatgggcggatccttttttttttttccttttctttttttcaattggcaacattttcaagtttctattaaaattttgatcttttgccaggagcagtggctcacgcctgtaatcccagctctttgggaggccgaagcgggtagatcaccagaggtcaggagttcgagaccagcctggccaacatggtgaaaccccgtctctgctaaaaatacaaaaaattagccgggtgtggtggcgcacacctgtaatcccaactacttgggaggctgaggcaggagaatcacttgaactcgggaggtggaggttgcagtgagccgagatcgcaccattgcactgggcaacaagagtgaaactccatctcaaaaaaagaaaacaagttttaaattatgttctccaaggacaggtattgacaattctctctgagtgttctgcaggaaaaaaaaaaagttttttttcgaaacggagtctcattctgggttgaagcaattctcctgcctcagcctcccaattctcctgcttcagcctcagtgcgcccaagtgggactataggcacacaataccacgctgggctaattgtatttctagtagaggtgagttttcaccatgttggtcaggctggtctggaactcctggcctcagatgatccacctgcctcggcctcccaaagtgctgggatgacaggagtgagacgctgcacctggcccaaaattaatctttaataattaagaataggaaaggcaacttggagatcagcaaaagtttgccatccatctggtacagtttgtgccagtcataccgatcagtacacatttaatgcgtacaagaaaatctctaataaataaaaaagccatattatcccgacgtagcttgctgaatctcaggtatcatatttgatattagtgccatgcagggcttaggagagaggaaattataacctctatcttgtttaagccagggtatttttctctcttgtatctacttctgtccatttctgtcaaaagacacagaaataccctttcccccactgcactttgcaagtttgtgtcagcacaagttcaggaccagcctgagcaacaaaacgatacccctctctagaaaaactagatgaaaaattagctgggcactctggcatgcacctgtagtcccagctactggggaggctgaagcaggaggatccttctagcccaagaggtcaaggcggcagtgagccgtgatggtgccactgcactccaacctggatgacgtagcaagaacctgtctcaaaataaataaataggcccggtgtggtggctcatgcctgtaatcccagcactttgggaggccgaggtgggtggatcacaaggtcaggagatcgagaccatcctggctaacacggtgaaacctcatctctactaaaaatacaaaaaattagctgggcgtggtggcaggtgcctgtagtcccagctactctggaggctgaggcaggagaatggtgtgaacctgggaggaggagtttgcagtgagcctagatcatgccactgcactccagcctgggcgacagagcgagactccatctcaaaaaaaataaaaaataaataaataaattaaataaaatactataattttatgaattttcattttatttatttatttattttttaagaccatgtttcgctcttgttgcccaggctggagtgcaatggcgcaattttggctcaccacaacctccgcctcctgggttcaagtgattctcctgcctcagcctcccaagtagctgggattacaggcatgcaccaccacacccggctaattttttatatttttagtagagacggggtttctccatgttggtcaggctggtctcgaactcccgacctcaggtgatccgcccgccttggcctcctaaagtgctgtgattagaggtgtgagccaaggcacctggccgaattttcattttaaatcattgccgtatagcaatatgggaggtgtattttaacagggctcttttattttttatttatttttattttattttatttatacatattttttgagacggagtcttgctcttttgcccaggctggagtgcagtggtgcgatctcggctcactgcaacatctgcctcccgggttcaagctattctcctgcctcagcctcccaagtagctaggactacaggcacccaccaccacgcccagctgatttttgtatttttagtagagacgaggttttaccatattgtccaagctggtctcgatctcctgaccttgtggcccacccaccttggccttccaaagtgctgggagccaccggcccggcccaatagggctcttttaaaagagcctccttttttattctcagggacaaagtggccttcatcacaggaggcggctctgggattgggttccggattgctgagattttcatgcggtgagactgctctgtgtcccttccctgctcctcgcttctccctgcccgggccctgctggatgcccgacccctggaaagatgttggtgggaggtagatgtcccctgctcacctacccgacaggatccaggtgcctgccagagggactggggagcggtcgaggattgccctggggggagtcaggacttcaaggcccctacaggtcagtgragattgtgtggctctggtctggggcctgctgggacctcgagagtcagggctgtgtcgggccccagtgctggcgccctgcagagcacattttctcctgggacacaattctgtggcttcaggccagggtcagcaacttatcccacctgacagtggctagagttaggctggggtgggggaaagggacccttcctcagttcccctgaggcccctgcttttcagaccaaaaaggtgagtcccacaggaagagatatggcctttccactggtggctttgtgctcagggcatctgaggaccagatgggacattgcagctccagtgggacctgcctagcaggggtagctacctttatggttattgtgggcaagcaacccccgaaccagaagagccgagaaaccaaagaacaaggcagacagrtcccgtttgtctgtgtcaggtgattttaccagggaatttgtgggcagaagcgtagtcttgggtggctgtgagacgggcgtctccatgctgttacccccaggcccagggcttctataccacagggaaaggggtcctgcttcagagggagtgtgtaggaatttgtttaggataacatcaaggtggttttgacctaaaggcaggacttctttgtgctctttcgcaagaacagtagataagctggaaatcctagcggcattcctggaaccagggttcatagaggccaacgtggtggattcgcatccacgtggtcaggaaggggagcagggagcaccccgcttcagaacagtcctccacgccagccccacagggagaagggggtggagaatgtgggcccagcaggccccaggcagatgtgtgggctgggcgtctgtggctcacagctgtctctgtacctggtgtttggggcaggacccgcaggcctgtgcggtgggatgtcccatgccagaaaccccggggtgggcaccacctgaggtccctccagagtacctcagtcctgttcacgcccctgtgccctctgccagctgggccttcagccctggactggtacttccgcctgagagactcctgctcaggagctgggcagatgcccccgggagtgcccctcgcccacactgccctcacacctgcttctggttttgcaggcacggctgccatacggtgattgccagtaggagcctgccgcgagtgctgacggtgagagggcctctcccakggtcccctgttcrggtggctgtgggggggctggggctgggcctgggccaggagagtccagaggctatggggatgttggcaccaaaactttttttttctgagacgggagtctcgctctgtcacccaggctgaagtgtggtggtgcgatctcggctcactgcagcctccacctcccaggatcaagcgattctcctgcctcagcctccggagtagctgggactacaggtgcccgccaccacgcctggctaatttttgcatttttttggtagagatgggttttcaccaygttgaccaggctggtctcgaattcctgacctcaggtgatccgcccacctcagcctcccaaagtgccaggattacaggtgtgaaccactgtgcccggccggcacctcagcctcccaaagtgccaggattacaggtgtgaaccactgtgcccagccggcaccaaaacttgcacctatcctaaatatggagcttcagtgtaagtggcctcccagagacatctttgactttttaaaaaatctagttattgggttctgggagggaccttcctgtttgggggtaatgtggccccaagaaagacctctgggctcacctgggttatttaggtggtccgtgcgtcccacctactggagccctcgacctgggaggagagtctcacctgtgccacctctggtctgcagcaggggcaggacatgggtgacagtggcctggagggcgacgcagagggaggattctaggacaggtggcaggtggggggagagcgtggcaggttcccacaaacatccactggggtcgtgggcacttgcaggctgtgcttccccagagtggggtccagcagcaaacccagggtccccgaggaacccggaagcatcgtcctctgcagattccaaaggccttttctccaggccgaggctgcagggctgctgtctgcctctttacctggcttctaggccgccaggaagctggctggggccaccggccggcgctgcctccctctctctatggacgtccgagcgcccccagctgtcatggccgccgtggaccaggctctgaaggagtttggcagaatcgacattctcattaactgtgagtcggtgctgagtgaggttggtggcttctcacaggttggtggtaccatttggaggccctagaactctggtcatggggtggggaccatgccagggaacctagctgcctgtgctggggtgggctgcaccccatccaggtacctgaggccaagactcaggctccggccccctgtctccggccccatctccggccccctgtctccggccccctgtctccgggcctctgtctccgggcctctgtcttcggccgcatctccggccccctgtctctgggcctctgtctccgggcgtctctctccggccccatctccrgccccctgtctccgggcctctgtctccggccccatctccggccccctgtctccgggcccctgtctccgggcctctgtctccggccccctgtctccgggcccctgtctccgggcccctgtctccggccccctgtctccggccccctgtctccgggcccctgtctccgggcctctgtctccggccccctgtctccgggcctctgtctccgggcctctgtctccggccccctgtctccggccccctgtctccgggcctctgtctccgggcctctgtctccggccccctgtctctgggcctctgtctccggccccatctccggccccctgtctccgggcttctgtctctggycctctgtctctggccctctgtctccaggcctttgtgtcccgccttctgtctctggccctctgtctccsgcctgactccgcttctctgggtggcagcaggtcagcacagctgcagcccaagtggacgccatgaacacagctcaatggtagagtcgggtgcccttgtgtcctgaaattccgtctttaaaaaaaaaagtaatagccttttttttttttttagacagcatctcactctgtyacccaggctggtgtgatcatggcttactgcagcctccaccttctgggctcaagccatcctcctgccccagcctcctgaggagctgggactacagacgtgtgccatcacgcctggctaatttttatattttttattttttgtagagacagggtcttagtgtgtgttgctcaggccagtctcaaactcctaggctcaagcaatcttcctgccttggcctcccaaaatgctgggattacaagcaagagtcatcaataaaatagaagctagcctggcctagcttttttttttttttttagagggagtttcgctcttgttgcccaggctggagtaccatggtacaatctcagcttacagcaccctccgcctcccgggttcaagcaattctcccgtctcagcctcccaagtagctgggattacaggcgcccgctaccacacctggctaatttttgtatttttaatagagatggggtttcatcatattgtttagactggtctcgaactcttgatctcaggtgatccgcccgccttggcttccgaaagtgctgggattacaggcgtgagccgccgcgcctggcccccagcttttatttttatttctttattttttatttttattgatttttatttttattttttgagagagtcttgctgtgtcgcccaggctggagtgcagtggcgcaatcttggctcactgcaagctccgcctcccgggttcatgccattctcctgcctcagtcccccagtagctgggactacaggtgcctgccaccacgcctggctaactttttgtatttttactagagatggggtttcaccatgttagccaggatggtctcgatctcctgacctcgtgatccgcccgcctcrgcctcccaaagtgctgggattacaggcgtgagccaccacgcctggccgatttttttttttaaatcacagttttaggtttatagaataattaatagtatatggaattccatactcccacctacagttttccctgttaacatcttgcgtttgttacaattgatgaaccaacactggtttcactctgcagaaattcccttttaaaaacatcctgtgtattagtttcctgggctaacagagtactacgacctgtgtgggtaaaacaaccgaaatataatctcccagttctggaggccagaacgtccaaggggaaggcgtcggcagagctatgctctctgaaggccccaggggagagcctcttcctgccttctgcgtggcttcgggtactgccatagcccttggccctcccgggctcggagaccgtcgctgcactgtctgccactgtcttcccgtggcgtgtgtctgtgtgtcctcttcccttgttataaggatgctggtcattggatttagggctcaccctaattcgttgtgacttcagtgtaattcgattatctctgcaacccaccccatttccaaacaaggccacagtcgcaggtacggagccagggcttcagcatgtcttctcttctcggggacacagtgcagccaggacgcccgtcttgctctggtcattttggaatttatcctagggcatgggtctcctccctgtgccacagggcacctgggctccctcctgcaccctccgctctgcccacctggccaccacccacttggcatccctctccccaggctccagcagctcctgcggtctcccattctgcaggtgcggccgggaacttcctgtgccccgctggcgccttgtccttcaacgccttcaagaccgtgatggacatcgataccagcggcaccttcaatgtgtctcgtgtgctctatgagaagttcttccgggtgggtgcctcgtgcgctctgtgagaagttcttccgggtgggtgcctygtgcgctctgtgagaagttcttccgggtgggtrccttgtgcgctctgtgagaagttcttccgggtgggtgtactcccagcgggggcctycccctgacggccgcccgctccctgccctgggcctccccrtgacggccgcccgctccctgccctgggcctcccccgacggccgcccgctccctgccccgggcctccccctgacagccacccgctcactgtcctgtgacctcccccgacacccgcccgctcactgccccrggccttgtgtgttgcaggaccacggaggggtgatcgtgaacatcactgccaccctggggaaccgggggcaggcgctccaggtgcatgcaggctccgccaaggccgctgtgggtatgaccacccccccccgcccaggtttgcccacgtgggtccccaatgggccgtctgcttccatcccaggaggccagcagtctccacttgaagctgagcccagctgcaggcagcgagacctggccttggccctgcgccctcgcagagggcagagcggccctttcatatccaactttcttctgtgcagacgcgatgacgcggcacttggctgtggagtggggtccccaaaacatccgcgtcaacagcctcgcccctggccccatcagtggcacagaggggctccggcgactgggtaaggctctcagggagcccaggcctcccacagatcctctcctggggcacagggtgcccatgaagcttccagaaccttggcagggtgtatgttgaaaagccctgtgctggttccatggtggcaactatgttctgtgcctggcctgatcctgctccatgctaggccttggtgacactgactgtgtccttgctgttcccagatgcctctcagggaatgagctgggggagaggggagggtgctgggtcttggggctcacggggcctgagccttctgctgccctccaggtggccctcaggccagcctgagcaccaaggtcactgccagcccgctgcagaggctggggaacaagaccgagatcgcccacagcgtgctctacctggccagccctctggcttcctacgtgacgggggccgtgctggtggccgatggcggggcatggttgacgttcccaaacggtgtcaaagggctgccggatttcgcatccttctctgctaagctctaggtgaggtactgctcccgcttcttggggtcatctgtgtccttggacgctggtcactgcatgggcaggtctctgcgggacccacggggctggcgtctcctttgtccccatcctcccggccyctgcgccagcctgcccacacatgggtgctgcccagtggggctgagcaggaggcgggcgctggtgyacttgctcttctgtagcggcctcggcctctgccggcatttctggcaggtgctgggtggccgaggcagccgaggtgttttagggggaagccgtcctcagccggctactaagttctgaaactcctgcaggaatcttccggccgctgcttcctgccgcctcactcagccaggtggagagcaccaatctgaaccagcaatgcctgcagcccagcccctcctctgaacactcagctattactgcgctttccctccccacggccccaactccagggcaggagcaactggacagtgggcctggcccgtggagctgccacgcaggtgcctgagggccaggtgccacgcaggtgtctgaggaccaggtgccacgcaggtggtgggggtacagacaagatgctgggatgtcccctgccccatggtcaagggtgtcctgcctgcctgggtccagggcctgagggagccacatggatcccgagacttgtgttctcttggctgaaaacactgaggtgctcccatctgtgcgtggcccatgagctgggatggtcctccagctgcccmcaaggtccgcccctctgtctctgcaccmcctgtttgcataaacacmctttgctacaatcttgctagtgcgttttcttaaaagataatctatttactgtaaaaataaattggactttgcaaaagcttttagaaggaaaagaaagaggattaaagagaattgctggtgatcctatcgtttaggggttgtgtttcctttctgtcttttctgtgatgtttacttattattagtagtagttttgttttctttcttttttttttttttttgagacggcgtctcgctctgtcgcccaggctggagagcagtggcgcagtctcggctcactgcaagctccgcctcccgggttcacgccgttctcctgccgcagcctccggagtagctgggactacaggtgcccaccaccacgcctggctaatttttgtatttttagtagagatgggttttcaccttgttagccaggatggtctcgatctcctgacctcatgatctgcccgctttggcctcccaaagtgctgggattacaggcgtgagccactgcacctggctttattttttatttttaatttttatttttatttttttattttttgagatggagtctcgctctgttgcccaggctggagtgcagtggtgcgatcttggctcactgcaagctccacctcccgggttcacgctattctcctgcctcagcctccctagtagctgggactacaggcgcccgcccccacgcccggctaattttttgtatttttagtagagacggggtttcaccataatagccaggatggtctcaatctcctgaccttgtgatccgcctgcctcggcctcccaaagtgctgggattacaggcgtgagccaccgcatctggcctattattttttttgagagtgtttcgctcttgttgcccaggcgggagtgcagtggtgcgatctcagctcactgcaacctccgcctcccaggttcaagcgattctcctgcctcagcttctcgagtagctgggattacaggcgcccgccaccatgaccggctaattttgtatttttagtagagacggggtttcaccatgttagcccaggctggtcttgaactcccaacctcaggtgatccgcccgcctcagcctcccaaagtgctgggatcacaggcgtgagccaccacgccaggccttctgtgacgtttagaacactcttcctgcctcatgctggaagccccagtctacaggcagggtgctgctctcttggcagaggccgcgtgctcagatgcagccgacactgaatgttgggcccaggaccagccaggccactggttgcctctctcctgggtttggtcactgccacagctttcctcctctgtcgacatggcccccagccctgctgcacgtgggaggtgctgagcagcaggaggctggagggaggtgtgtggctgtgcccaccagggcccccatggctgccctcacaggaggggagcagctcccatcaggtatgcccctcagccctgcggtccccactctgttcctccgagctcccagctcactgtcacaccagaccctgaatgtattcaggcttttacttcctgacaaggaggaaaaaagatttgttttttgttttgttttgtttttgtcagagacagggtctggctctgtcagccaggctggagtgcagtggcacaaacataactcactgcaccctccaaactcctgggctcaagcgatcctcccacctcagcctcctgggtacctgggaccacaggcacacaccgccatgcctggatgttttttgtattttttgtagagacaaggtcttgccatgttgcccaggctggtcttgttttttttttttttttttgagatggagtctcgctctgtcacccaggctggagtgcagtggcgccatctcagctcactgcaccctctgcctcctgggttcaagtgattctcctgcctcagcctcccaagtagctgggcctacaggtgcatgccaccacacccagctaattttttgtattttactagagacgaggtttcacagtgttgcccaggctggtctcaaactcctgagctcaggcagtccacctacctcgtcctcctaaagtgctggaattacaggcgtaagccaccacgcccggctgcccaggctggtcttgaactcctggcctcgtgtgatctgcccgcctcaggactgcaggcgtgagccacggcgcctggccgaggtggagagaagatctgtatattgtagttgactcctgccccgtttggaaaatacagtgtggagcttataactgctgagttggctttttaggtggctgagggttggcctcaccttatgaatgtggccactcccacagctgccgtggcctgggagaggggctgcttccagaaaatgtgtcagcagaccatccattgtgggttcctgactggcaccgaccagcatggccacgacccacacacaccctgtgtgctaagtgctcagcgaattccttccagtgactgcatgggcttcgggaccccctctggtgccagggaacctggggaacctcaaaggcagatcctgggtccctccacaggctctgagggagggatgtggtggagctcagcgaggaagctgggatgcggggccctgggccgggagtatcttccctccttcccttccctccaccagcctctgtgagcctgggcctgccctgctgcctccagatcccagccccagcagccgcctccacaagtcgtggcccagccactgaagagagggacagcattccttctgctggcctcacatccacattcctgaggaaagatgcaagttcacctttggggctagaaatctggctcttgtgcaatgaactgtggtagggccgggcatggtggctcacgcctgtaatcccagcaatttgggaggctgaggctggcaaaacacttgagcccaggagttcaagaccagcctgggcaacaaaatgagactccatcttaatgaataaataaataaataaataaataaataaataaataatgccaggcatggtggctcacacctgtaatcccagcattttgggaggccaagacgggtggatcaggagtttgagagcagcctggccaatacagtgaaacaatatagtgaaaccctctctctactaaaaatacaaaaattagctgggtgtggtggcactcgcctgtaatcccagctacttgggaggctgaggcgggagaattgcttgaacctgggaggcggagcttgcagtgagctgagatggcaggactgcactccaccctgggtgacagagcaagactccatctcaaaaaaaaaatttaaaaaaagccaggcatggtggttcaggcctgtaatcctagcactttggaaggtcaaggtcagtggatcacttgagcctagaattcaagagcagcctgggcaacatagcaagaccttgtctctataaaaataaataaataaaaacaaaaaccaggctgggcatggtggctcacgcctgtaatcccaatgctttgggaggccaaggcgggcagatcacctgaggtcaggagtttgagaccagcctggccaacatggcgaaaaccccatctctactaaaaaaatataaaaattaggtgggcatggtggcacgtgcctgtagtcccagctactcacgagaattgtttgaacccgggaggcagaggttgtggtgaacggagattgcaccactgcactccagcctgggtgacagagcgagactgtgtctcaaaataaataaatacaaaatagtgcgtcggccaggtgcggtggctcatgcctgtaatccaagcactttggaaggccgaggcgggcagatcacccgaggtcaggagttcgagaccagcctgacggaggcagaggttgcggtgagccaagatcacgccattgtactctagcctgggtgacaagagtgaaactccgtctcaaaaaataataataattaaataattaaaaaataaagaataaacagtggctgaaggttggcctcaccttatgaatgtggccactccaacagacgctgtgggctgggagagaggcttcttctagaaaatgtgtcagcagaccatccatcacgggtttctggctggcactgaccagtgttgccatgacccacacacacaccctgctactaagttctcagtgagttcccgagttccttccagtgaccgcatgggtctcagggccgctctctggtgccagggaacctgggaaacctcaaaggcagctgggaggtgccagactgcacctgacaggtgtttgtccaagcaagaatgagaaatattcgccagaaataagaagaattacctttcagctcttcgaccatcacgtgtaacttggaaaactgttacacagggaagaggagagtgatgagaactagcccttcgctgctgctttggaaaatgtagaggggctgagaaacgaagctctgcatagcctctcctgctggctcctcagggcccctctgcaggctgcggtttggcctcagggagcactgagggtgcagaacgggggctctggagggctccaggcctggtgggagccagggcagccaggccatcccaggaagacagagcaggcaccgtagcctcatagtgaggtgttaaaataagaaaaccatcaaaacttgggctgagtcaggaggaattcagttgtgccttatacactcatgttccatttttactctaagacatgtactttaccaaatttgaaggtgagaatacaaattctcccccactgaataaaatatcagtaaacacaagtgaggctctgtgctctcaactgctggaggccacaagggagagtgagacctggtcctaaaggtgacttcgctctaagtttatttactgaatataaaatgttaatgtagttttcacagttgtctggccaggtgcagtggctcatacctataattccagcacttttggaggccaaggcggtggatcacttgaggtcaggagttcgcgaccagcctgaccaacatggtgaaactccatctctactaacaatacaaaaattagtcgggcgtggtggtggacacctgtagtcccagctactcaggaggctgaggcaggaggatcgcttgaacccaggaggcgtaggttgcagtgagccaagatcgcgccagtgcactccagcctgggcaacagagcgagactccatcccaaaaaaaaaaaaaagttgtcagttaaaaatagtttgcaggcagtttttgttgatagctttatggatacacagttgacacaaggcaaaccgcacataggtagagtgtgtaatctgatgaggctgatgcgtctacgtcgtgaagccctcagcactatccaggctgcacgtgtacctggtaatccctccctctcacccatccctaccccttatttcccaagcgactgctgatttgctctctgttgctatttatgttttttatttttattttttgagatggagtctctgtcacccaggctggagtgccgtggtgtgatctcagctcactgaaatctctgcctcccaggttgcctcagcctcccgagtagctgggactacaggcgtgtgccaccacgccagggtaatttttgtatttttagtagagatggggttttgccatgttggccaggcgggtctcatattcctgacttcaagtgatgtgcctgcctcggcctcccgaagtgcggggattacagcggtgagccaccgcgcctgcctggtgtttgtattttctaggattttatgtaagtggagtcataaggtacacactcttttttgtccggcttctctcactgaacctgattgctcccagagtcacctgtgatgtcgtgtgtgtcagtagtgaaatcctcttcagggttgagccgggctccgcgccgggtcctcctgggggttgagccgtgttccgcagtgtggatgtgccagtttgtttattcacctgctgatgagtacttgggttgcttgcaggtttgggctataacaagtaaagctgctatgaacatttgtacagaagtgggtgcatggacacgtactttcatttctcctaggtactaggagtggaatggctgggtcatataaacaatgtatatttagttttatttttttaatttttttttttgagatggagtctcgctctgtcacccaggctagagtgcagtggcgcgatcttggctcactgcaacctccgcctcctgggttccagtg

SEQ ID NO: 94819 - DNA, 14245 bp, Homo sapiens
  misc_feature (1)...(14245): n = A,T,C or G
ggacctgatgctgtgggaggtggggcggggcatggctgctgcctggggagcctgctggaccggggctgaggcaggcggggagtgggcagctggacaggaagtaggtttgggcaccaggcggaacctggccttgggcagccctggggactggctgcagcaggaagagggggtggaggagccgtggcggaggccaacccggggcctgggaagggcacctgtgagcaggctgctctccaggaggcagccagggcacctgtctcacctccgtgctgcctttccctggcattcctgcgaccaagacactcatcaatgccactcagagctcggaatgttcatgtgggaggtggggcgggctctggccttgacctggcgtttggtttctgggatggtggcgtcacctgggagcatgaactccttaggttctggcggggtctctgggctgggtctctggccagccaggcccctttccacccacctaaactctagcagcctccagccctaggctcagcacccctccctgtgcttcagcagcccctcttggcacccctgccactctggcacccctgggattttcccctttgcgggcatcctgggtactctgtgtgtgcccttggccagtcagcaggcccggtgggcttagtccagggctgctagctctcctgttggcctctagtggagatggcacagggtcctgcctgctggtggccaagggctggggcgtgccaggtcctgtctttgcgggtgcaggggtgcggtcagctgtgtgggcagttggaacccacctccaggccctcctgccgcttcgcggaaaaagttcgcgtctcctctggcctcgcagcagccatgttcccccaggtcctccccatcagaggcctctgtcctttggaagatcactcctggggcatcgagcgtgtaagggctcgggcaggagaggctcttaattgtttctgagtcaccacgcttttgtcgtgtttcaagagaacagcttgtcaaaacaagacgccagccggactgaggtggtttctaagcagtggcttcacagctgtttcccacttgtcatctttatgagcagaaaacctgaactgtgtttacaacctagctttgcacattgtcagatttttcccagcatcctccagaagtgcaaaagcccagcttcctcgcctcaggctgtcccgggtgtctggagagcgttcactctcccaggccaagcctgccttgggacggggctctggccaggcctgcctgccctgctgcagtggcccagcccatctcctccgatggaagagtggccccggacgcacatcctccctatgttggtgggagcagtggcaggagcagtggcagcgagcaggacaggcggctgtctcttcacccaaggaccttgtcaccaggattcgcacgtcctcctggctttggggatggggcatctgtgctccatggtgggtctccctgtggacacatttaggggccctggagcatctctgggcagcctgacagagtcgggaggtgtctctccacctctcactctgacctggagaggtgaatgggaccttggctgttgctcggacctgtgtgttgagggctcagtgcaggttgggtccagggtgtggctcagagcagcaggtcccctcccctggagccagcagtctctggggtctctggacaggggcaggtcctggggcttaggcccagatgcttctcctaggtggtgggcacatcaaagaggtcatcgtggctgctgaggcggagctgggagacggtgagatggccgaggccccgggcagcccccaccagcaggggctggggctcgcaggggagggtgagcaggcccaggtgaagctactggtgaacaaggatggccgctatgtgtgtgcgctgtgccacaagaccttcaagacggtgagccggcgtgcggggagccagtgtgtgggtggcaggccccctcctgttcccccaggagggccctgagctgccacgccctcccccacagggcagcatcctcaaggcccacatggtcactcacagcagccgcaaggaccacgagtgcaagctctgtggggcctccttccgcaccaagggctcactcatccggcaccaccggcggcacacgggtgagctggccgcacctcgggctggagcccggtagcaccccgatggttggccctggggtgccccagcctcgcattccccagctttgggggatgaggcgggggcccctgcctgccttcgccttgtcaccttgtcgccagcctgctggggctgcccggggctgactaggttctctctgcagatgagcgcccctacaagtgctccaagtgtggaaagagcttccgggagtcgggtgcactgacccggcacctcaagtctctcaccccctgcacagagaaaatccgcttcagtgtgagcaaggacgtggttgtcagcaaagaggacgcacgtgcaggtcagcatggtgcgggcagctgcctggtcctgggggctggctgtggacgcagccgccactggggtgtgtgagggatcttcactccctcactccaccttgaaggttctggagctggagctgccggcttggggacagccacatcatcggtgacaggcgagcctatagagacttcacccgtgattcacctggtgacagatgccaagggcaccgtcatccacgaagtccacgtccagatgcaggagctgtccctgggcatgaaagccctggccccagaggtgggggcgacggggggccccggagggctgctctgtcttctgcctgctcggtgccagtctttgttctgggcactggctccaggggtctgagccaggcaggcgagggctgggcttcccacagggagagcagggccagtgggagcgccatgggggtctgagggtttgcacaaggctcctggcgtgcgtctgccccatggggtgggtgctggatgccaggctgcctggccagcctcctctctctgcctcccctgcagccccccgtctcccaggagctcccctgctccagcgagggcagccgtgagaacctgctgcaccaggccatgcagaactccggcatcgtccttgagcgcgctgctggggaggagggtgccctggagccagctcctgctgccgggtccagtccccagcccctggcagtggcagccccgcagctgccggtactggaagtgcagccgctggagacagtaggtgccagcaccacctgcgggctcctcccagggctggatcccaggggctgtccccacgctggccttcgcctccctgaagtggctttctgcagtgactttgtccattgatctgtttactgccttccctggggccacaagggagcctgccagggtggggcccatggttgtgttcttggtactgccagggcacagcctgccccgggtgctggagaccttcctgtggttccccagcaggtggccagcgaggcctcagcggtgcccaggacccacccatgtcctcagtgcagtgagaccttcccgacagcagccaccctggaggcccacaagaggggccacaccggtaggtgatgggtgggtgtgtggcccatggcagtggatgggctataggtggccggggtgcttctgggtgtccagggtgggtccatagacagcagggagccaggggatctgtgggcaggtggcaggcggcctggcgggcccgcgggtgatgggcttggcctgatgctgtgtgtggctgcagggccgaggccgttcgcctgcgcgcagtgtggcaaggccttccccaaggcctacctgctcaagaagcaccaggaggtgcacgtgcgtgagcgccgcttccgctgtggcgactgcgggaagctctacaagaccattgcccatgtgcgtggccaccggcgcgtccactcagacgagcggccctacccttgtcccaagtgtggcaagcgctacaagactaaggtgggtctctggccgcaggaccctggcgcctgatccccccatcctgctccctggccgtggcccaggtgcacccccttccctgcctccaccatgctcagtcttgacccagcccctcccttgggccacaggcgggaggggagagctgtagtctgttgtggccaaggccaggctggcactgacaggtgtctccacagaacgcacagcaggtgcacttcaggacacacctggaggagaagccgcacgtgtgccagttctgcagccgtggcttccgagagaagggctcactggtgcggcacgtgcgacaccacacaggcgagaagccgttcaagtgctacaagtgcggccgtggcttcgccgagcacggcacgctgaaccggcacctgcgcaccaaaggtctgggccggtggaggtgggagggggaggggagggggccggggcttgcctagccctgaccgagtccccacccacagggggctgcctgctggaggtggaggagttgctggtgtctgaggacagccccgcggcagccaccaccgtcctcacggaagacccgcacacagtgttggtggagttctcgtccgtggtagctgacacccaggagtatatcatcgaggtgggtgtggggccctggggccgtgctgggacccaggggcagccaaggctgacctctgtccttctgcccatctgcccaggccactgcggacgatgcggagaccagtgaggccacggagatcatcgagggcacccagacagaggtgaggggtagggcaggcgggggcggggaggctccctggcacagccgctcttgctgagccgtggccctgcaggtggacagccacatcatgaaggtggtgcagcagatcgtgcaccaggctagcgccggccaccagatcatcgtgcagaacgtcaccatggacgaggagacggcgctgggcccagaggcggctgccgccgacaccatcaccatcgccacccccgagagcctgacagagcaggtggccatgacgctggcctcggccatcagcgagggcactgtgcttgccgcccgggcagggacaagtggcactgaacaggccactgtgaccatggtgtcatcagaggacatcgagatcctggagcatgcaggcgagctggtcatcgcctcgccggagggccagctggaggtgcagacggtcatcgtctagcatgaggtctgcggggtcctggccgggcagggacagggcagaggactctgagcgccccacccatgcctgcctggcctggtagagaagatggcacaggatggaggcgccccaagacggacagtgtacataagagtttcttgttgctttacaataaaacatgagaacctgcagcttgtgatgttgtggcagtggcagcctccgcggctggtgccaccacctttgcccaggcccccgcagcagcacctgcctcccaggccactcctagactcacgtgcctggccgccccacccaggggcttctgccagccctggcggcgccttggtgctgtgtgggtgtcattggcatgttgaccaacagcctcctgccctgcccagctggagctgtgcccccagctgcgctgcctgaggcctgtgggtgggtgggaggaccagggacggggacagggagatctgggagcctcggcctccaccgcagggtgagcaggtggagcagcagcaggagatgctgggtagggagtgtggctggtcctacctgcgctgccttgctttccctgaagggattctgctcagggaggcagagtctaggcgacctaatttctaggggcgaggacaagaacacagccgcaccgggatgtggctgaccgtctacctccctcctagggggctggcaggggcttctgggacggttttgggacaggtctggggcaccagaaccggctcaggcaggtctcccaccccttaccctgggggtctccatgggaatgaaagccaggagttcatcaggcacccagctgagtcgagggggcgggacccagtgcagcccggcccctccctggcccaggacctcaaataccggcccctgccttggtgccagagctactgccagagggagtcagtgcagtcctgtgtcggacacgcccgcagcctggacccgggatccccatccccctaggatctctgagcctcgggcctctgcacccacatccaaggtgagtctctcggntgccctgagctggggctggatgggccggaccctccattccggctgcagcttcccgcgcagtgagaagrcagcggtccctgagagcccagcagtgccctgggagcctgcagaacgcaggggcggattccgcgtcgcactggccgtcaaggggcggccgcggagggaaggggtgggtcggtgggtctgacagcgggtctgcgtaggcggcagcgtctgtccctcccagcctctcgctccgcgccatgggcgggccccgggctctgctggccgcactctgggcgctggaagccgccgggaccgccgcgcttcgcatcggagccttcaacattcagagcttcggtgacagcaaagtgtcggaccccgcttgcggcagcatcatcgcgaaggtggggcccgggccggggcggggcggcgtttaggggtgctgaccgcgctgacccccgcacccgccgctcctccccagatcctggctggctatgacctcgcgctggtgcaggaggtgcgagacccagacctcagcgccgtgtccgcgctcatggagcagatcaacaggtgtggtgggcagggcccctcgtcgcgaccccccgccgggatctcgccccggcgcggcgccccgaccctgagcgggcccctgtctccrcagcgtgtccgagcacgagtacagctttgtgagcagccagcccctgggccgggaccagtacaaggagatgtacctgttcgtgtacaggtgaggggcgggccgcagggaggggcgcgcggggccgcaggtcgggggctcagcgggtcctccccatctcctaggaaagacgcggtgtcggtcgtggacacctacctgtacccagaccccgaggacgtcttcagccgcgagcccttcgtggtcaagttctcggcccccggcaccggtgagcgggccccgcccctcccctcccgccgagctctgacgcccccaccccttcccgcagcagcacagaacctggtgctgatcccgctgcacgcggcgccgcatcaagccgtggcggagatcgacgcgctctacgacgtgtacctggacgtgatcgacaagtggggcaccgmcgtaagcccacccckcggtcccggggtccctgcaggcgcgccccgggggtctggttcatgagggcgggacctcgacggctcctgcggcggctcagacrcggctccgcggcgcccgcaggacatgctgttcctgggcgacttcaacgccgactgcagctatgtgcgggcgcaggactgggccgccatccgtctgaggagcagtgaggtcttcaagtggctcatccctgacagcgccgacaccacggtgggcaactcagactgcgcctacgaccgcattgtggcctgtggcgcccgcctgcgccggagcctgaagccccagtcggccaccgtgcacgacttccaggaggaattcggcctggaccagactcaggcgagtgggccgtggggcggtgctggtsttgggtycccaccgcccgggcgcacgcaggcagcagggagggtccagcgcccaaggcagggccacctcagcttcctccctgcaccagggctcgtttccaaggaccctggagagcccggcccaccccatgtggagctctgggcaggcagggtaccttgcctttccctcaaagggccartggtgacaccctctgccccggcccctgcccctgccccaccgcaggcagcagcaggggtgggcacccaggcctcaccggcccctcccatccctgtgggtggggtgcacttttcccctgaggytcactctgtccccacaggctcttgccatcagcgaccactttccagtggaggtgaccctcaagttccaccgatgactcgaggcctggctggggcatgccacctgcagaccctggctctgaggaatggcccaacagtggccccttcagggtggcagccacccttcagtgaggccccaaggcagagtcggctgggcgtggaccaggggccatggacacgtgatgtgctgctctgtacctccgttccccatctgtgggacgggctgcatccagcgacctcatggggtgttgtgagccccatgaggggtgcagggggcactgcccggcagatgtctgctcaataaatgagctgctcccggtcgggccccacagcttggctcccaggcctctgtccttccttaggacccagcctcagctccttaggggcagccatggcctgggctgcccaccccatgtcctggtgggacgtggctgcccccggagcctgctggccccagaaggcagctcagggatgctccttgctcatcctctgtggaaactacaaacgctcccaggagcctgtactgtgagcacagctgggacagggatggcgccaacacaccagcctcctgggccctcggggctctcagaacagctctccccaggcccaccccgcagcccccattccagggccctgcaggggcccccaggcacttgtctgtctcaagagcccggtcttacccagcactgcaaggggaggccagccccagctagtcagcagccctggagcttttggagagcctgagagcagtgggcgggctggactcctccctgcccaggcaggtggcttgggactaaggtcccgtgcaaagaaccgcccagctcgccgtggctcagcccttcaaggctgctgccctgtgcctgggcaaggacacattaggatagggaaaaggcaggcccacgggtccactgggtcactgactggggcccgatgaggtttctggtttttgaaacatcacatcttagcaagatgtggtaacttggtctgaatcgcatgggaggaaaaacctttgtttcaagggtttggatgagtttggttcttgcaaaatccttcttaagggacatttggatccctggcagcacagctgcctccagagtcccactcccgctggctcaggatcccccagttgctctgattcactgtgcgctcttcatcctgatgagtaagggcagtgaccaaagggcttttccctggggagttctgtgtgggtcatgggggccaagaccacctggccttacacctaagagcaggcagtccaaaggccagaatggatgaccagggacttgacttacgattctgccttgggaacagagacactccgtggcaacctcaccaggtccagaatggcatcccctgccagtcacaatcccaagtcaaaaggctgccctccaactccccttgcctgacgggcacaggcacccatgtgtgtttgtgtgtggctgggccttgggccactgggctatgaggaacaggaacttctacgtaacatcagcaaaatgaaacgctggcagtacttttaagttgaaaaataccttgtttaagacctccctgggacccacaggggcacgtgtggccgtaagcctgtggcagcccaatcgttagcctttttcttctttgagcctctctaagtacatctgcagggacttctggatggagtctttggagatgaagctgacgaagttctgcacgtccgcatcgcgctgcgtgaccaggcggctggccgtggcctttcgcatcatggccttggtcagctgtcgagcatggtctaaagagaatgggacgtgccactgaaatcccactttcaggggcagtggggtgattcccaacttattttttattttttttttttgagacggagtcttgctctgtcgcccaggctggagtgcaatggtgggatcttggctcactgcaacctccgcctcccgagttcaagtgattctcctgcctcagcctcttgagtagctgggattacaaccgtgtgccaccacacccggctaattttgtatttttagtagagatgggatttcctcatgttggccaggctggtcccgaactcctgacctcaggtgatccacccatctcggcctccccaagtgctgggattccaggcatgagccaccacgcccggccctaatttttttttgttttgttttgtttttaaagagacaggatattctctgtcgcccatactggagtgcactagtgatcacgactcactgcagccttgaatccctgggctcaggtgatcctctcacctcagcctcctgagtagctgggactacaggcgtgcacacacatcctggctaattttgtattatttatttatttatttttgagatggagtctgtctctgccacccaggctggactacagtggcgtgaccttggctcactgcaacctccgcctcccaagttcaagcacttctcctgcctcagcctcctgagtagctgggattacaggagcattaccatgcccggctaatttttgtatttttagtagagaaggggtttcaccatgttggtcaggctgatctcgaactcctgacctcaggtgatccaccctccttggcctcccaaagtgccgggattgcaggtgtgagccaccgcgcccagcgacttaacgtgtcattttcactcaactatattatgaagaatatttccacgacgcaggaggctgaggcaggagaatggcacgaacccaggaggtggaggttgcagtgagctgagatcgcaccactgcactccagcctgagcaagagggagactccatctcaaaaaaaataaataaataaaataaaaataaaaaaatttccatggcactatattaaatactgtcttacagcacaggaaatggcagcacagccttcagtcatttgtatcagggttggcaaatctggcttctcaaggccctgaagctatgaatagtttttactttttttgagaggagtctcactctgtcgtcctggctggagcgcagtagcatgatcttggctcactgcaacctccgcctcccaggttcaagtgattctccggcctcagccttcccaagtagctgggattacaggtacctgcccccacacccggctaatttttgtatttttagtagagacggggttttgccatgttggccaggctggtctaaaactcctgacctcaggtgatccgcccaccttggcctctcaaagtgctgggattacaggcttcagccactgtgccgggctggtttttacatttttgaatagttgaaaatcaaaagaaggttagtattttgtgacatgtgaaaattatgtgaaactcaaatttcagtgtccataaaattttttttgttgtttttgagacagagtctcactctgtcacccaggctggggtacaatggcatgatcttggctcactgcaacctctgcctcccaagttcaagcgattctcctgcctcaacctcccagtagctggaattacaggcacgtgccatcacgcccggctcatttttttttttttttttgagacagagtcctgctctctgttgctcaggctagagtacagtggtgcgatctcagctcactgcaagctccgcctcccgggttcacgccatcctcctgcctcagcctctcgagtagctgggactacaggcgcccgccgccacacctggctaatttttgtatttttagtagagacagggtttcaccgtgttagccaggatggtcttgatctcctgaccttgtgatccgcccgcctcggcctcttaaaatgttgggattacaggtgtgagccaccgcgcctggcccatttctgtatttttagtagagatggggtttcaccatgttggccaggctggtcttgaactcctgatctcaagtgatctgcctgcctcagcctcccaaagtgctgagattacaggcgtgagccaccgcacctggcccactgtccataaagctttgccggaacacagctatacctgtcagtttacgtctcctctgtggctgctttctgctacaaaggtcttacctacagagcccacaagccacctggccctttagagacagaatttgctgggccctggtctataccatcgctgatatgaccagctctttttctatgaagtggacaattgtctttgtagtaggttgaaaagtgtgccccaaaagataggtccaagccctaaccactgctctggaacttggaagtgtgaccttatttggaaagagtctctgcagatgtaattaagttgggatcatcttggatttaaggtaggtcctaaatcacatggcaggtgtcctgagaagggagagagagacctgagacccacagaaacacaggggagaaagctgcgtaaggatggaggcagagattagagcgaggcgcccacaagcccagggaggcctggagccagcagaagtgggcggggcaggaaggagcctccctggaacgcagggaggaagtgcagtcctgcccacactttgattttgcacctctggtctccagcaccgtgagatgagcttctgcggtctgggccacccggtctgtgctgcgttgttacagcagcctcctgacacccacatggctgtgattatcaacagtctcccgaagtcacgatgtccacagaaaacctttgggtggagaaccttctggtctccccagcatcatcgggcgcccgccatgccccgtgcctcacctggaatggccatccactgggctatcgctgacagcgcagtgctctgcacctgctcctccgggaccacctggtccactatgcccacctgcagggcctccgccggcgggaagagcagccccagctgcagggcacgctccgccgcccggtgcccgatggtgttctccagggtgtctttcaacctggaaatgcagacacccactcaccacatggccccaggcgggtctgttccctccacaacaagcatggagcgtggctgcagcccagggccttaccagaaaggggcgatgatgcccagctgggtctcattgagtcctatgcagtacctggggttgtccgccaggatgcggtagtcacaggtcagggccaccaggcagcctccagcggggcaggctccctgcagggagaggccggacagggctcttaggtgctgctggtcccaaccacattccagagggccaggtccaaggaaggagggcctgtgcccttggcgcaccccgacccccgcagggttcaacacccacaatggtctgggctgggctgggtgtgcactgggaaatggatgaggaaggaactggccccttagcgctcggcaaggagggtctgaggctcgtcctcagccgagggtcattagttcttcggcaacagataaatcacttttaaaaaccattcagttaggggagcaagtcgcttgtcctctcagtgcttttactcaatgctaaaatgccacacaagcatttagtcataactgtcatgccccaagggggccccgataccaccccagcagctagcgcaaccaggatgtcctgggaaccccacactcaccctgtggtcactgcaggtacccactgccccgcgcaggacccatcctgtctgcatggccgtgcacccttgaggcttcctctcacaccagccctcccctccaccaggctccggcccacacccggcttgtcacagccaccccgcaggacaccctggttcctgaggttaagcccccgtgttgttctcggcttccctggccttcccccagaagggatggagtgatgtttccaaaatgtgggtccgatcacccactcacccacacagcctccacccaggctggcatcaaccccaggccctggtccctacccactggctcttttctgggtcttgtctgattgacccaggccagggccctcacccgaggcccacctttctcaacacgccccgtggtctgcgatggcgctcacctgtgcacatctcagggcctctccaaccgtccccttcccctgtgagagattccaagggcaggacagtgtctgtcccaccccctggcgctggcccagaacagccagcgaggccacctgggagtggggacactcacgttgatggcggagaccagcaccaggttggactggtacaaccgcagccacagctcctgaacggccttccagtacccagcgtagtgggcggggctcctcccacacatctccgtcaggtccaggccggccgagaagacacccgggcggtcctgcagggggagccggggccacatgcccatcagagtccacctcccagctggcatcacagcaggagggctggggagcccaggtgcacgacgcacagcagggccaggtcacgctcagggtgtgggtgctgccccacagagccaggactaggcgctcc

SEQ ID NO: 94820 - DNA, 171554 bp, Homo sapiens
  misc_feature (1)...(171554): n = A,T,C or G
ttaattaattagtttggtcatttattcattcaacaaatatttattgaacatctactatgtgccaggcactattacgggtgctagggatatattaatgactaagacccagtctttgctctaatgaagcttaattctagtgacttagaccataaacaaatgatcacacagataatgtaatgtgataaatgccatgacaaagcaggataaggagatggaatgtgatggatgtgagtggcaatgttagatagtgtagttaagaaggctctgctgggcacggtggctcatgcctgtaatcccagagctttgggaggccaaggcaggtggatcacgaggtcaggagttcgagaccagtctggccaacatggtgaaaccccgtttctactaaaaatacaaaaattaactgggcgtggtgacacgcacctgtaatcctagctactcgggaggctgaggcaggagacccactagagcccaggaggcagaggttgtagtgagccgagatcacaccatagcactccaggtctgggagacagagtgagactctatctcaaaaaaaaaaaaaaaaaaaagaaaaaaagaaaaaaaagaagaaaagaagaaggctctcagaattgatgactttttgttgttgttgttgttttactgagatggagtctcactctgttgcccaagctggaatgcagtggtgtgatctcggctcactgcaacctctgactcctgggttcaagcgattctcctgcctcagcctcccaagtagctgggaatataggcacgcgccaccacgcccagctaatttttttgtatttttagtagagacggggtttcaccatgttggtcaggctggtctcgaactcctgacctcatgatccatcgctttggcctcccaaagtgctgggattacaggcatgagccaccgtgcctggttgacttttgaatagacacttccatggggccaggggatatgccatgcagttactacacctggcatattgttttcatttcagattgccgcacattagttagaatatgaactgtagctttctccaatgagattaaaaaaagaaaaaggaacccaatgccatgtcatatgaaaaaaagttcaacacattggcaatgtttagcctggaagagacagagcttaggaggaatgtgatgaattccttcaaaatgtttaaggactctatggaagaaggactagatttgttccttctggactatagggtaaaagttacagggagatatctattggctgatcaaaggtgaaatctttttttttttaggtaaagaaagattgagcacttgatagtgagattatggaagggctaggagggacagacaaacagactggatgacttaagattctttctgaaagactttgattctatgacctttagtaatggtataattattacttcacaacatcccattccatggccttctcattaaggagaatggaatgtggatgaggcagccatctccaagaaaggaaggtaaagtcccatggatctatttcccaatttattgccaaatacttacttccccaaggacttcactggttgaatccttccccaaactgggtaactttctctgccattcacttccaagggccagtaggcaaatttaatcaattacttaggaaactgaacaggttttggacaagtaatctggcaatgaaaagagtgttttccctcccagggaacggcttcctctgattctggtttctgagttcccacttccccctctgacaggttttgttgcatgattgtaggggaattggaacttagtccaggaacttggtccaaacttaaaatcccaagggactcagcttactccctcactcttcttccctcgtttccctacaggaaagtcatcatcagcacaaacccactgagaacctctggctgccccgcatgcctcagaaaaaaaagttaagatctaagctgaaaccaatcttccctttgatactgtcggatgatcccacatccaagcgagaacaatggtttaggtgaaatcttgcttcttcttgtacttgctttctttcctatcttttccctattcacgtttctggttctttgccatacaatttaatgacatattctttggtcgtacaaagatagtaagacacgactttccctacatgaccctaacctcattgacacatgaatcaaagagaaacagtcatgcaaaactaaggttttgcactggcaatggtttcaagattgaggggaaatattccaaggtctgtgctttgaagaaacaggaaaaaaaaaaaagtaccctcagtacaagttaggcgctatatcacaggaaccatgtgctatgagaacacattagacaaaagaggttttatgtgaaactacttacaagagcagcctatgtgtagtttagagaggacagaagagattctggagttcctccaaaggtttacagtgttaagttcagaagcatcccttgtcacggaacaatattcctacttggcaccaatcaacaggctcctatcattgtcttgtcttctctgagaatgtagccaactttaaagtgaatggtggggctgggcgcggtgtctcatgcctgtaatcccagcacttcaggaggccaaggtgggcagatcacttgagctcaggagttcgagaccagcctggccaacatggtgaaaaccgtctctactaaaaatacaaaaattagccaggcgtggtggcaagtgcctgtaatcccagctacttgggaggctgaggcaggagaatcgcttgaacctgggaggcagaggttgcagtgaaccaagatcatgccactgcactccagcttgggtgacagaacaagacttgtgtctcaaaataaatacataaaataaaataaaataaaataaaataaaataaaataaaataaagtgaatagttccatgaatccccctgccctaggatctactaaacaaagaactttctttgttaaggttttccactgacaatgatttcaagagcgaagggaagtattcaaaagtctacgctttgaggacacagaagaaaatgtaccctcagctcacctttgctccagtccatgagagagatatgaggaaagatggtaagctcctctctttcaaagcaaaggcttactggactgagatttgggctggagatacaatccatgaggattatagatgtggcaaactggcttctctcgtggtagtcctggagactatttttccctatagcatggaagttaacaacaaatagaggctcaaaaggtgcaaagctctggaccctgtttaaatcctcaaatttcaagaaagctctagcagtgtttactaagctatatcacccagcactttaatagtttttgccatattgatgtattatttgctgttaatttacttagcattttttaaaaggatttttaaaaaatcttgtcctaattaatactatatcattgatatcatggttttgatgtacaaattatatgcttttctgaaacacttatatcaaatttataataatgaaattttaaaatgtttatctatgtaccacctagaaccacccagtggtatgcatattatactttgaagaaaaaactgctctaaaagggccaaaggataagtctgtgtgtcttagaggtacaaaagtctctgggattggggtagggaatggggtagaaggggcttggaataaggttgtatggcagagggtacaatgagaatcctcctcacatattatcatttatttaacagtatttcaagggttcctactaagtgtctgacacttaccaagcaccaacaatatcactttcaatatgtgaaagagatgaaacagatcataaaaggccttgacaggctgggcgtgtccgtaatcctagcagtttgggaggctggggcaggaggattgctggaggccaggggcttgacactagcctgggcaacatagtgagatcctgtctctacaaaaaataatttaaaaaaatttaacagggtgtggcggcatgcacctgtagtctgagctacttggggggcttgaggaaggaggattgcttgaacctaggagttcaaggttgcagttagctgtgattatgccattgcactccagcctgggtaacagagtgagaccctgtctgaaaaacaaacaaacaacaataacaagaaatcgaaaataccacaatgccttaaatattatttaaataaaggtttgggttttatccagtaggcagtttggacccaatgaagaatttcagggcactgagtacacatttgtgtattagatatatataattggtgggtcctcagacttcaccagctcatggttttaagataaggtccatttctcctactgggtttctctcctcaaacaattcctgagactccctaaggtatccttgcctgtcccacaaagccattgcagtgattgctcaacccgtctgccagccatcctcagtccaaatagtcctgataccgaaggcctggggtcatattataccatcccttaactggcttcttcaggcttctctgctcctgctatacctatctgccaccacatcccatcccatttccacctactgatgctcttaactccgtaaatactgcacagctaaaaacaacctgtggtattaaacaaaacttcatagatatacagaaaagctgaagaacagcagagaatgattgatcttgctttacaaggggctagtcttagggtcagccccaaatctgaactcaggtccttctacttctcagcaggtctccggggcattacccaccttgagaacctctgggcctattatctacactgtctctgcctaggttcccaatacccttgggccaaggaagaggaagaggatgtttccttccccaaagcctgtttattttcacccccagaataaatgagtgcagacttctatttccttcaaagaaaactccacctacaaagtatgacttgacctttacaagccatataaagcaaacatagtagttaatagtacatttagtcaagtcggagttaaatcttaaatgataccatatgtaggatatcaacagttcatcttaaatctgtatttcagggaaagaatttctctaggatgtagaatgtaatctaggttagaatttctctaattttgcaggggcacgatcctgttgagtatagacccaatttacatttctaaacaagttatgccagtgaagccaaaggcagacaaagtttcttagctacactcttagacaagagaacagaaagccagcatacactctgagaaaaagaggaacatgagttaggaatgaatgcacgttaatttagtgagtttcttaagtgtcaatatggtttcagatggaatcattgaaagaaataggcttgaacaaggaagactctaaactggcaatgaattttccactgggttttgatgaaatgaaggaatccaaaaattataaaataggttgggaatggtattacacggtccaaaatctaccctctaaagaccagcctctggtccctccaagtgcgtctcctttacatctcacattaagtatccttcgagtacttctgaaaagccacattcaccagggtgcctgtgctttgtcgtagcttccaagaagtcagcgagtgaaaggccaatttccaaagtgattcgggaaccactgacactcgcatcgctcttggaagacatgcccaccagaaccgcgcccggggagagcgccttccgcaacgggagggccccgcagtggattatcaaaaaggccacggtcatcgggtgaacacagacccctcagtcctcccgcctcgctctcttgagactgaggggtccgcagaagtcgccacccaaataaaaccacattcctgctgctgcgggcgtgggctcccgggtcgcaagccgggagggtcgagccgaagtctccggcgggccgcaagaggagaagggggcgtggctgcgtcccgggggccgagggcggccggggagggcgggccttggccccgagtgaaggcgcggcggcccaaccggcgtgagagcgcggggccggccttcctgcagcctcttccgctcgccggctgcggcgcctgggacggttgcggtgggtctgggcgctgggaagtcgtccaagatgattaaaaaattcgacaagaaggacgaggagtctggtacgcgcggggcttccgaggcccaccctcagccgcgggacgccccttcccccgcccgccgccacctgctttcaggccggcggggctgggggcgtgggcgccgccgtgccagggggccggagctggagccggcccctcccctcccctcgcggctgcccggggcctgcccgtagcccctcccccgggcgccggagcctcccttcgggccgcgcgctcccgccccggcgcccgcgcgcgccccgttcccgcccctcttgcggcgcagcccctccgagccgcctcctcccctgcgcgcgggcctccggcgggggccgagggcgtgcgcgcgtctccgcgtccaggggtgctggtagggtcggacccctagtgggagcaccctgttcccggggctggggtcgacggcacagggtgtgtgtggaggaacgttcaggtgcctggtaccttatcgttttcctggggtcaccggctctgtccaggtccccgggggcaagactgtcccgtgggacacagctcgttgaatgctcaggtgtccagaagtgacctgcgtcttgatgcccgtctttggtccagagcaaatggggaagatgccaagcatcctcaaaaagaaaaaaattctcagtgtttggtagcatctcccacagtgtgagagggggttgggttagtcaacctccatggcctcttgcacctttacgcctgcatgattctctgggaaacttcgtttctgcctctccttaagtgttagaaacacataaaatactgcttacctaaggaaatcaaaagcaccctactacaatctcattaatcttcgttgttgtggaaatgacacatttttaacattcatggaaaaagagggcagggaaagaagacactcattttggagagggttgctgcgaaagagaagtctcagctcttcgagtatggcagtgacagagccgggatcaaaatgatttcattcagttcgtatgcgtattagccatgattatcactgtgccatccaagtgttcacttcccaagcattcagtacccttctctggaaagtatataagtttgtgtagaacagctgttcaggacatttttttgttttgttttataaataggtagtggctccaatcctttccagcatctggagaagagtgctgttttacaggaggtatgactgggaagtatcttgtgccctttcttttctattctgttttagagtggtgggcagagaatccctgggctgctgtgatcacgacatgcaaaacaagaaacgtaacagagtttagggaatatagatttgagggaaaagaaagaggggttacttgtcacaggagaatttggagcttatagaaatgcaaagacatgaagactgtcacaggttgggaattttaaatgtaagaacaggtgtttagtgcaaggttatwgaaatcagttatctgtattaatctcattgtattagtatgatatagataagtattgtgatccttatttaactggtatagcccataaagttgaagtagtcaacctaagggaatgagaaagtataggatggaaaatcaaggccacgtgtaataatttatcagataccttagtaaattgagaactrtagacaatgttctttggataccgtgattaaaaatagtctgtattaaagttgatttgctataatctgtgatagaaaaggtagaaaagtagcaatgttttttatgttttttcataggctcgtatattcaatgaaactccaatcaatccaagaagatgtttgcatattcttacaaagattctttacttactgaaccaggtatattatttttattttcctcagataagtgtgtcctggaatagaaatactgaagattcagtgaaatactttctggaaagtatatttatttattttaaattcacttaattttaacatatacaacgtttggttaacaaaataatatgtaaaacttgagtacgaggactatgacatatacaggttgagtataccttctttgcaatgctyggaaccagaagtgttttggatttcagatttttttggattttggaatatttgcagaatacatactcactgactattgctaatctgagtatctgaaatccagaatgctctgatgagtgtctccactgagtgttatattggcactcaaaaaatttctgattttggagcatttcagattttggattttgagattagagatgtttaacctrtacttcctttttattcatgagatcctaaaccagtgatgcgcatagtagattctcaataaatcctttggtttcaatttaatgagtactagttagagcatgttgtttacatgtatttggagatcttcatgtttttctgaaaatacagtgcaagatcaggcaaattccagatattttcttttttatgtgtgtaatgatgttttaaagctttgattgttaatattcagattttatatttattatccctatgctaccattactagcagaataattctgggcagtagcttaaccattttatgtgccttgatgtccttttctctacatggggattatgataatacctgttacagagttgtaatgactaaatgagataattagtgtaaagcactgagaatagtcctgaacatacagtaagcattcaggaatagttttccttccrtcattcagcaaatatttattgcgtagctgctgtgtgctgtgcactgttttaggtgttggggatatagcagacaaaccagcaaaaatatttgcgctcatgaaatgtagattctgcttgctgctgttgttattaatttttcttttctttttcttttttttttttttgccccagacttaaaaaaaactcatgaaatgtctagggccttagaaaatatgattttgtttcatggattcatattccctcagtatcagtggggaattggttccaggacctccattggatactaaagtccatagatgctcaagtccctcatacaaatggtgtagtatttgcatataacctacacatatcctcccatatataagttgtctctgtgattataatacttagactataatctctagattacaatacctggtgcaatgttagtgctgtgtaaatagttgttgtgctgtattgtttagggaataatgacaaaaaaccatctgtacgtgttcagtacaaacatagttttttttttccttgaatattttcaatctgagcctggttgaatccacagattcagaactcatggttatggagggctgactatatatgtctatacacatacagacggacacataaaacatacatatataccatatacctcaggtggtttacatatggtgctaagataaccatggtttccaatttgaattctaagagaatatattatctttactttgttttgtgactgaagacctcactcagagatttaataaagttttcttgtttacaaatgaagactaagcaacaagcacatagattttttttattttttgagatggagtctcgctctgttaccaggctggagtgcagtggcgcaatctcggctcactacaacctccacctccctggttcaagcaattctcctactttagcctcctgagtagctgggattacaggcatgcaccaccacgcctggctaatttttatatttttagtagagacggggtttcaccatattggccaggtgggtctcaaactcctgaccttaggtgatccgcccacctcagcttcccaaagtcctgggattacaggtgtgagctactgtgcctgatcatcaaacacatagttttaaataaaatatatctgttcacaaacaacataatccctctgtgtcagcatatgagaaacatttaaagcatagtcaattgggtttaacttttcatagcacacattgtgtctaagttggccaaatccattgtataaacaaaagttttgaatagtcaaagttgattgagagtaacatgtatttttatgttggtcattacctcttcaatgaggcaactcatgttgaaacatttaattatcttgataaggaaattaccaagcacagcataaacacaattaactatataaacaggtttgggaacataaattttatctctttgcctagaacttggtagagctttatagaaagatacttttgaatttctatgagagttgacatatccatgtgttttctgagtttcaagtaaaaaagtagratgtaaggttttcctgtataactaaaaagcacacagacttctgggtattcagtaaatagttgtgaaagaaagataaatctcatgctgatgagcaggctggatacactgatttaagtaagtataaacttattgtactttgtcttttatcctaaactgtcagtatttttcaccaaaatttattcttatacctatggcaaatagattgaagactagttatattttatgtggaatctgaagctctgaaaagtgattgagtgtaacgtattatataagattgcttttagtgaagacattaaatattgaaatggtaatatttgaggtaatctatgatttgagatgttttgaaatacgttatctaacactttttcactgctcagaaaatgtagttcccagatcagcatttgcatcacttgttagaaatgccaaatctcaggccaggcgcagtggctcaagcctgtaatcccagcactttgggaggccgaggcaggtggatcacgaggtcaggagttcaagaccagcctggccaacatggtgaaaccccgtctctactaaagataacaaaaaattagttgggcgtggtggtgcacacctgtaatcacagctacttgggaggctgaggcaggagaatcacttgaacccaggaggtggaggttgcagtgagccaagattgcgccattgcactccaacctgagcaacagggtgagactccgtctcaaaaaaaaaaaaaaaaaaaaaaaaaagaaaagaaatgcaaaatctcaggctttaccccagagccactgaatcagaatctgcattttggcaagatcccaggatgaattgtcatgctcattaaactgtttgaagctctgatccaaagcatgtttttaggggcttgaaccaatattgagctacatagcagccccttaagcctagttttttaatatgatgaatctggttcctgcccttttggttggtccccttcttgccattttgctgagattctgaatagatagttccttatattttaatatttattatgctcccatgacatgttaggcattgtgctgggcattatagatatgatctctgctcttaggcagtgtaataataatgtcctattgtgagtgctgtaattttctccctccttgtaaactacaatacttcaggaaaatttcagatactttctactaaaagtttagagatcactatgccagaacttttaagcatggtatgcgatactgaattattttaaataaggggggataaatggctatgtgggtttatrcattgaaagccagaaaaattgcagaggcagaatgtttacaaagagattcttttttcttgagttctaaaggatttttgcagaaatagaaaatcctgtgtgtgtatatgtacatatatatgaatatacactttttaaaatttaaaaattgttttaaattttacttagggtgaacactttggaacaacggaagctacagaagccttctttgcaatgacgcgattgtttcaatctaatgatgtaagtctttttaaattttttttacgatgaaaaacctccttttatttattttccccagggaactaagagtgttctaaattagggagcattgcttgaaatgttttaaattatttaactgcntataaaacttataaatattcattataagacgtgaaaatggaagaattaaagyatgcagtgtaaaacttttccctgcagatctaccgtgaagtcataaagactgttaatacctagcttctggcatgacactgtgaaggtggactgataaagaagtcagtgcacatagctaccacatttgtcagttcttagtcaagtttctggtgggcctgggattgctgttagtcagcagtgctggcagttgagaagaagagctggatgtggagtggggaaggggaataaggaatagaataaggaaaaagaaaaatgagtacaaactaaacctgcctctcattaccttaggccaccctgaccttcagaacatacagctgctgctttttgtctgtcttctaagtgttgtgtacatttttcttttgcctagctctaaggcagaaccatacagggaaggtaattctgggatatgtattttccagctttccattaacataaattggccaaatcctgcagttttttggtatgtattgcatatcatcacatgtcacattttgtgtcaacccccagaacctcttgagatttgagtcttgttatggatctaaataatgagaggttttaggagtagatcttcaggaagatcagcagtcccctgtaaggcagctgtttcaggggaggccattatatactctacaggcaaaggaagactaatttcctcacatatgggataaaggactgatgcttctactagcagaagatgtcacagaatttaggagttcggggtacttggcttcatcagagtctgtccatatatcttcattctacttttcagggccccattccttgccagtcaaggtcctaactttaacataagatgtcctgcaagagtgtgaattcaatttgcattgtaactgagccacctgcaggatatactttgtagaagtctcagccctgtagccacatgatataaggctttctatgaaggcagttatagatttctggcccccttacccagatttgagtagtgcttttaaaactccgagctcatcattttcttttcctgagaaaagaattatccagtgtacctagaaacaactaattaacccattatacaacttatttttactaaaatcttctatggcatcmactagttagttacccaaggctttgtcttctgtaggtccttgtctgcagatgatgattttaaatattttgccactgcatgcygtggactactagtagcccctttaccattggaaactggtcattaataccttcaatcaaatcagagaagcaacttcaggttcatatctttaaggacttcttttaaccacttcctgtagcagaaattcagggttcagacagggaaacagaaccactatgagtattgtggaattaggtgtttattagaggaattagactagaaaactaggcaggttgagctgctggagtagggttcagagggaggctgttacataagtcatggaaggctattgcctcttttgtggctttgtttttgcagccaggtgtcttcccaaggctgctgttactcagagggctggcagttgggaagaaaagctggacatgtagtggagaaaaggaagcagagtaagaaagaaaaaggatgaggacaaacttttgaagcctgtagcacagaggtttatattaagaaaagaagatatgaaattgtcttctaggaaatggattagggaaatgtaggattgttcgataggactaatagcctgttgaagttagtgcttatgaatttaaagtattaccaatgtttttctccagctacatggtgaatgtttttctccagctacagcctgcaggttaaagcactgaaggcttagagataggatttaatcaggattgaagttttgccaggttagtgaacagagggagaagcaaaaaagttgagtggttggaacatcgactgtggaatcttcggttaggagggaagcaagaacgggctgacagggacagcaaaaagttggtagaaccagtggattgtaggtcaagagagagtgaaagaagtttggagtcaggagtgtgagtgcttgggaatgaaattagaaagggatgctgttactgataggctgtggcagtgggtgatcattgtagggaggatggcatcattggagaagaggaggtcgaggaatgaagaggtcagaggtttagagataccatctgtatggatattaaaatcaccaatacttattactgggattgcactggagagacagtgaacaaggtactggtattttttaaaaataagggaagtgacctggggtttaatggacaaccagcaatggtagcaggtgacatagtataaaggcataagcttccccacctgtaggcctggtggtatgagggttatgggagagaaaacagctgctatttcagagggttgcaggaggatccctgggagagaaccaggtttcagttaaagaaaaagatgggaacattcagagaagagtttgagaatataggggattttgctgatgaaagtgtcagagaatataatggcgctgattagaagggtggaaaatggagtcagacgaggtgctgtacccagatgcaaggaataagtctgcaggttatgaataatgaccagagtattttaggctttttgtagtgactgaggtaagtagccatgtacagcatgatgtgattagttttaatgattccttaggcaaaaatacggaattgagggagtgattgttttgggacaaagagaggtagagattttgccagaaataygtggagctccttccgttaccagcattcctttaccagaaggtaattactgtcttgaagttggtattcttctatcgttgtttatattaatatatgaggattacatagtttacatctgtaatcaatactttgcatttttgtgtgtcttaaaatataaaaataacatcttcttcttttgcaatgttgttgttgttgtttttgagttgtcgcccaggctgaagtgcagtggcgcgatcttggctcactgcagcctccgcctcccgggtttgagcgattctcctgcctcagcctctggagtagctgggactgtgggcacgtgccaccatgcctgtctaatttttgtatttttagtagagacagggtttcatcatgttggccaggatggtctcaatttcctgacctctttatctgcccgccttggcctcccaaagtactgggattataggcctgagccaccacacccagcctgcagtgtttataattaatacatttttaagatttactggcttgttacatgtacttctactttatttactttcactactatatggaattccaatatgtgaatatacagtaattctatttatccattctcccattggtagatataagttgttcccacattttacctattacaaatgatactgcacataatgtttatgtacacagtgagactttttctggagtagatacctacaagtggaatttctagataatgcttgtttgttcgttttttttttttttttttttttttttgagacggagtcttgctctgtcgcccaggctggagtgcaatggcatgatctcggctcactgcaacctttgcctcccaggttcacgccattctcctgcctcagcctcctgagtagctgggactacaggcacccgccaccacacctggataattttttgtatttttagtagagacggggtttcactgtgttagccaggatggtctcgatctgctgaccttgtgatccgcccgtctcagcctcccaaagtgctgggattgcaggcgtaagctaccgcgcccggcctaagcatattttcatgtacttatttgccatctgtatatctgctttgatgaagtgtctgttaaaatttgttaccacttaaaaaaatcaggttgtcggctgggcccggtggctcacgcctgtaatctcagcactttaggaggctgaggtgggcagatcatgaggtcaggagttttagaccagcctggtcaacatagtgaaaccctgtctctactaaaaatacaaaaaattagctgggtgtgctggcaggcacctgtaatcccagctacttgggaggctgaggtgggagaatcacttgaacccaggagggggagattgcagtgagggagatcgtgccactgcactccagcccaggtaacagtgcaagactccgtgtcaaaaaaaaaaaaatcaggttgtcatcttactgagttataagtttctttatgtattctggatagaagtcctttatcagacagatgttttgtaaatatttcctcccagtctgtggcttgccttttcatttactggactattattttttttttaagtgtagttttacatgcggtaaaattcatcctttttagggtatcattctatgagctttgacaaacacatatagtggtgttatcaccaccacaattgaggtttagaacatttccatctcctcaaaaagttcccccgtgtctctttatcatctgtttctccttgcctccctcagcccctggcaatctatctcctttctgtccttataaatttgccttttccaggaagtcatatgaatgatatcatactgtatgaagccttttttgagtttcttttcagttacttagcataatgcatgtgagattcatccatattattgtttgtatcagtagtttatttttattttgtcrtcgtattccattgaatggatgtacctctgtttatctgtttgccagttgaaggatatttggctygttaccagtttttggtgattataaacaacattgctataaacattcatgttttgatttttggatgaacatacatttttatttcttttggataaatgcctgggagtgggattgctgggccatatgtaggtatggtatgtttaactttgtaagaaactaccaacccatttttctaaaatatttgtaatcattcccgccatcactgtatgagagcagcagtttgctctgcattctggccagcactttgtattgtcgtttttatttttgtttttaattttagctattctgataggtgtataatggtatccctttgtgacttaaatttgcatttttccaatgactgatgatctcaaacatcttttcatttgtatttttaccttccgtatatcttctgttggtgaaggatttgttaatatcttttgcccattaaaaaaattggattgtttattttcttattattgagttttaagaggtctttatgcattctggatacaaatcctttatcagatatgtttcacaattattgtctctcagtatatggcttatgtttttattttgttaaagtctttcaaagggcagaagttttaaattttgatgaagtccagtttatcaaatttttttctgttacaggtgatgctttttatgtcatatcatagaaatctttccttaaccgaaggggacaacgattttctcctgtgctttttttctgggtgtttgtagttttatatcaattaccttatgatccatttcatattgatttttgtatatggtataaagtaatggttggtttcttttcacctcttttctcttcctccatccactgcctcttccttttcttccttcttcattttctcaacacatggttctggaacaattgaatatccatatggaaggagaaaggggaggagggggaggagatgatgaagatgattgagttacattggcacgttggcacattattttgtctcattgacctatatgtctgttcttactttagctctatgctgtcttgattaactataggtttaaaatctatagtaagttttatagtgcaaatctttctatttttcaaaattgttttggttcttttgggccctttgcatttccatatggattttaaatatctatattatatatagataatatagaaatatgtagatatctagaaatagacaaggttatattatatataatataatctttttatatagatataaaaatgctgctggaactttggtggggcttgcattaaatctaaagagcaattttaggagaatggacattatagcactattgagttttctgcttcacaaacatggtatatatccctttattcaagtctctctaacttctgtctgcagtattttatagttttcagtgtacaagtcttgcacatattttgtgaaatttacccctaaagtagatagtatgttttgatgcttttgtatttgtattgtttattggtagtctctagaattaaatgaacttttatatattgacctttttcttgtgatctccttaaatgtttgttagagttcactattgcagctgtcttcttagtgggaaggcttttcggggttaattaacttcatttaaaaaatgtatatatgatgccattcaggttatttgtcttcttgagtgtactctggtagtttgtatctttcaaggaatttcagttaaattgttgaacttggcataaagctcttcataatattcctccattcttttaatgtctgcagaatccttagtggtrtctcttccttcattctgatattggtaaattgtattttctctcttttatttctaggaagcttgtctagggatttataaactttattgatcttgtcatagaaccagctttctgtttcattgatttttttaaaaattaattatttttctcttccaaactaattgtgcgaaaagaaaaaaaaaagctaaaaaatcaaaccaaaagaaggggaaaaaaagaggaagagaaacatagatcaaataggacaaacataaatcttataatgacckggtagatatagacccaaatatatcattatccacattaaatgtaaatgaagagcacaaagatcatttacaaaaagtkgatkgtatattgagccataaagcaagacacaacacatttcaaaggattgaaatcatatagactgtgttctttatttacaatgggatagtgttggaaattaataaaaaaagaataactagataaawtgccatttatttkgatagtaagaacatttttctgttttgtttacagccatgataaagtaaatggactggatttaccctgctactataaatacctagaaaatcaaacaaaatttatgacataacagttttcagatattggataataggcatcccaggactgtgatctgaagaagggaaactaggtcagccctaggattgtactagatcatggcccagaaacagattacaggcctagttctctctcagagttgagaaaacgaatggaggttgggagccaggaaagctcgaatttatgaagcagaataccaaagaagaaggagctggagagaaaaaagaggggcggggagagaaggaaggaggagagggagggattccatgatctgttgaggactatccctggagtctttggttaagtaaaaactgatctgtgtgtgtaaaaaaggaaactactcaaagctaaggaaagaatccgaaaaacacagaactcagaatagtttgtattcccaccagtgagagtggaaagaccttctattgcataagacatctggtatagttctcaaaaggaaaccattcataagtaattattacctaagtaatgggaatatactataaccttacactaaaactttaaaaagcctgtaagtaagcctcaaagtgaaaaaaaaacaaacaaactagtcctggttaaccttccctcacgacagaatagagttcaatactatttaagatcatacaccaaaataaacttcacaatgtgcagcatctaataaattatcagatatgcaaataaacaggaaatattatctataaacaggagaaaaatggatcagcagacacaaacccagaaatggtaaaggtgatggaatgagcagatgatgtcattaaaacaactattaacatgatctatatgcttaagttgtaaagaaaggcataacaagaataaagcataaaataggagagatacmaagagatccaaatacacttcccaaaaattaaaaaaaaagaaaagaaatatataaaatgaaaactacactgcatggggttaatagcaaattagagatgtaggacaaacaaacaaacaaacaaaaaaacccagggtcattgaagacagcagtagaagtccaaaataaagcagagaggaaaaaaagacagagtagaaataaacagagcatcagcaacctgtggggtaatactttggaagtttttttattgtttatattcaaaattgcaatgggtttttgacttatcaaaatcaaatactcatctttgtgttttccctactcatgggaaattcgagagtcttaggatactctgattccttatacgtatatgagtatatcaacatatgtgtatatatacatacacacgtgcacatttacattaatatattctatgccatcattttcttgtgagtcttgtttgctcattgtgacttactcctgtctttagcactttttaaaaactcttcattccttgctctatttctgagttactctggaatgattttccttgtgcttgaagaatataccttttagaacctcattttggtagatgttagatactatattccatgccagtaagatccttctgtggctgtgaatgtttggttgtcttcatttctagcatctgtgaatttctctttattttgtccttggctacacatttaaaatttttgttctgattttattcagcatttctgtgtatttgtttatgcagtatgttttagtggttaagagcacatttttggccaacattttgtgttgtttgtcttttgaattttcaccattttggtgggtgtgaggtagtttctgaaacgtggttttaatttttcattggataagtaattttcatttccctgatgactaataatgttgagcccccattttttgtgttttaatgaaatttttttcgtatctctagttttcttctgcttctcacagaactttttttttctttaaattggggtggggtgttcctgaaattttgattcttattttttgttttcttctcatagtagctttgatctgccccatgtgtgtgcctatactggctttctgtgtgtgttttttttctgtttttaatcaccacgaggatcctcactctcttttctttccttaatgggttcagtagtatcaaggttttctccatagcttggactctggagctgcgtctgatgtatttgggtttctctacttaaaagaaatttgaggttactcagtaagggatgaggctggacagactagaggaacctggtgtctggctgctgcccatttatccatagtgtatgaataaatcagagatccagttgagtcggggagagtaggtggagcattgttagcttagtacttacttggatccaggtattcatctagaaatctcatttagggttcaggaggaaacattggtatacactgaactgaggaaagtgcagagtttgcacattttccaggaatgagcctttaattaatactgtacgccgtctctactaaaaatacaaaaattagccaggtgtggtggtgagtgcctgtaattccagctacccaggaggctgcggcaggagaattgcttgaaccccggaggcggaggttgtggtgagccacgattgcgccattgcactccagcctaggcaacagagcgtaactctgtctcaaaaaaacaaaacaagacaaaacaaaaaacctttgtctttggactcaagctatcatagtctaagtttgtatctctcagtagaaagatccatataattgaatttttaagtttttacctattgtgtcaatgcatcagttgtgtttaggaaatattagtattctgaatagtttctcacccagatattaattttttttttkggtagatgagactcttttaaagaatatctttctaaaatatatatctactkggggtcctcacttcaaataatttaaaaaaccatttcctaatcaataatctgttaccttttataaatgatttttcagcaaacattgaggagaatgtgctaccttaccatcaaagaaatggctaccatctctgaggatgtgataattgtcacaagcaggtatgtaaatggtcaaaatctaggatgagatacttatatatttgctgtttgctttctgttgatttcattttttgaccataagaaagccaataggaatttaaaagaatataatatcttaaagcattcttttctaaaatgaagttttcatcatgtgaaagccatccttatctgataaagcmaaggaagaagttacaaaagataatactgatagatttgagtgcatcaaaattttcataaaaatggataaaactaaaaagtaaaagataacgtgcactgaaataaaatatttacaacaaatacatcaaaggctagcatctgtaatatataaagaacttttaaaaagaaacaagtgataattcatcaaataaccaatataaaggatctaaacgtctttagatagtcgttctcactagtaaccaaaaaacataaattaaaaattcaagaatgaggtataatattttttactcatcaaaatggcaaaaaagcaaacaggcagcattcagtacttgtgtaagggagacatactcttgtacaaaggagacagagtaataaattgattcaatttttctagaaagtaattkagcaacatttattgaataattgaaaggctttatccctttgacctagtaaggccacatctgtggaactatccttggaaaataatcagacataacacagaaaaacttatatatattgatgtttgttgcaacaccatttacagtagaaaaaaggacaaacaacttacgtgtctaccattgataaaattatttaattaaccatatcatcatattataaaatattttaaaatttggagatatttttgaaacatctgatataaataagtcttcataaagtgctaaatgggggttggagtcaatctacgtattccatatagtctcactttaaagaacattttatgtgccagacatggtggctcatgcctgtaatcccagcactttgggaggccgacgcaggtggatcatctgaggtcaggacaagaccaacctggccaacatggtgaaactccttctctactaaaaatacaaaaaaattggccgggcgcggtggctcacrcctgtaatcccagcactttgggaggccgaggcgggtggatcatgaggtcaggagatcgagaccatcctggctaacaaggtgaaaccccgtctctactaaaaatacaaaaaattagccgggcgcggtggcgggcgcctgtagtcccagctactcgggaggctgaggcaggagaatggcgtgaacccgggaagcggagcttgcagtgagccgagattgcgccactgcagtccgcagtccgacctgggggacagagcgagactccgtctcaaaaaaaaaaaaaaaaaaaaaaaaaaaaaaatacaaaaaaattagccaggcattggtagcacgctcctgtaattccagctacttgggaggctgaggcgggagaatcgctggagcctgggaggtggagattgcggtgagccgagatcgtgccactgcactccagcctgggtgacagagcgagactcagtctcagaaaaaaaaaacattttatgtatatatataaaaaatgtggatagaagttatacagacttatctctggatagttgggattgtggctgatatttattttcttttaaactttttataatttgcaaatgtcctagaataagtatatataatttrtagttctaagtgtgtaatgaacattatttttaaaatagttgcctttttaattactataactcattgaagtgaatctggttttgtataacataataaattgtagaggagggtgcttgtgtttaaccagtagtagtatggaatgtagtttcaattaggaaagctttcagctgaaaataacagaaaagcagatgtaaacagtgacataaacaagatgggagtttattttttctcatataatcgtaagtctagaggcttggagtagctggtgttggctcagtcattcagcagtgtcagggtagtgtctcttgaattctttggacattctccattgttgcaaaatagatgcccaaattactggcaatgtaccatattcaaggctagaggggtcctgggaaggaagccagggaaggccacaccatctgcctctttcatcaggaatctaatatcttttcccaaggcaattttwagatttcacttggcacaactgtgttatatgactatccttaggaagccaggaaagtgagtatttagtattttatagcccaagtattagggacagaaaagggagaaggggttgaaaatggatgtcggattagttaactaatggtgtctaccacaagtaaaaaaacaaacaaatgaacaaaaaaacccagaaaaccttcagttagattgctagattcactaatattttgaaaattttaaaataaattagttgttgactgagagttttttgtttgtttcttttagcgctgtcaatacttgcctctgagttttgctaggctaccttgaattatggtgtatttctattaatagttcattttaagtgattagtagttgtggtaggcaggataatagtgacccaaagatgtccacgtcccaattcctaggacctgtgaatatgtacattacatggcaaaagggaattaagattgcaaaacagcagatagggagattattttggatcattcaggtgggccctttaaggactacacttcttaaaaatggaagtgggatgcagaagaggcgtcagtaagagatgtgatgatggaaacaaggtcagagatgcagtgttgctggatttggagatgggggaagagggccatgagtcaaggaatgtggtaacctctagagactggaaaaagcaaggattcacccttctagcctccggaaaggactgtagccctaccgatatcttgattttagcccagtgagacaagtgttggacttctaacttttataactgtaagataaagaaatgaatgttgtattttcctctaagtttgtggtactttgttacagcagcaatagaagactaatgcagattttggtacctggaagtggggtgctgccgtaacaaatacctaaaaatgtggaagtagctttggaattatgcagtgagcacatctggaagaattttgaggtgcaagatagaaaacgcctagattgccatgacaatagaaatatggatgttaatgactctattagacttagaaaaaagtgagcagcaggatagagaaaacatttatcatcttagagaatacctaaatcattgtgaacagatggtggaaatgcattaaaggtgctggctcagaggaaaatgttgggaattagaggaaaagggatccctgttatagtggcagaaagctcatcaggcttgtatactgcaattacatggaaaggaggacttacaaacagtgaacttggatgtttaactgaagagatttccaagcaaagtgttgaagttatggcctagttatggcctagtttctttttgccactaatagtaaaattgaaagtagagaaataagtcaagaagagacctgttaaacaaaaaggaaccagggcttgatgattttggaaattcttagtctacccaagtggctaagggtgctaaagtcaggagtttcacggtcaggaaaacgtgctctaaagaaaaagccaaaggagtcactgcacaaccttttgctgaaacctcagaaagatgaaaaggtcagagcattcactcacacaaaacactgaagagatcaaggggtgtgactcatagattcccttagcatctaagtagaagccagaaatagagatgggattatctaggcaagatctgtggaggagcctcttgtctaatggagtgagtctctgtacttatacagtagacccacaaggtttttgagaattctacgtcagcagcaactcagagctagagagagaggatgaagtgaaagactcaaagaggaggcaaaattcctcttcatctgtggacctatggaattagaaaagaaatgagaggatgaagtgaaagaaggctatcagagccccaaattctataggcaggaaacaagccgatgaaactactcagctttaaatacacgctggttaccctttatgaaaaaggaaggaagactctgagggcaaaagggcagtcctgtagggtggaactgagaactttacagaattctgcccgtgcagagacctattccaggttgcctaactggatttcagaattgcttgggaccaatgatgtcttccctttcactttctttcattttgaatgggaatatctgtaactatatcctacggcagtcccgtccttgtattttgggagcaggggatttcttttctaattccgtaggtccgaagatggagaggaattttgcctcaggatggattataccaagagtctcacccacaccaaatttagattttgataataagattgagatttttgagtccatgagatttagatgagattttggactttgaattgatgctgcagtgtgttgagactttggggggatcttggaagggggtgaatgaatgtattttgcttgtgaaatggacatagccctaatgacacagtgattttagcccagtgagacttatgttggacttctaatctacagaactgaaaataataaattcatgttgttttaagccactaattgtggtaatttgttacagcaggaatagaaaactaatattatagatgacctttctgtatgcatagaaaatttgttggcttggcaagaaaccatggagattaaaaaaatctgaaggcacatacttcacaaaagaatatatgcaaatggccaataagcacaatgttcttaacattattagtcatcagggaaatgcaaattaaaatcttagtgagataggctgggcacggtggctcacgcgtgtaatcccagcactttgggaggccgrggtgggtggatcaygaggtcaggagatcgagaccgtcctggctaacacggtgaaaccctgtctctactaaaaatacaaaaaattagctgggcgtggtggcaggcatctgtagtcccagctactcaggaggctgaggcaggagaattgcttgaacccgggaggcggargttgtggtgagccgagatcatgccactgcrctccagcctgggcgaccgagtgagacttcgtctcgaaaaaaaaaaaaaaaaatcttaatgaggtacagcatacccactagaatggttacaacaaaaaagcttgacaataccmaaataaaaaagcctattccaatatcgaacatttggaacaattgaaactcccatacactgtagataggaatgtagaatgatacaaccaccgtagaaaagttttggcagtttcttataaagttaattatatacctgccctgtgaccagtaataccccttctaggtatttactcaaggaaaatgaatacatatatggccacaaaaaagactgtacaagaatgtcataacagccttatgagggttcttcaaaaagtttgtgggaaatgtgtgttatgaaaaaatatccatggagtttgtattagtccattttcatactgctataaagatactacctgaggccaggcacagtgcctcacacctgtaatcccagcactatgggtggctgaggtggggcggatcactttaggtcaggagtttgagaccagcctggccaacatggggaaaccccatataaaaatacaaaaattagcttgatgtggtggcacacgcctgtagtctcagctactcaggaagctgtgacaggagagtcgcttgaacctgggaggcagagattgcagtgagccaggatctcaccactgcactccagcctgggtgacagagcgagattccatcttaaaaataaataaataaataaatatatatatacacatatatatatatacatatatatatatacacatatatatgcatatatatatatacgtatatatatayacacacacaaacacacactatccgagactgggtaatttataaaggaaaggggtgtaattgactcacagttccgcgtggctgggggaggcctcaggaaacttacaatcatggcagaaggggaagcaggcacatcttacatggtggcaagagagagaaaagagtgaaagcacagcaaaaactgccatttataaaactatcagatctcatgagaactcactatcacaaaaacagcatgggagaaactgcccccatgatccaatcacctacctccctcaacacgtggggattgcaattcgagatgagatttcggtggagatgacagagccaaaccatatcagaattcaaaatttttttgcactaaaatataaactcatgactaacttgttaataacatgtccgaacagtaactagcttgagacactaatacatccgtttgaaaataatccatttcagagcaacatcaattctgctaaaattgaaacaagaacaaacattacatttatggtgaactttgggtagaagaatggtgaaattatcgatgtgttacaaaaaagcatggcaatagtgacccaaagaaatcagcagtttacaaatggataagtkgtattaagaagggatgagacaatgttaaccatgaagcccttcgtcttcagcagcagaccatctacatcaattkgtaaaactgatgattaacagcagcaatagccaakgtatggacacctcatttggttcagccttacccaattctgactgataaaattaaagtkgagcaaactatttaatggatgtcaaaactatkgcatctagattggctgcaggcaagagcagagctttaagtggaagttttaaacaagtgagatcaagatcctgagacatttccttgaggaattataacgggagaagaaatgtggctagcagtccaatcctgaagacaaagtatgatcaaagcaatagctaccaagaggtggaagtggaagtggtccagtcaaagcaaaagtggacctgtcaaaaacagggcaacagtttttggagatgcttgaggkattttgcttgttcactttctggagggccaagtaatgataatagcttattatgagagtatttagagaaagttggccaaagctttagtagaaaaacacttgggaaagcttcaccagagagtccttctccaccgtgacagtgtgtctgttcatttgtctcatcaaacaagggcaattttgcaagagtgtccgtaggcatccaccttagagttcttatctggcttctttcttttgcttcctaatcttgaaaaaaatctctaaagagcaccyatgtttcttcagttaataatggaaaaatgggtgagcgtgggggatgtggctgggtgggtgccggggcttcacctccaaggcagtggccggatcatgattgaggtgattgagcccctggagcctctagtgcctgtggattttggcagtctcgaggcagtggtccggttggagaaagacatcatcttcgcccatgggctccaccccatggacaccgacgggtggagcccatggagtcggtcctggagggcagatgtctatacctgagatctaacaatgtagtagaaggcaactgtgctgaagaattactacaaaactcccattgcgtcgtgaaggagtattttgtggccccccaggtaatatctctttgccaaagctggatgaacaagagcctttctcacacagccgagtagctcattctggaaagggggtactctctgaatacgtggaagcatgaggaccatattttcttactgtgaacactaattttcctgctttttccagtcacctgaaaaaatggatgcttaagcatttcttttctttttttttttttttttgtttttgggatgaagtctcgctcttgtcccccaggctggagtgcaatggtgtgatctcatctcgctgcaatctctgcctcctgggttcaagcgattctcctgcctcagcctcctgagtagctgggattacaggcacctgccaccacacccggctaatttttgtatttttagtagagaaggggtttcaccatattggccaggttggtctcgaacttgtgacctcaggtgatctgcctgcctyggcctcccaaaatgctgggattacaggcgtgagccactgcgcccggccagcatttcttaatagcagactcttctgaagacagaattgggaaatatctggcaccaacaaggcaatgagttcctgatgctaactgaagtaaaaggaaagcaaaagtcagcttccaaggaaatagcttccaaggtattcacttaacaggcctgttcagtatggaagacactatttatccccctttaactctcgccaaaggactataccaactgcatgaaagtgaacttttacatctacttaaatggtagatggagcaccttgatcactatgtgacaaccttggttgtcatttttagttgctatttgaattgatttgagcagccctrtcttcaccggacatacctgaatttgttcctaggtacccactttgttcctagaaaagggctaactttctactatggtctgaagagtgttcaaagtagactagagcttgggaactcctaacctagaaccatctgccatcccacaaagtgattagatgcaaaagggatactagtcatacctagtgtttctctttctgaaaagagaacttatcctaaaagtagccatgggcctgggacaaagtagccctttccacccccaaaatgattattagattgacgtgagtccaagattgtggagttttttgttttttgttttaaaacagataccaagaataaatgaaacctatttagggattcattctctaattaatagattctaagtaatagaatcggagagagactttttcctctaaccaaactgccaaagttgtttttggctaagaatttcccaatgatctttgcactgctgctcatttcttttatttttctgagatagggtctctctctgtcacccaggctggagtgcagtggtgtgatcacagatcactgcaacctccaacttctgggctcaagttatcctcccacctcagcctcctgagtagccaggactacaggtgtgtatcaccgcctccagttaatttgtgtgtgtgttttttttaaatagagatggggtcttgttatgttgcctatctggtcttgaactcctggcctcagaggatcctctgacatgccttggcctcccaaagtgctgggatcacaggcgtaaaccacgatgygtagcttgttactcattcttaaaagtctgtgtttatttttcccattcccttcttttatctgcagtccttcttttttctttaaggcagcttaatttacaagcttggccttgagttaaaagagaaccccgaacgttgaagttgaagttctcaaaccaacatcagagcaactatcttaatccccatataaacaaagttatctactcctggctccttaaaaaaataataataatgtaaaaatgactgcattgacatgcttacattcccagcaacttcaattgtttagggatggactaaatgactggtatcatcactttaaaatgtgtcttgaacttgatggagctatgtcgataaataaaatttatagtttttgtgggtttttttttttttgagacacagtctcgctctgtcgcccaggctggagtgcagtggcgcgatcttggctcagtgcaagctccgcctcccgggttcatgccatcctactgcctcagcctcccgagtagctgggactacaggtgcccgccaccacgcctggctaatatttgtatttttagtagagacggggtttcaccatgttagccaggatggtctcgatctcctgacctcatgatccgcccgcctcrgcctcccaaagtgctgggagccaccgcgcccggcctatagtttttgtttttgttttgagacggagtcttgttctgtcacacaggctggagtggamtggtgtgcccttggctcactgcagcctccgcctcccaggcttaagccttccaagtagctgggattacagctgtgtgccaccacgcccagctaatttttgtatttttagtagagatgtggtttcaccatgttggccgggctggtctcaaactcctgacctcaagtgatctgcccgtcttggcctcccaaagtgctgggcttacaggcgtgagctactgtgctcagccgttaggtttattttttaattccatttttccacagattttttgaagtcccctcgtatttgtgatarccctaaactggaaacatcccaaatgctcatcaaagaagaaggaacaaattgtggtatattcatgcaatagactattactcagcaataaaaggaaaaaattgctgattcaggcaacaacatggataaacttctaaaacatttatgttggaaagaaaacagacacaaaagaatatatgctggatgattctcttcgtataaactccaagaacagcccccaaactcatctgtggtgatagaagtcagaagtctactgggttagaggaaattgattggaaatgggcatgagggaactttctggggtgatggaaatgttcagtatttttattttggatggaggttacatagatgatcacaattgccaaaactgatttagcataatatttcagttgtccattttattgtataaattacagctcggtgaaaaaaaaaaagagatgtagttagtgtcttaactaactaaatgtatattgacaacctgattttactgttctactcattacaagaaggcatacccttatgtgatggcacccacccagtgaaagtctggaatkgagtcctgagagaattgaggaattgagaattgagagaattgaggaattgagaattgagagaattgagaattctggaattgagtcctgaggaatgatccatcactcacattaggaagtactctggggagtgggcatcagtatgtgagaagttacgtccyggtttcagaaaatcaaatgaaaaattcaaagaccatggtttaggaagaaataaatgggttgtagaaactgttatcagctaggcagttttgaaatcaattgtgccgataatgtgtggattcgggtagggggagaaagatactttgtgcttcctaaggaaactaaatgctaagttcatccacttagtaagaaatatacaagcccgaaacaacttttctatttgaatggtgcagctgttcctgaataattacttctgaagatttactgccaggaaatggtttagaacaagaaaatgagatactattatgacttaaccaccactgtagtgaaactcctctcaaagatttccagtaacttcttacttagttaattttaaaagttaattttctgtccacattttacctgacctctttcccagttttaacatggttaaatacttcctggagttgtaccatctttggctttcagaaaccatagtcctggatttcctctcctctttgatttctccattttatcctatgatagctcagaagtggctggttttcttctgcctgtcatctaaatattggtattccctagggttcatatcagtgctgtagttctttcccaaactcatcatgctctttgataccctttatatttgtacatgcttctccctgtgcctggaattattctgttgccttttccacatagctcaaatacatgtcattataggtactgacttccttcttcttctttcttgacagattagtcattgtcttctctgttgttctcttttttttttttttttttttgagaggtagggtcttgctatgttgattaggttggtcttgaactcctgacctcaagcagtcctctcatctcagcctcccmaagtgctggaattacaggtgagagccactacccctagcctcggttgttctaacacttgatttttttttttaacctctgttctagtattttaatatattgtactataattatttgcatagtttttctgccttctgaattattaattctttgagagaaagaaacacatataactttgtatcatcaatacctggaaaagtgctttgtattattagacatgcaataaaagtgttgcatgagttaaaagataatccattttctctcttcaagcaagggagttggaatcagaaggattatttatttccctctctacctcaggaaagcactcacacaggcagaagtggagaaaggtgtgttaatgtgtgttgagaaacctttctgtctcctacttcccttctctttttcctgcccagtttgcaagccaactttcctgatttatttggattaacacttattttattttaaaatgaaattggggcagacttttcaggaaagatgatgaagtgatgccacgtctcaaaacttccttctctaaagcctagtgaaatgaacaacagtgaataaaagggaaagccaggagacttctaattctagccaagatgaaataaagctactggagcccatctttcccagtgattacaaataataaataataataataataataaataacaaccctggacaaaaaaacaaaaacaattacctgaagcctccaaatagtaaatatagtaggtgaattagggagagaaaacaatacttaatgaatgaccaatatagcaacagtgagtttcatggttaattttcatctttataccttgagtttgacccaagggcagactgaatcagggaactatatagtaggtgtggtcaatagagactgagaaagaagcccatctctctggcctgagcacagtttacaaaaaaaaaaaaaaaaaaaaaaaggttggtggtgactgcaagctggagagctgggggagaatccttgtttgtttgtttgtttgtgtttttcttgttttctttcccgtcctgaggtcagccctagttgtggaacaactttactaggatacgacagcaatgttgtgagcacttaaaaccctcggaagaaacctaccactgagaaaagggacggctgttgggtgaagagtgggggaaaagccacatcattattttttctttctatcttttcttacctcttcatcatgaaggtgggcccacttgcatagtacagggagctgaaactcttgagagaaccccatatttctggctgacgacctgggaaaggtgtctttgactgccagatggtatgggaaaaaagatatgaggaaagacatggaggaatggataatttaccaaagcactacatgtatggactattcctaaagaagcatagcaaaagctttgaagtataaactgacattggaatcaatatgcacagaaggcgaggcagaacttgtaatctgaaactaactgggttgattccttgctaaaacaaaaaagtcagtagtccccagaggcttttaataggatccagagtctcatgacataatcaaaatatgcaggatacaatccaaaaccagtcaaccaggaaaggaaattgattccattgaaccaatgttaatctctacaagtgtgtcattttggggttggtatctgttgattggaaaaaacttggaaattttcaagggaaaagataatcaatagatacccccaaaatgacccagttgtagggattcttaaatactttaaagcagctactgcaaccatgtactataaaggcagacactcttgaaatcaatggaaagaggaattctcagcagtgagctatatatacaaaaccaaatgaaaattctagaaatgacagactataatatgtaaagtaaaaagattcattagctcagacgtggaggtgtggctggcaagatggccgaataggaacagctctggtctccagctcccagcgagatcaacgtggaaggcgggtgatttctgcatttccarccgaggtacccggctcttctcactgggactggttagacagtgggtgcagcccctggagggcaagttgaagcaggatggggcattgcctcaccagggaagtgcaaggggttggggaactccctcccctagccaagggaagctataagggactgcaccttgaggaatggtgcacttcagcccagatactacgcttttcccatggtcttcaaacctgcagaccaggagattccctctggtgcctacgccaccagggccctgggtttcaaggacaaaactgggcggccgtttgggcagacaccgagctagctgcaggagttttttttttcatacctcagtggcgcctggaatgccagcgagacagaactgttcactcttctggaaagggggctgaagccagggagccaagtggtctagctcagtggatcccacccccacggagcccagcaagctaagatccactggcttgaaattcttgctgccagcacagcagtctgaagttgacctgggatacttgagcttggtgtggggggaggggtgtctgccattactgaggcttgagtaggtggttttccgctcacagtataaacaaaggtgcccagaagtttgaactgggcggaacccactgcagctcggcaaagcctctgtagccagaccgcctctctagattcctcctctctgggcagggcatctctgaaagaaaggcagcagccccagttaggggcttttggataaaactcccatctccctgggacagagcacctgggggaaggggcggctgtgggcacagtttcagtagacttgaacgttcctgcctgctggctctgaagaggacagcagatctcccagaacagtgctcaagctctcctaagggtcagactacctcctcaagtgggtccctgacccctgtgcctccttactgggagatacctcccagcaggggtcaacagacacctcatacaggagagctccagctggcatctggcaggagcccctctgggacaaagcttccagaggaaggaacaggcggcaatctttgctgttctgcggcctctgctggtgatacccaggcaaacagggtctggagtggacctccagcaaattccagcagacctgcagcagagggtcctgactgttagaaggaaaactaacaaacagaaaggaatagcatcaacatcaacaaaaaggacatccacacagaaaccccatctgaaggtcaccaacatcaaagaccaaagatagataaatccacgaggctgaggaaaaaccagtgcaaaaaggctgaaaattccaaaaaccagaatgcctcttctccaaaggatcacaactccttgccaacaagggaacaaaactggacagataatgagtttgacaaattggcagaagtaggcttcagagggtaggtaataacaaactcctcagagctaacggagcatgttctaacccaatgtaaggaagctaagaaccttgaaaaaaggttagaggagttgctaagtagaataaccagcttagaaagaaaataaataamctgatgtagctgaaaaacacagcatgagaacatcgtgaagcatacacaagtatcaatagccaaattgatcaagtggaagaaaggatatcggagattgaagataaatctaatgaaataaagtgtgaagacaagattagagaagaaagaatgaaaaggaatgaaaaaagcctcyaagaaatatgggactatgtcaaaagaccaaacctacgtttgattggcgtacctgaaagtgatggggagaatggaaccaagttggaaaacactcttcaggatattatccagaagaacttccccaacctagcaagacaggccaacattcaaattcaggaaatacagagaatatcacaaagatactcctcgagaagagcaaccccacaacacataattgtcagattcaccaacgttgaaatgaaggaaaaaatgttaagggcagccagagagaaaggtcgggttactcacaaagggaagcccatcagactaacagtggatctctctgcagaaaccctacaagccagaagagagtgggggccaatattcaacattcttaaagaaaagaattttcagcccggaattttatatccagacaaactaaccttcataagtgaaggagaaataaaatcctttacagagaagcaaatcctgagagattatgtcaccaccaggcctgcctttcaagagctcctgaarggagcactaaatatggaaaggaaaaacaagtgtcagccactgcaaaaacataccaaatggtaaagaccattgacactatgaagaaactgcatcaactaatgggcaaaatagccagctagcatcataatgaaaggatcaaattcacatataacaatatcaaccttaaatgtaaactggctaaatgccccagtggaaagacacagactggcaaattggataaggagtcaagatccattggtgtactgtattcaggagactgatctcacatgcagagacacacataggcttaaaataaagggatggaagaatatttaccaagcaaatgaaagcaaaaaaaaaaaaaaaaaaaaccggttgcaatcctagtctctgataaaacagactttaaaccaacaaagatcaaaagagacaaagaaaggcattacataatggtaaagggatcaatgcaacaagaagagctaactatcctaaatatatgaaatataaatgcacccaatgcaggagcacccagattcataaagcaagttcttagagacctacaaagagacctagactcccacacaataatagtgggagtcttttaacaccccactgtcagtattagacagatcaacgaaacagaaaattaacaaggatattcaggacttgaactcagctctggatcaagcggacctaatagaaatctacagaactctccaccccaaatcaacggaatatacattcttctccacaccacattggacatattctaaaattgtccacataattggaagtaaaacactcctcagcaaatgcaaaagaacagaaatcataagaaacagttgctcagaccatggtgcaatccaattagaattcaggattaagaaactcactcaaaccatacaactacatggaaactgaacaacctgcccctgaatgactactgggtaaataatgaaattaaggcagaaataaataagttctttgaaaccaatcagatcaaagatacaacgtaacataatctctgggacacagctaaagcagtgtttagagggaaatttatagcactaaatgcccacaggagaaagcaggaaagatctaaaatctacaccccaatatcacaattaaaagaactagagaagctagagcaaacaaattcaaaagctagcagaagacaagaaataactaagagcagagcagaactgaaggagatagagacacaaaaaatccttcaaaaaatcaatgaatccaggagctggttttttgaaaagattagcaaaatagatggactgctagccagactaataaagaagagagaagaatcaaatagacacaataaaaaatgataaaagatatcaccactgatcccacagaaatacaaactaccataacagaatactataaacacctctatgcaaataaactagaaaacctagaagaaatggataaattcctggacacacacaccctcccgagactaaatcaggaagaagttgaatccctgaatagaccaataacaagttctgaaattgtggcagtaattaatagcctaccaaccaaaaaaagcccaggaccagacaggttcacagccgaattctaccagaggtacaaaaagcagctggtactattccttctgaaactgctccaaacaatagaaaaagagggactcctccctaactcattttatgaggccagcatcatcctgataccaaaacctggcagagacacaacaaaaaaagaaaatttcaggccaataaccctgatgaacatcgatgcgaaaatcctcaataaaatacgggcaaaccgaatccagcagcacatcaaaaagcttatctagtatgatcaagttggcttcatccctgggatgcaaggctggttcagcatacacaaatcaacaaatgtaatcyatcacataaacagagccaatgacaaaaaccacatgattatctcaatagatgcagaaaaggcctttgataaaattaaacaccccttcatgctaaaaattctcaaaaaactaggtgttgatggaacgtatctcaaaataataagagctatttatgacaaacccacagccaatatcatactgaatgggcaaaagctggcagcattccctttgaaaacaggcacaagacaaggatgccctctctcaccactcctattcaacatattattggaagttctggctagggctattaagcaagagaaagcaataaaggtattcagataggaggaagtcagattgtctctgtttgcagatgacatgattgtatatttggaaaaccccatcatctcagcccgaaatctccttaagctgataagcaacttcagcaaagtctcagggtacaaaatcagtgtgcaaaaatcacaggcattcctatatatcaataatagacaaacagccaaatcatgagtgaactcccattcacaattgctacaaagaataaaatacctaggaattcaacttataagggatgggaaggacctcttcaaggagaactacaaactacttctcaaggaaataagagaggacacaaacaaatggaaaaacattccatgctcatggataggaagaatcaatactgtgaaaatggccatactgcccmaagtaatgtgtagaatcagtgctatccccattaagctcccattggctttcttcacataattagaaaaaaactactttaaatttcatatggaaccaaaaaagatcccacatagccaagacaatcctaagcaaaaagaacaaagctggaggcatcacgctacctgacttcaaactatactacaaggatacagtaaccaaaacagcrtgatactggtatcaaaacagatacatagaccaacggaaaagaacagaggcctcagaaataacaccacacatttacaaccatctgatctttgacaaacctgacaaaaacaagcaatggggaaaggattccctatttaataaatgatgttgggaaaactggctagctatatgcagaaaactcaaactggacccctttcttacaccttatacaaaaattaactcaaaatggattaaagacttaaatgtaagacctaaaaccataaaaaccctagaagaaaacctcggtaataccattcaggacataggcatgggcaaagacttcatgactaaaacaccaaaagcaatggcaacaaaagccaaaatagacaaatgggatctaattaaactaaagagcttctgcacaatgaaagaaactatcatcagagtgaacaggcaacctacagaatgggagaaaatttttgcagtctatccatctgacaaagggctgatatctagaatctaccaagaacttaaatttgcaagaaaaaaaccaccccatcaaaaagtgggtgaaggatatgaacagacacttctcaaaagaagagattatgaaataaagctcatcatcactggtcattagagaaatgcaaatcaaaaccacaatgagataccatctcatgccacttagagtggcgatcattaaaaagtcaggaaacaacagatgctggagaggatgtggagaaataggaatgcctttacactgttggtgggagtgtaaattagttcaaccattgtggaagacagtgtggcgattcctcaaggatctagaaccagaaatacctttagagccagtaatcgcattactgggtatatatccaaaggattataaatcattctgctataaagacacatgcacatgtatgtttattgcagcactgttcacaatagcaaacacttggaaccagcccaaatgcccgtcaatgatagattggataaagaaaatgtggcacatatacaccatgtaatactatgcagccataaaaaaggatgagttcatgtcctttgcagggacatggataaagctggaaaccatcattctcagcaaactaacacgggaacagaaaaccaaacactgcatgttctcactcataggtgggagttgaacagtgagaacacatggacacagggagaggaacatcacacaccggggcctgtctcggggtggggggctagaggagggatatcattaggagaagtacctaatgtagatgacaggttgatgggtgcagcaaaccaccatggcacatgtatacctgtgtaacaaacctgcatgttccgcacatgtatcccagaacttaaagtataataataataaaaaaaatcattggttcatctcagtagcagaatggagatgtcagaggaacaggttagtgaatttaaagataaaccagtagaaataaatcccaactgaaaagagagagagaaaaaagaaaacaaaaataaacagcctcactggcctgtgagactgtatcaaagggcctaacatttgtgacattgaagtccctgaagaagaggagaaaggtattggtgcgaaaaaaaaatttgagaaaataatgactgaaaacttacaaatttggagaaagataaatttacagactcaagaaactaagtgaaacttagacaaggtaaattcaaaggactctgctctcagtcacttaatgaaactgctgaacaccaaagatgaggaaaactgttgaaagcaccaagaggaacatgattcattacatatacacatcactgtgggtttctcatcagaaaatctggaagtctaaaaacagtggaacaccaactttaaagtgctgaaagaaaggaagtgatgactcagaataccatatccactgaaaatatcttccaggaatgaaggtgaaataaagacttcctcagatgtaggtaaactaaaaggtatttgtcaccagcagacctgctctacagtaaatattatagtaaatgaagttttttcaggctgaagggagatgacactagattgatcccaccaaaacaacatatggatagtacttaaagaaaacaacaacagctgaaaacaactgtcaatccagaattcgatttccagtgaaaataactttcaaaagtgaaggtgataaaaaggcaatttcagacttaaaaaccgctgaaagaatttatctctgacagagtcacattaattataaaagggatttttttcaccaggatgaaaatgataatgaagatatggatctatgcaaagaaatgaagaatactggaaatgttaaactgagtagataaacaagaaattttccttgtttacgtaattttaaaagttaattgactgcttaaagaaaagaatttagtatggagtttataacatatgtaaaataaaatctgtgacaaaaatagcatgaggcaaagaagagaaatggtactttattactataaagtttgtatcctctttatgaagtgttttagcacttgaagaaaatctaataggttaaagatttactgtataaagccaccactaaaataacaatgcagaattatagctaataagccaacaaaagagttaaatagaatcataacatatattccacccaaaagaaggttggggaggaaaagaaaagggaacaaaattcaggccaggtgcagtggctcacacctgtaatcccagcacactgggagaccgaggcaggtggatcgcctgaggtcaggagttggagaccagcctggccaacatggcgaaaccccatctctactaagaatacaaaaattagccaggtgtgatggcacgtgcctgtaatcccagttactcggagaatcatttgaacctgggaggcggaggttgcagtgagcccagatgatgccactgcactccagcctgggtgacagagcaagtctccatctcaaaaaaaaaaaaaaaaagaaaagaaaaagaaaagggaacaaaaaccagatgagatgaatggaaaagaaatagcaagatgacagactccaacccaaccatatcaataattacattaaaggcacctattctaaacacttcaattaaaagggaaagatggctagattggattttttttaagagatggggtcactcagtgcagtgacatgatcatagctcactgcatctttaaacccctgggctcaagcggtcctcccaagtagttggaactacaggcattagccactgtgcccagctcagattggatttcttaaaaaagccaaatccaactttatgctgcctataaaaacataccttaaatataaagaaacaaatagattagaagtaaaaagatgaagcaagatataccatgctaactgtaatcacaagaagctgtatgtcttcagataatgtagactccagawtaaataatattactagggataaaggggtcagcttaccaagaggacaaagtaatattgtttatggagctaataacagagtttcacagtgcttgaaacaaaaattggtagaattgaaaggagaaatcaacagatccacaattaaagctggaaatttcagtactcatctctcaaaaacatagagcaagtatacagaaaaattattaaggaaaaacaatttgaacaagaaaactgagactctttgctgatgacattgtctatgtagaaaatttgtggaatccaacaaaagctacaggaagtaataagtgagcttagcaaatttgcagaatacaagatcaatatgcaaaaatcaattatgttgtatatacttgccaagagcagttgtaagttgcaattaatcctgtttacagtagcatcaaaatatgaaatactttggggtgaatctgatgaaagatgtataagatatatagactaaaaactacaaaacattggtgatagaaattaaataagacctaaataggggccgggtgcggtggctcaaacctgtaatcccagcactttgggaggccaaggcaggtggatcatgaagtcaagagatcgagaccatcctggccaacatggtgaaaccccatctctactaaaaatacaaaaattaggtatggtggcgcgtgtctgtaatcccagtacttgggaggctgaggcgagagaatcacttgaacccgggaggcagaggttgcagtgagccgagattgcgccattgcactacagcctgggcgacaagagcgaaactctgtctgaaaaaaaaaaaaggaaaggaaagaaagaaacaaaatgctagtaattaaaaacagtagcagagatgaagattgctttcagattcattcgtagacttaacacagccaaagaaagaataaatgtacctgaagataggtctataaaaatgcctaaactgacacacaagaagacttcctaaaaaagaatttcaagagctgagagaatatcaaacagactagcatatgtagaattccaggagaagggctaggcgtggtggcgcaaacttgtaatcccagcactttgggaggccgaggtgggtggatcacctgaggtcaggagtttgagaccagcctggccaacttggcaaaaccccctctctattaaagatacaaaaaattagccaggcatggtggcatgtgcctgtagtcccagctactcgggaggctgaggcaggagaattgcttgaacccgggaggcagaggttgcagtgagccgagatcacaccactgcattccagcctgtatgacagagtgaaactctgtctcaaaaaaaaaaaaatgataataataataaaattccagaaggagaaaggagagagaaagcatttgaggtaataatggccatttttttccccaaaattaattacagacaacaaaatgcatgtccagaaagctcaaagaacaccacatgggacacatacacatacctctaggcatatcagtgaaactgccaaaaagaaaatttaaatagaaaattttaaaggtaccccccccaaaaaaggacaaaacattatacaaatagaaacagattatagtagactgtttttttcagaaaacatgcaagctagaagacaatgttgtgtcaactgataattttatacccagtgagactatctttaaaaggtgatagaaaagtaaagacttactaatttatgagacagcatcttgctctgttgtccaggttggagtgcagtggcatgactcctgtgctcaagcagtcttcctatctcagcctcctgagtagctaggactacaggcgaacactactatgcctgactaattttttatttttgtttttgtagagagaggtctcattacgatgctcagactggtcttgaacttctggcatcaagtgatcctcctgcctcggcctcccaaagtgctgggattactgggatgagccactgtgcccagcctaaagactttcttacacaacaaaaactgataatttattggtagctgtcttactctgcaagaaatgttaaaggatattcttcagatagaaggaatatgataccaagcagaaacttggagctacacaaaaagaacactggaaacaagccagggcaaaatcacattcacttttttctttttgaaaaattattctggacaatagctgtatgtctaaaacaaaaaatagtagtgtaatgtgtttaaagcatatataaaaatatattagaacaattgcacaaagaatagaaggaaagtattgggaatatacccttgagaggttcttattctagccatgaagtgatactcttagttattaagtaaagatataaaccctggggcaacaactaaaaaaaatttaaagaagtataaacaataaactagtaaaggaagtaaaatggaataataaaaatagttggtaccaaagttattaaaggaaaaaagtgttcagttaacccaaactcaggcagaaagggggcgggggtagaggagatgggcagagaaacaaagaccagatggaacaaatataaaactagccagaccacagactgatttgaggaataataaaactgtagtctcctgcraaacaacaacaaaaacaaaaacagaaaacaaactaacaagaccacagatttcaatccagtcataatcagtaattatattaataatggattgtctaaacacaccagttgaatgacatgtatggacttctcgttagttgaagacaatgaaggctgtatactaatcaatgactcaaaatctccctaaatgataagaaacaattttacaactacagttgttcttggtaaaactacatcctcagagttatttcagttcagagaatactgaaaagtatgaaaccactttgagtaaaaagaaaaactgccaaatgccagtatggtaattcctcatccctcccctgaaccgcaccccgccccccgaaccacaccccccaccccccgcatccccaaagtctttggggcaagcagtggccaaccactaaggttgtagatagatagaagagggaggttagcaaccaccaggcaggaacaacaactagaaagattaaagttgttgctgtgggtagtgactatctggggctggtgtcatgaagacggtaaaaagaattgcccaagatgggtgtaggtaaagaaagacggattctttaaaaaagtggaaacatgttgctagggtgcaatggcccagtcagcaagagtggagctgacttcagggagacaaaggcttgcctgggattttataggatggtgctcttgctgtgctgaagagggctttgtgcagtactgataacaccaaggttgcagttagctaacttgcatttttctattagctgatggtctagtgataagttgggcataggaagattgtgaattatttgtgcaggagggctatgtgtcctagaccatgaagaaaggccgacttacagcttatctgcgttctctttttgcttttccttggtcctgccagcctgacttcttttccctgattaggactccacagttgtaattcagaaaatactaaaaagttagtggggaagataagagcatttactataggaaacggatttcaaagtgtacttgatttaaagatttaagcacaatagaaaagcctgggcaacatggtgaaacctcatctctaccaaataaggaaaatacgtaaattacgtgggcatggtgggcatgcttgtggtcccagctactcaggaggctgagatgagagaattgcttgagcctgggaggtggaggtttgccatgagccagtatcgtgctactgcactccagccttggcaacagagcgaccctgtctcagaggctagacatacaatttaaagagaaatactcaacataaaagggcaaatgtaatttaaaaggaccaccacaacataaagggacagtgttccaaacatacacttctccaggagaaaaaaggcaaaaaggaaaaaagaagtgccttttggcaatcaggtgtcaatgggaaaaggaaggaaaggtggatatttagggtctttcaaggtctaagtgtaagagttaaagaaagaggaaagaaacatgaaaagcagctcaacagtcaaagataggtttattttggagaataaacatgagagggacttctggccgatttcgttcaggagcgctctctcttatagactaagagtattcattagccaggcatggtggctcacgcctgtaatcccagcactttgggaggccgagttgggtggatcatgaggtcaggtgttcgagaccagcctggctaacaaagtgaaatcctgtctctactaaaaaatagaaaaaaaaaaaaaaaaaaaaattagcctggtgtggtggcaggcactcgggaggctgacatctctctggcccgaggggaagttgtctcggggctggcatgtctctggtcagggaggggtttattttatggttggaatgtttctggttggagatgtcatttgtgatttatggtcatgctgaatttgggggaaaaaaggcaaatcactacataactacataycagaatctatagactatatagcactgcaagatgactgtagttaacagttatttattatgtattttcaaatagctcagagaggattttgaatgttcccagtaaaagaaatgataaatgtttgaggagatggatgtgctaattaccctgatgtgataactatgcattctatgtatcaaaacatcactgtgtaccccatcagtatatacaattattatgtgtcagttaaaartaaattattaaatctatatggtgaattaaaggagtgatcaaagaaaaactcattgcagtaaataccttttatcaatgaaaaggaaggaataaaaagtgaattaaattcttagctcaaaaaaactaggtaaagaacaacaaagtaattcaaaagaaagcatatgataggaattagtatagataaaaacagaaattaatgaggaaaaaatagaaaaacatrtctaattattaaatcaaaatcctatttttgaaaaaattamcaatataaataaacccrtaagctaagttggtaaaaaaaaaaacggagaaagcataaatatgcaaaataaatgacaagggagaaacagaagaaatgtaaaaatcaaaagacaaatttgtagtctttgaaataaatttgaaacctagatttaatggataattttttaggcaaatacagcttgtcaaaaatgacccccttttttttttaatggggaaacactagaggcatttccactaagatcaggaaccacagcaaggatgttcattatcttcactgctattcaacattgtgctggaggtatttagcaatgcagttaggcaagagaaaccaagttgaaacataagaatgagttaacaaagaagtaaagctatctgtttttagatgatgtgattgaatacctaggaaccccagataatcagtaataaaatgaactcaataatttagtgggacagcaggatataaaattcatatataataatcaatagtcttcttatttctcaaaagaagatatacagacagccaacaaacatatgaaaaaatgcccaacatcactaatcatctaggaaaagcaaattaaaaccacaatgagataccactttatttctgccagaatggccgtaattaaaaagtcaaaaaacaatagatgttggcatagatgtgataaaaagggaacattattacactgctgatgggaatgtaaattagtacaaccactatggaaaacagtatagagattctttaaagagttaaaagtagaactgccattcgacccagcaatcccactactgggtatctactcgaaggaaaaraagtcattatatgaaaaagacacatgcacatgcatgtttataacagcacagttcacaattgcaaagacgtggaaccaacctaagtgcccatcagtcaacaagtagattaagaaaatgtagtatgtatatacaccatggaatacagccataaaaaggaacaaaagaatgtcttttgcagcaacttggatggaactggaggccattattctaagtcaagtaacttgaatggaaaaccaagtatcgtatgtttaacttacaggtgggagctaagctacaaggacacaaaggcaaaagaatgacataatggactttggggcttggaagaggggaaggttaggagggggtgagggataaaagactacatattgggtaccgtgtacactgcttgggtgatgggtgcactaaaatctcagaaatcaccactaaagaacttatctatgtaaccaaaaaccacctgtacccctaaaactattgaaataaaaaagtaaaaaaaatcaatagtcttcatagaaacagcacatagaggacataatagtagatagaaccccatttacaacaacaaccaaaaagattaaacactcaggaatacatttgacaataaatgtacaaaacttagaaaaaatattaagccccttactcttgtctgaatgtttgtgtccccccaagtatgtattttcaattcctaacctccaagttcatggtgttgggaagtgaggcctttgggggtgattagattatgaggatggagcccttgggattggaattagtgcccttatgaaaagactgcagagagctagctagtctcttctaccatgtgaagacacagctagaagagatgccatctgaaccaggaaacaggaccttgccagtcaccagatttgccagtatcttgatctgggacttcctagactccagaattatgaaaaataaatgtttattgtttataagaaacctagtctgtaatattttgttatagcagcccaaatagactaagatattcctgaaagactcaaagtatacttaaacaaatataaagataccttgttttttgaaaaaaaaaattgttttatttttcaatttttttccttgagacaaggtctcattatgttgcccaggctgtcctcaaactcctggctcaagcaatcctcccacctcagccttctgagtagctggggccgtagcatgcaccaccatgcccagagttattgcctgttttttaataggccaactcaatgttataaaaattttattcctccctaaactaatttataaattcaatggaatcccaatgaaaataccaacaggagttaggcaggttggtactaaagttcacgtggaaaatataatgtaagaatagctgggaagtcactgaaaaaggaaaaccatgagggattgggtagaggggagaggaagctagctctactagtcagtaaatctaaggcgtgtacaattaaaacagcatggtactggcacatgaacagactaacagaccgtggaataaaattgtgtggtgactctataatgtggtcaccttggtcagactgatctatgtttttcagatacaatctgatacaaatggaaagtacagaattagacccatggaatagactaagacagcatcccatctgtaccccaaatgtgaattagagaccctggttcctggggccagtgtttttcaggtgtgaaaagacagaagcatttaactcattggcccttgattcctgttggttgaggattatctttagcacagaaataccccacacttcaggattatatatttctgagtgacacgttggcaaccacaggcagctgacactcccatgtcagagaagtcagggccacaaactgagccagtttgcatatttggaatgatgatcactgttaggtcactttggattcttcattctagtgaaggtaaggaaagtgctaccgtactcatagaggtcattgaccttgattcctgtcaggagctaggatcatttctgtataatggtggcagaaaggactctgtctagaattcatggtattcccttgagtatattttggtgctttcttgcctctgacagtggtggtaggggtagagaacaatcagtggttcaatcagggtgcacccaacacagggcttacatcctttgggataaaggtttgagtcaactattggagaagtagccaaaaccaggtaaagtgctggccagtggggaaggaaatgtagaatgggtggttttaggaaggagatgatgaatatcaattatggccttggaattagttgtagcagcaaggattgaactatgttccactcaccttcctttatttagtcttttgtagaaatagtgattgctaccrtcttgaagcctccatgatagattagacttaatggaggacatgaacaaatttgagggatggaaagggtagactgtattggacacctcttttgagccacttcacatggtctcaggccttatctgtgattccagctgtggcatcatgagcaagtcttttggggctcagctcactggcattgttactgccttacttcaggtatgcactgagtgttttttgcctactcagattcacttgcagctcacgtgtatactccccagaagtatgggggaattaatactctggggttaacgttcagccaggggctaacagttagtggttctgagatgtatttcataaggctcctcggaagattgctcattaaataaccagtggccagcatcagtgacccactcaaggaaaggtctttatattgtttttacctccttccctgttcatttccctgtcattcacttcaccgtctgaacaccttcctaaataaactacctttatgcaagcctttgctgtcaggacagccaaagctatgacagaggtatagaacatgggttgacaagctatggtacatggccaaaaccatgtaaataaagtttttttgttgtctttttttttttttttttttttttgagatggagtctcgctctgtctcccagggtggagtacagtggcatgatcttggctcactgcaacctccatctcctgggttccagtgactctcccacctcagcctcccgagtagctgggattataggtgtgggctgccacacccagctaattttttgtgtttttagtagagacggggtttcactatgttggccaggctggtcgcgaactcctgaccttgttattcacccgcttcggcctcccaaagtgctgggattacaggtgtgagccaccgcgtctggccagttttttatatttttagtagagacgaggtttcaccacgttggtcaggctggtcttgaacccctgacctcaagtgatccacccgccttggcctcccaaaatgctgggattacaggcgtgagcaccgtgcccagctgtaaataaagttttgttggaacacagccacactatttcttaatgtattgtgtataactgcctttgtgctgcagctacagaattgagtagttgtgaggagatcatataacctgtaaagtctaaaatatttacagaataaatgtgccattcctgtgcattgatttcccagtgctgctggaacaagttaccacaaacttagtaacttaaaaaatctggtggcttaaaacaacacaaattcttttacagttctggaggctagaagtctaaaatcagtttcaccggtttgatgtcagaagtataggcagagcaggttccttctgcaggctctagggcaaaatctgttttcttgccttttctagcttctggaggctacttgcattcctcgaatcctagctcccctttcccatcattccagtctcttgattcgttgtcacatatgcttcctgtgtcaaatctccctctgccttgctcttatggggacacttgtgattacatttaggactcacccaaataattcaatataatttccccatctcagtgtctttaacttaatcacatctgcaaagtaccttttgccatataaagtgcatttaaggatctagggagtaggactttgatgtctttgggggctgttgtttagcttaccacaggcttctgtctggtccctaaagatttacatccatcctacatgcaaaacacattcaccatattgtaaaaatcttccaaaatctaaacccattgcattaactcaggtctaaaatctcgttaaatattataactcaaaagtcccaaatctcataatctaatcatctaactccagtataggtgagtttctgggtatgattcatcccaagacagaattcctctttatctatggacctgtgaaactagcaaacaagttatgtgctgctaaaatactgyggtgggacaggcatagaataacaattatatacattcccattcagaaagggagacaatgagaggaaagaaaagagtcactagcaccagacaatttttaaatttaatcaggtaaacttttaggtttcaagggttgggaatagtccctgtggcacccagctccactctatgggccagagggttgtgtatgtattgtgtatggctgtttttatgttacagcaaccaaatcaagtggttatggggtagtcatatagcctgcaaagcctgaaatatttactagattgttccctgtcagaatgtatgcttgttgagggcaggagtctttgtgtcttttgcttgctaaagtatcctaagtgtctggaacagtgtctgacacttaacagacactcattgaaatgctgaactaaaagaaaaaaatttaagcaatttaatagagatgagagggcaaaacttttgacattgctgaagtagtaaccctatttatagataaaacattaaaaaagagaacttttaaaaacatagctacgtattaaaataaatctacatattaaaatagcatactgtattccaataaaaattgtaacagaatgactgacaccaacatgcatcttggttaacttgtactgtggagagaaacaagtaatttttaagacttctggcagaaaaagctagtcatttaaaagtgagaaaaactaagtccgacttcagccattcatggcagttttcagtgtcagaaaagaatggggacagtatctgcaaagttttaagaaacagaacatgtgatacaagaataatacagctaagcgaattgtcattcaagtacagggacaacaagcagacttccacactggaaagaattcagggaccataacacctgtgagcttttcttgaaaaataaaattaagcattgaagttatattaaatcaaaagagtgaattctgtaatagaggggctacaggaaatgaattaccagtgagcattgaatgtattcaattatagaagtagggttaaactactgtagaaattatgattaaagatagaatgtaaatgttataatccatgataatacaaaaagaataatactaacaaaaatttggagatacacgggagggcagatgagagaggagaaagcttacgtrcattaatttttttgctttcatagcttaactcttttatctaaagttttatggcagcgacaaaaagaactagaatgtaaatctcccatatttcagagagaaaacacattcacttaggaaaacaaaagacactcttacatctgtattgtccaataagatagccattagatacatatggctattatagtgaacattaattgaacttttgtaaaattgaaaattcagttcattagtcacactagctatatttcaagtgctcattagacacatttagcttgtggctactatgctgaatgatggaacattttccatcattgaaaaaagttctgttggataacactgccttataggaaacaaagaaagtactaaaaatagagatgtaacacaaaacaaattcatagaattaacaccagacattgcctattaaaagaaatacagattagtttaaaaataaaatacagctaactatatgctacatattgtgatgtatataaaacaaggcaaagcaaaatttgaatataaaaggaggggtgaaagcatataaggcaaacactactgaaaggaagcttgggtgaaggtattaataattagaaaattgaattaaatgcaaaaagttttgaaggagacaagaatgaggtactttatccaaaatgaggaggaactgtcatgaattatttattaatgtaacaccaaagtacataagccaaaaatcacaaaaaatgtaaatagaaacaaaatagtatcagcctttgttttaaaaagaaggaaaaacctaagggtaaaaaagatatgaataatatacttgatacagattgattaatacttatgaaaaccttacctttataatagaaaagtcacctttataagtattcatggaacacttacaaattattcagcattcagcccctgaaaacctgttaattctagaatgtggaaatatagtagagacttattctgtcattacaatgcaatcaaatgatacatttattttgagaagaaaatgaacagatagtacccagatatgtcaaaatggaaaaataaaaagaaaacctcaacttttgggacagtatataagtaaaaattgaaattacagaatatttttaaaatctaatgatgaaaacctatgagttcaactaaagctatggtcagaggaaaattcatagtccttggcacttaaattactgaacgagtgtattgttcagggctccccattgctggcagtagaatctagttcatagatcctcttggaaatccggaaaaccaagcttgcatctgacagagccagaaagagtgcatcagggaaaaatgcccacgctacaaaattttttggtgcaggacacttccaaaaaaagtcttttttttttttttttttttttttttgagacagggtctcactctgtcacccaggttggagtacagtggtgccatctcagctcactgcaacctctgcctcctgggttcaagcagtcctcccacctcaacctcccaagtagctgagactacaggcacaccccacaacaccagtctaatttttgtattatctgtagagatggggtttagtcatgtttcccaggctggtcttgcactcctgagctcaagtaatcctcccaccttgacctcccaaagtgctgggattacagacatgagccaccacacctggccaaattgctttcctaattgaaaaagaaatgaaggactatcagtcaaaacttcttcctcttggtttcctaatggagggagtcagagttgtagaccattttggattatgtgagaggagttgaggaagtggagagattgatagcagtagtataaatgcatggggagctaaagaagggagggtaaaaggttaaaaacctctttaaagcatggacatggaattttgtagctagttcacacctctgcctgtttttgaagctcagcagaaaggtctgaagccattgataattttagaaagccatgccaaagagagatacctcttgagttaattatttttgttaatttatttttaaaagttatgtctagtctgatgggattttaggatttgggggtatgtcagactaggacgctttataccattgtccttagtttatcttttatgctaattatcagtatctaaaattatggggaaggggttgttttgtttacgtgattatctttcttcctcccagaatgataagttccatgaaggcaaaggactttttgctttttactaattttgctcattgctttattcttgaattagaacagtcttctacgcagtagtcttagcacatatacaaagaatatgctccataaatatttgttgaattagtagctgcattaagataattatgggacaattggaaattggctaggggtgaactccatgggagagattttaattgatcttatgttaaccaatttgatttttcttagtctgactaaagacatgactggaaaagaagatgtataccgaggcccggccatcagagctctctgcaggatcaccgatgtaagttatctgtttcactgagttaccaaatggaacactatgtttatctgcaggtggccatgtagatttagtaggatttcctagtctgactttgtgaattttcagtataagagaaacatgatcaccagaaaggcttttgtggctccaggctttcttttgtcttcagatttttttcctttatttatgttagtccattttctctctttatttgcccccttgaactgttgtagtgagggtacattgcttgcaggaaacaaaaacccattcaaatttatcttaaaaagctttattataggacacaaatctcagaatttgaggtgaagcttataggtagacaccagggcaagaaattggkcagctttaagaattcaacagcagattttttttctttttcttttttgagtcggagtctcgtgctttcgcccaggctggagtgcagtggcacgatcttggctcactgcaacctccgcctcccgggttcaagtaattctcctgcctcagcctcctgagtagctgggatttgaggcacccaccaccacacctggctaatttttttttttgtagcagtttgaacaaactgaaaactttattcttctgtgtgagctgaactcaagtttcagaataatcatcgccatgtgggaggctttttgttaaaatgcagaagaaatctcaaaatactgtatttatatctgccttccactgctgccaatatagtaagcatctcctacacaatcaacaataaacagcaaatgatgcagttcatagagtattttgcacttggaaaaaaatatatatctgaattgtaaaaagaagtgtttggattttgtatgtcttttttattattgttaaaatactaaatgaaacttctcagcctggcatcttttcctctatctcaatagcttatcctagagccagaaaaagccttgaggagacaatgtcttctggcttccagataaaacttatccaaattttttggcaactcatccctaatgattttaaaatttgaaaaggcttgtctttttgtctatccttaaaagcaatatcaagtattatgtcctaagggggatctaaggagtgggggaaatttattgttcctcctcaccacagtacagtccacaaccactggctggcccacaggtggctcagcacttccctagtcagggtgtcccacctctaggaaagcgccagcactgaaggtcacccagtgtcattctttgtatgcagtacactcttggccaccaaacagtattgtgaaatacagatcattcagccgctaccaccatcactactcctacagggcacaagaaagcaatctccaatctcttttataaataaacagtcctaacttctaggctcagagatgatagataaaacttagctgttgcaattatataattccctgacatgaaattttattggatttaatatctacatgatatagccatttaagagtataacttgaggaaaaaggaaagatctacctgatcaaaaaacwtgttggggtggcctatcagaatcttaaacttcccctttagcatctataacgaagacatagatgaagtgcattcattccataattactgagctcctrttatatgccaggcactgagcacctgctcatcagctcattgacaatagccatgctcaagatccacactcctcatataactttctgattataattgatcttcccagataagatttccccaacaggagcgataatccagttcacttggtggctataagtataaaagaatgcactggcattctgttatgtacataacttcctatgagtttgatttaatgtgacaaaacatgaatacctttgtgtgaactgacaaaatccacttctagaactgcaaagccaaggaccgtatccatgaccttcatgctacaccaacttggagccatcctttttgacttctctcataactcacttctattccaagaacaacaagtcttcctccttacttcctaggacatttgctttggtgtctcaaaataatggatagtcagggacattggagtttggatatgcctatattaagaagtcttccaagtggggtaaatgaagattttcctagggtatggtaagactgcaaggaatacccaggcaatatcctcaaatctgtctgaggagagttttaaaggaataaatttccagatcttcaacttccctatgaaatattttctaaaaccaggccgatgcccagctaatttttgtatttttagtagaaacagggtttcaccatgttggccaggctattcactgtggtgatccatcatgtactagacacaggccctcttattgaaacatttaagagagagaatctgattagtcagcaataggccagtagcttatatccacctgtgtctgagtcaggtgtttaacattgatccagttcattatatctggagggatgagatcatgtagtatgttaggctgtctctttctgggaactctgagtaggaagggtaggccaggcattaccaagcaaattgaataatagctatatacccatgcttgggtatattttaggtgtatgtttgtaaccttcttaagttgtaaaggttgagcaggaccaaattatacatctgataaatctggattctagaaggagtaatagaaatgctttaatattttttggtgcactgttgttctgttgtgattgttttttattttttgcattacattggtagcagcgtgagacttgaccatgctagtgctagcaataaaactctttttttcatctgaatattgctctcagtctttttactcatctttatctgccaccaccttcccagtgctttttcccagttaaagttaaaaagaactgtatttccagaggattttatgttgagggctcactatagtagtacactacacatttaattctttatgtatctcagataatcagggattacgtttgatttctaggactctctgggatctgtatataatatgtgcccttcacatagaggaatcttcataacttcaaaagcaggctccatctccatataggaatttctttatgactttcctgatgggttcagcctctgcttgtgtatttcttccaaactgagattctccattttgagacagtttatttcattgttgaacagttattcttctttatatataatcttaaatgttctttcttaaagcttcaacttcgttgtttgggttctgccctttgggatattattactatattatcatccttttagtgcattctgaatatttgcacagaaacaaatataagattggtttttgaaaattattttgaagcataagagtaattttgcataaacatgtttttccttaacaattttttctttttgaatgttattagggaacaatgttgcaagccattgaaagatacatgaagcaggccattgtggataaagtttccagtgtatccagttcagcactggtatcttccctggtaagtgaacaagcagcttcctagttcttaagcatggtacagttttgagttgcgaaaacaaagtatcactatgattgtctcacaaatgaaacagttaaaaatatgtatacacctctattactttatccaagtgtgttttatctagagcaggggtccccaccccagggcttcagaccagtactggtctgtgacctgtcaggaactgggctgcacagcaggtggtgagtggcaggcaagcgagcattgctgcctgagctccgcctcctgccagaccagcagcagtgtgagattctcataggagctcgaaccctattgtgagctgcgcatgcagggatctaggttgccggcctcatatgagaatctaatgcctaatgatctgaggtggaacagtttcatccaaaaactatccctctgccctctgtccatgggaaaattgtcttccataaaaccaatccctggtgccaaaaaggttggagattgctgatctataggatcattgagcaattaaaaacataaaatgttcgtatgtttgaaaggttttggaaatctgaaagttatgttgtacacataataaaagaggggtaagtgtggggtatgggacaggaaagaaacctaggacccttttctttcatttaaaatcttctttatgacctgcctttatgacttctactacttgtctctttgtcctctgctttttctggtgccctttgtctacgtgtatccttcaatccaaagtttcctgtcccacttctgaatttcctcccaggaagtggtcttttttttagtaatacatttttctttccgtttttcagcagaacacaatttatacattaaaacctatcacattgcatttgattaacgtcagttacctatatgtgaatgtgtaagacatctaaatacaagagttcctgattctggaatataattggctgagttttatagcagagaatatactagtactctctttcttccaggggagtttcctggaagtaaagcttgttatgataacgttatttaagcaccgttctgttgactgtccatccctatcctgttcttcctctttcattacttccttttacacacctctcccagcttacatatactcacctttgtaacaggtatgggagaaaatacttctggtttatcagttgctccaggagtaaagacacaaaatagacttataagagctacatagttttcttcctcttgggaaatgtctgtgattttcaaagaaaactaactcatgtttctaagcttctagtgaccaagcattatttattctcattttttttttctgtatttagcacatgatgaagataagctatgatgtggttaagcgctggatcaatgaagcccaagaagctgcatcaagtgataatattatggtccaggtattgtcattgaatcacattagcttgtctcaggatcagcattctttaaacctgtattgtaggggcagtgtatygattccctagataaacattaactaaaggcaaattaagcagctactagtacgtattctgaagtaggaatctcactaattatgattactgccatttgaatactgcccttcaggtgtttcatagaagctagatgaccctttgtaggaatatttgggaaagattgttatattcagtagtagattgagatgctcgtggcagtcttttatttgaaaaataatttgtgtaaaaagataattccaagttctgaggccttgattataggcattataaaaatcatacggagcagcttttactttatgaaactttgaaaccattttgtcaaaaagagctcttttgatatttattaggttattcttaagaggaataagatkaaattcttcactggaaattgtgtgtaaagtaccccattttatttgagagggtgtttatgccctcttgatgtttataacttctatggtaacatattcagttattaggaaacagagtagtcatttttcccttgggaaacactctcattctcctgactctgatcatgtgtttttatacaaagtgtcaagatgatgacactcttgtagcctgctttaggagattaatcctttaattactaagatggccacagatgatgtaaagccactcgtagagacagatagcaccagtaaagccctggacccgagagcgtgtgtactgaggatgtgtgagccagtgttgagcctgctagagccatcttcaggttgtatgtcacctcctttatgcctgccagtctgaattgacagcttctaggggtaaattagaaacgtttaatcttttcagtcttgcctgtgtttagttcagtgtgaaaaaaatatttgtgtacatgtgacctgggtattttaaagaaatctttaatctagttccgtgtaattctatttttgtgtaaatattttgacatctttctaatccatgtgctaccttctttttcatgttctttagtaccatgcattgggagtcctgtatcaccttagaaagaatgatcgacttgctgtttccaagatgttgaataagtttactaaatctggtctcaagtcacagtttgcttactgcatgctgatccgaattgccagtcgcttactaaaagaaactgaggatgggtaagtgtcttcacctaaacctgggttattttccatttgcgaagttaatataccttagagtttatttcctttttgaattttttttggggcagtgctaactttacagatgagttcaatgtttttcaattttttaaaaaaattatggaatttcaagtcacactttttttaaccttactgtatgctcttgtatatgtacttaattattaatagcacattaacaaactgatattgaacaaaaaatatatgcattgatcataagatatatagataattaaatatgaaagttggcagggacattaagaattatcctatcccttttatttttataaaagagaatgttgaagtactgcatttagtgatttgcctaagatcattccacaagtctgaggcacataagatgtgaccaaatatactttagcagtctttcgaaggctagggaagggcaggaatgagaaatcttttgaggtatagtaagctgggcatggatctagggagcaaagaagaccccttccccagcctgaaggcttatggctgagctctaaaacaaagatttcttatgtggcctggcaaactgaggtgtaacacagagaaagatctctagaatctgccactactactaatgccctgctgaaaggggaaacctgatctgttcctcagatcatttgtaaacagcagataactgaatttaattaaagctgcagcaaagtcctgacccagatcaactattagctgctaaaaatgaaaaaggacctgcacttttctaatgataagtattagttacatcagtgtctactgcacctttataagcagtgtctagcaaacaatcaaaaaatacagaggcagtgacatgtaacccataaacaagagggaaaaaaatagtcagtagaagctgacttacagatgacccacatatagaaattaggaggcagtgactttagaaattactaggcagtgacttttaaacaacttctctaaagtgaacaccaaaggagttttgtaaagtgaacttttgtaacttttgtaaattacatctttccactaaagagtggaaaagatggacaaaatgtgtaaatgggtaaggaattcaatagataaatagaaactagaaaaaaaatcttgaaccaaaaaatacaatatcaaaaataaaaatttatttgaagcacttaatagcagattggacacagtggaaaaaagattagagaacttaaagacaagtcaatagaaattgtccaaactgaagcatagggagaaaaataagaaaagaaaataaaagaatagaacatctgaagcctagggaatatatcaaaaagtctaatacttgtgtaatgagtctcagaaggaaaggaaacagaatggaatagaataaatctttgaagagataatggatatgttagtccattttcatgctgctgataaagacatacccgagactgggcaatttacaaaaggaagaagtttaatggacttacaattccacgtggctggggaagcctcacaatcatggtggaaggcaaggaggaacaagtcacgtcttgaatggatggcagcaggcaaagagagagagcgcttgtgcagggaaactcccatttttaaaaccatcagatctcatgagacttactktcatgagaacagcatgggaaacacttgcccccatgattcaattacctcccacttggtccctcccataacacatggaaattcaagatgagatttgggtggggacacaggcaaaccatatcaatggatgagaattttccaaaatgaatgaaaggggctgggtgcggtggctcatggctgtaatcctagcactttgggaggctgaggcaggtgaatcgcttgagctcaggagttcaagacaagcctgggcaacatgacaaaaccccatctctatcagaagaaaatacaaaaattagccaggcatggtgacgcaggcctgtggtcccagctactcaggaggctgaggtgggaggatcggttgagcatgggaggctgggaggcagaggttacagtgacctgagatgacaccactgcactccaacccgggtgacagagtgagatccccatctcaaaaaataacaacaacaaacccaaaatgaatccaagatggccagtgacactcaagtaggataaataaaaaccacacctaatcataacctagtcatatatattacaagtaaaaagttgaaaaccaaaagagaaagaatgaaagaaaagcttgaaagtcgcctttttttaaaaaaaagacaaattagattcattagattcagggaaacaaaaataagaatcgttgacttctcattagaaaaatggatacgagaggataatggacatcttaaaattgttgaaacaaataactgaaaatctggagttctatactctaaaagtattcttccaaatgaaggtgaaattaaaacattttcaaccaggaaaaaacaaaaacccgaaaggatttgtgtctgcatacctgcatcatgaaggatgctaaaaggagtttttccagctaaaaagaaatgatagtagatggatgccaggatcttcaggaggaatgaaggacaagagaaagggtaaatgtgtaggtaaattaaaaggtaaatatgtaggtaaattataaatatatacaatttttactaaaaccagcagcaaattatggggcttatatatatgtagaagtgaaatatatgaaaatagtagtataaagggcatgagggagaaaaatggacatttgtaaagtttttgtatcatgcagtagtatattatttgatgatacactgtgataaggatgaatattgtaatctcttgaggatgaatattataactaacaaaaaaatctttgtaaaacatatagatcttaaatgtcaacagagaagataaaatggaatatttaaaaatattcagttgagcttcctccttccaataatggtgtagcttggccagcttaatcctcctgcaaataataattgacattagtacaaagctataccttcccaaaatgaagataacccacaacagtatgaaaatattrgggagtggtgaaaagcaagcaaaaactggagggaagcagttgatgcctgaaagacaaaagctatactgggtgaaatttgtggggtttttttgctattctcctgagggcattctgtaattcctcagtgtaggatgacagaaagctacagtatttctggacagagtggtcaaaacagtttgaggttggaagagtaactgaaaacttagagtggaaaacctggaaaagagggagccataaaaggaatgagtctcaaaatgaattttaaactctgcaaaaatcactggctgaccaactgaactacatatatacaggagaatactctaggagacctgccaaaagcagtagttgtaagataaaagaattgaatggagaattcagctgcaactcactatggaggaaataaagtttggagtttgatcccagccaagcttcttgctaaagaaactccatgagttctagagtctttacagtatatcattacaatgtttaatagatggtaaaaattgccagaagtacaaagaatttggaaaatgtgactagtagccaagagaaaaagcaatcaatagaaactaaccctgatatgatccagacrttggaattagcaaacaaaaactttgtagcatctattataaatttgtccatgactttatttatttatttatttatttatttatttatttatttatttatgacagtctctctcactctgttgtgaagcctggactgcagtggcgtgatcctggctcactgcaacctctgccttccacgttcaagcaatcctctcacctcagcctcccaagtagctgggactacagggatgcaccaccacacctggctaatttttgtactttttgtagagatggggttccgcagtgttgcccaggccggtctcaaactcctgagctcaagcaatcaatctgcctcagcctcccaaagtgctggtattataggtgtgcaccaccacagccagccttgtccatgactttaatggaaaatagttaccatgaatgaacaggggaaatggaaacgacaaaaagagctaagtagaaattctagagcttaaaaatactctgtcaggattcaaccagagaagtagaacctggaggatataaatatgtagagatttgtttattgattatgtaattcgggggccagctaagcaaatctaaaattcataggataggctgtcaggaagggaagattgcagggaggctggaactcaggggcacaggccaaagttgctctccgtaggtgaaatttgtcatttcacattttactgtaaacagcaagataaaactgggtcacatcttcatttttggaattttcctcaagtaaatatccaacttcatcgtttacaagttctgcttcacaaataactacagggcacaaattcactaagctctctgccaatacataataacaaggatctaccttactcaagtttacattaatgtgttttttacttccttctgagccctcactacagcatcttttaagtccagatttctgtaggcagttcataagccctgaccagcagtgtccttaagaaccagatcgattgatctttctttctccttccttccttccttcttccttccttctttctctttcttttctctttctttcttttctttctctctctctttctttttctttctctttctctttctttctctctctctctctctctttcttttttttatttattttaaagtcttgctctgctgcccaggctggagtacagtggcacagtctcagctcactacaacctccgcttcctgggttcaagccattcatatgcctcagcctcttgagtagctggaactataggcatcccagcactttgggargctgaggtgggtggatcatttaagatcagatttcttataagtctcttcaaaactaggcttcctccatcatgctcctcaaaattcttccaagcttccacccagtgcctaattccagtcagttctacaatttgaggtatttgtcgcagtaacacttcacttacaggtaccaaaatctgttagttttttttattgttgccataacaaattaccattaaatgtaatggcttacaacaagatccatttattatctcagatctgtagattagaagtctgacacaggcctcatggggctaaagtgaagatgttggtggagtgctgttgcttactggaggctttgaggaagaatccacttccaatctcatttaagtcgttggccaaattcatttccttgagactgtaggttgtaggtctctgtttccttgctggctttcagctggaggttagtctgtgcctctagaggttgcctgtattccttctcatgctttcaatgagcaactaaaggcctctctttgagtcccttgcatgttgattcatacgtgtcagagccagcaatagtgtgttgagctgcactttgaatctctctgatttgcctttctgccacatttcttctgcctcctctttcagcacatctgctttaaagtgctcatgtgattagattgcacctacctgggtaatttaggtgacaatcttaattatatcagcacagttcctttgccatgttgtaacgtaacatattcatcagttctaggaatgaagacatagacatctttggggagccattctgccccagcaagtgcaataactgaatcagataatttgctgaatggacttaacagcagattagagatggctgatgagagagtcaaagagagttagtgaatttgaagatagagcaggagaaagtagctagtttgaagaacagagagaaaacagattaaagaaaataaagagcctcgaagaactgtgggataagatcaagtggcctaacacatatgtaattggaatctggaagcaaaggtgatagaatggagcaaaaaagatatatgaagaaataatgaccaaatatttcccagtatgggtttattctagtagtataaggttgatctaacagtaaaacatagcataatatacctcattttaaaaatacagaagagtcttaatgccttaatgggtgcagaaaaaagcggttgataaaatttaatggcaattcatgattgaaatctctgccaccaggactggaagggaacatgattattctgacaacagtacaaaaaaactccactaaactttatacttattggtggactattaaaagctttcccctagagattgtgaatgagacagacaaaaatgcctgctatttttattttttaaatagtattttgctagaaggcttactttgtgcaataagtgaagaaaataaaatacctaaaaatttgaaaggaggacgtaacactatatttggagataatatggctatatatataggaaatgcaaaataaactgtacattatctattagagctcatatgtaaatttaccagtgttgctggtcaatatccgaagtcattttatttcttattccagcaacccatcaaaaagataaaattttgtaaaaatggtacaatttataattatattgaaatcaaatccttgggaatgtatctactaaaatttgtgtatatctctacacagaaaattacacaatattaaagtatgacctaagtaaatgaggcatataacatttatggaatattcaatattgtaaagatacatcttcttaaattgacctatggattccacaaacccctaattacaatcccaattggcttcttataaataaccaaacagaaatgcctacatttgtgtgttaaaagacatacagttgatccttgaacaacatgggtttgaactgcatgggtccacttacacatggattttcttccacctctgccacccttgagacatcaagacctcctcttccaccccagcctactcaatgtaagatgatgaggatgaagacctttatgatgatccactttcacttaatgaatagttatatcttctcttccttatgattttcttaatattttcttttctctagcttactttattgtaagaatacaatatatattacatataacataaaacgtgttaatgaactatttttgttatcaacaagatgattaatagtaggttattagtgatattttgggggagtcaaaagttacatgtgaatttgcagctacatgggggttggcactgttaaccccatgttgttcgaggatcaactgtacaagatgcctatagtactgttattcataattgccgcaaatttttttttttttttttttttttttgagactgagttttgctcctgttgcccaggccagagtgtaatggtgccatcttggctcactgcaacctctgcctcccgggttcaattgattctcctgcctcagcctccccagtagctgagattgcaggcacgcaccaccacaccctgctaattttttgtatttttagtagagacggagtgtgaccatgttcgccaggctggtcttgaacttctgacctcaggtgatccacctgcctcggcctcccaaagtgctgggattacaggcatgagccaccatgcccaaattgccacaaaatggaagcagtccaaatgtctatcagtgccagaatcaaaaaataaattgtggtatattcatatagtcagatagtatacaataatggaaatgaacaattactgttaaatacaatcacataaatacatctcaccaagaagtcatacacaaatgaatacattttatatagttccatttatgtttattttagacttaacataggcacaactaacctgtggtattgaaagttagtatagtgattatctctgaggtaggagcacattaattttgtagtaattcacgtatgattttcatactgtcatgtgtaacaccagattaaagggatagtaaatatttatttttccatataatttttgcaggtcaggggtttgggaatgtcttagctggatggttcttatttggggtagaaaagttgataattctgaattgatgtttacaaataatttttttttaattagaagctctaaaattccagaggatgacaacatgagaaataatggtgtagaaggtggtattagtttatggccataccaccttaaacaagccaggtctcatctgatcttggaagctaagcaaggttgggcctggttagtacttggatgcgagacaatctggtaataccggatgctgtaggctttaaaaaaaaaggaaagtggttggccgggtgtggtggctcatgcctgtagtcccagcactttgggaggccgaggcaggaggatcacttgaggtcaggagttcgagaccagcctggccaatatggtgaaacccccgtctctactaaaaatacaaaaattagctgggtgtgatggtgtgtgcctgtaatcccagctattcaggaggctgagcaggagaattgcttgaacccaggaggcagaggttgcagtgacctgagactgtgccactatactccaacctgggcaacagagtgagactttgtctcaaaaaaagtaaaaaaaggaaggtggtattagatggaagtaaaagtatgctgtgtatgtgtgttgtcatcttgtatgggaggaaaatatggtaataatataaaactttattgtaatattatagatatagctaatataatatttaattatataaagaatgtaaattgaatgtaaagctttcaaaatgtcgaagaaaatggagtgaggaaaagttgattgaaaattgataaggaaaaaattgattgaggtaaagccttcaaatagacaacaggaaagaaatcggttagaagtaagtgtaactgtatgtgttatctcttgctatgtggtatattggaccaaaaattcacagcttataagtaatacttactattccctagttgctatggtcagggatctgagagaatctgtccagtttgattcaaggtccctccctcgtatgagtttataatcaagtcgttggcctagcctgcagtcatctgggcctggaggatccacgtaattttacttatatagttgttgacaagcctcagtttctccctggctgttggccagatgctttagtttctcactttgagagccttccctccttccttccttccttccttctttgcttccttccttccttctttgcttccttccttccttccctccttccttccttcctttttttattatactttaagttctggggtacatgtgcagaatgtgtagaacgtgcagttttgttgcataggtatacatgtgccatggtggtttgctgcacccatcaacctgtcatctacattaggtatttctcctaacgctatccctcccctggcttcccacccgcgacaggccccggtgtgtgatgttcctctccttgtgtccatgggttctcattgttcaactcccacttatgagtgagaacatgtgcggtatttggttttctgttcttgtgttagtttgttgagaatgatggtttccagtttcatccgtgtccctgcaaaggacatgaactcatccttttttatggctgcatagtattacatggtgtatatgtgccacattatctttacccagtctatcattgatgggcatttgggttggttccaagtctttgctattgtgaatagtgccacaataaacatacgtgtgcatgtgtctttagagtagaatgatttataatcctttgggtatatacccagtaatgggattgctgggtcaaatggtatttctggtttaaatccttgaggaattgccacactgtcttccacaatggttgaactaatttacactcccaacagtgtaaaagagttcctatttctccacatcctctccagcatctgttgtttcctgactttttaatgattgccattctgagtgccgtgagatggtatctcattgtggttttgatttgcgtttctctaatgaccagtgatgatgagcttttttcctgcctgaatgttctcacagcatggcagctggcttctcccaaagcaagggaattgagagaaagagtgagcctgatatggaagttgcagtgttttataaccgaatctcaaaagtgacaggccatcacctctcatgtattcctttggtcacacagacaaactctggtgtatataatgtctacacaaggatgtggaattgtagaagtggatattttggggggccatcttggaggctggctagaacacaaaatataacatttatcataatgaatgtaattgaatttacatattaaaagaggctcagattgggtaaacaaaatgaaacaagagacctttatgcctttagaaaagacacaaacaaaatgacaggaaacattgaaaataaatatataaaaaatgtatactaactatacactcacacacataaaaaatgccatgtagcaatattaatataagccaaaataggaatcagtgtgtagtgcactaaaaatgacaaaatgggccaggcatagtggctcacgcctgtaatcctagcactttgggaggccaaggtgagtggattgcctgagcccaggagttcgagaccagcctgggcaacatggaaaaaccctgtctctactaaaaatacaaaaaaattagccaggcgtggtggcacgttcctgtagtcccagctacttgggaggttaaggcacgagaatctcttgaacccaggaggcggaggttgcggtgagccaagattgtgccacaacactccagcctgggtgacagcgtctctgtctcaaaaaataaataaataaataaaaatgacaaaatggaattttgtattttgacaaaagtaatggtctaaaaaaatataacaggaatgaacttgtatatgcttaatattaacaatatatagtttcaaaatatgcacatcaaaatcttaatacaggaaactaagtcctcttgatctcttcatggagactttaacacaactgtctcagaaactgagaaatcaagtataaaaatgtaagactgtaactgatttgtatgttactgataacaaaattgacctcctatttagaaccctgcatctaagagagaatatacagtattaattctttctaaaattttaaagtgaaaactgtacttatagaaaactgcataaaacataatagttgtgtgtccaatatatacagttgctatgaaacacccttataatgaccacatgtattaggaagtagcacatttctttgtaccccagaaatgctttatatatcctccttgatcatgattatttacccccagagcaaattactatcctaatttcatatcaaatttttcctgggtatgcatccctaaacagtaaagtttagttttgccttgttttgaatgctctgtcaatagaatcatgttatattttgtgtcttcttttttttttcttctagtgaaagtatagagatttactgcaaagagaaatgtacaaactcaagaaaggggagtgtgggcatactcaagagagagttccatacaaggggggtttggggctgctacctttatgggttgctttaactaaggggtagaatatttatgaaaatctctaggaaaaggtggcgatgtctctgaactgtagtgccacccactcatacccaatgcgggtgttcttggaactgtcatggcaccaatgggtgtgtgacttagtatgttaatgagcatataatgaggtcctaggtgaaatctaggtcaaatccagtgccatattgggtctggttggtcttagccagctctgttcacatgttgttcacttaccagcccatagcctctagtcatgtgaaactgctgcctggagttttctatactcaggtgaccacccagtattattcctgtctcattttatccccctcagagacttccatcccttattcttaagggttgatgagggaggaggacagttttctatatctgcttcctgctgatttaggggcattggccctgcctggcaccagcatggaaacctctggctgcctgctctaagggtcccaagggtgggtcatcagaagagtctgcatctgaggcagggattgcttggaatccttgcatgaccatcattttgacgtggaactttgcaacctagaagacataactttacaaagaggttaaacaagcaaggactaaaaaccaataataagaggatagctactagaagtcctagggaaggtaggaaccatgtcacactaggtaggtagcctttgatggggtcccagatggcttgcatgatagagttattgaaattatttagctggatagcccgttggtaaatcttttgaacttgtagttcagctaatactgaactgttagtataagaacagaagatggggcttattgcagcgcaagcccctccgagcagttgatgctttggcccagttagggcctcatgcagtggcttagtaatgagctgaaatcctgggatccaaatcgtgccatacctaggaaagttatgagttgcttcttcatttgtgaaggtctcgtctttaagatagcctcctattgtttgacagacaagatccggtttcctgggcttaggatgtatcccagatattttatttccattttagaaatctgggccttagatggagagacctgataatcttctttctcccaggaagtttaggacttgaatggtattcttatctgagttctctttagtggaactatatacaaggatgtcatccacatcttggagtacggcttccctttctacctctagctcccttaattctcatgccgaggcattgctgaacaagtaagggctatccctaaagccctgaggcagtactgtgcaggtgtactgctgggtaataatagtttcaggattagtccactcaaaagcaaacaaatattgagagtcagtgtgcagagggatacaaaaaaaaaagcatccttgagatcttataccatgaaccagcccttgctctaatgtcccagcttcctacactagaagcggcaaccatttcctacaggtttgctgttagggctgtttggtccttgggcgaagaatccccctgggtgtcatttgggcctgctgtctgtcccattgtttgccatgctgagtcctttcagcctcttcagccctatccctattattgaataacctaaaagctacatgaaacatgtgagtaataggcatttgggatcccaaagccaatttctgcactttcctcctcatgttcctcctgatgtcagatgctgatagactaataaagtatgtccttagaaaaatttggccagcatcaatattgggttcaatgttagcatatattttttagggccttcacaaggctcccctggaacacagcagggttttcatcttttctttgagttatttcccttattttattatagctcacaggcttagtggtacctttttttcattcctttcactaaacaagtcatcatgtgatttttttttttcttagataagcctggccctgttgataattccaattagggccactgttaggcacagacatggcctttacagtatattgttcggggtcccaagccaacaaggtgtcagcataagcctgggcctgtgcccaaatacactgcttttcctcaggggtacaacacatggacaagataatatgaatatgtccccaggttaactcagatgagagtgagagagcccagaacccctccataactttagttaggtcctctgaaaattggcccaacctctgtctgcagtaggctagatcagacatcgaaaaagatacacccagatagtcccagcacccccactggccacctccctaagtgggcataacttagaatggtcaagaatgtaggaaatgcactgtgggcaaccctagcagggctctgctccttctgtagagaagggtgtgaaggttggtaaggagatggactagcaggagtctgggggtacatttcccaaaagggggatcgtgcagggtatctggtgtcccatttggttcccctaaagggctgtgagcctaacaaaggcagcagttcccgcgagggtcaaggttctgataaagagccgtgaaggcttgtattaatacatatgctacttcagtccacttcttctgatgtttacaaaaaagatttaattccaagatggtattgcattttacggtcctagactctggccattgcaccccattttctaaaagagagttacccatagccttgacttgtcctcggcacgacctgaaagagaaaagaacagtatagtttcctcttcggagggactagttccagcatttacaaaatgccaggtgaatgagctggtggttctaatgtggctgtggatgctctgggctaggtggccataaagatgatactggtggactgcagtggagtccccagatgccaatgggacctcagccccagccagtgtccaggctcttgacaccagctccatggtcaggccggggagacagttgtccatgttcccttggctggctgccttggtgtccaggtgtccctggagccctagtgttgcccaggcgtccatggcccctggggctttgctttcaaggttgagtaggatgagtgtggacctagtttgaaagcagcaagcctgccaaaatccatctgaatatttattaccaagtaaaacttcgtagtagagataattcagcatggccaaataatagccaccttgaagggcccccttaaaacaataggcctagatttggcattccagcggacctattttgctgtgtccagagttcactaaacttttgtgtgaagtatgaggaagaagcatgagaagagaaaaccacaaaagcagggtttaaagagagatgggaaagggaaaacagttcccaaccaaggtcagtgtcttagcgcagctggtcccttgggagaacagaagacttcccaggaataagtcataatgctccttggcagctgtccagccactgggacatgggattttaccctactcaccctcattagcctcttgcccaggaggcccatggcacctcagagctcaggtgtaggtcaaagccttcccacctccatttgtcactgtcagggcgaactgcgttttccagctggaggaagcagaggcactacggctgaggggagtcaggctgtaggaacaaggaagaaagtagcagtaactccagagaacgagaagactccaattaaggccccaatgggacttaccaactgctggtggttctratgtggctgatgatgctctgggctggatggccataaagatgatactggtaggctggagggggggggtccccaaatgccgatgggacctcagcgccagccggtgtccagactcttgacaccatcatgagaaggaattcaaggatgagtcagaaaatagtgaaagtacagagattttatttcaaagcaaaaagtgcacactcaagggagtgtgggggtactcaagagagttgcatcttgttttgttcatttagtattttcttctaagatttcacccttgtttttgcttatagcttttgttcacttaaattctattttatatttccttgataatttcccagcttataacttttgagatgtaactcataaaccataaaactcaccttttaaaagtatatagttaatttttagtatattcacaaaactatgtaaccaccaccactaattccagaccatttgcatcacctcacaaagaaagcacccaacccattaacagtcactctgcattctccttttccctctcgccctggaaaatacaaatccatttttttgtctctggatttgcctgttctggacatctcatataaatggaatcacacaatatgtggccttttgtttctggcttctttcatttagtataatgttttcaagattcgtttatattgtagaagttatcagtacttctctttatggctgaataatattacattgtataaatataccgtattttatttatccattcatctgttgatggacatttggctcgtattcattttttggctattaatgaataatgctgctataaatggtcatgtgtaattttttatgtgacaatacatttcagttctttggggtacatacctaggatcagaactgctaggtcataatataactctgtgtctagctttttgaggaactgccaaactgttttccaagggggctgcaccattttccattttatcagtagtgtttgagagcccaatttctccacatcctcaccaacacttgtcattgtctgtcttttttattatacccaccccagtaggtgtaaagaggttgtgtgaatctagttgtggttttgatttgcattaccctagtgatcagtgatgttgaacatcttttcatgtgtttattgccaatctccatatcttctttggagagatgcctatttaaaatctttgcccatttaaaaaattaggttgtcttttattgttgaattgtattagttctttgtatatgttggatactaaacccttatcagatacataatttataaatgtttcctccaattctttgggtcatctcttcactttcttgatatagtgttctttcaaacacagaagttttacattttgataaagtctaatttttctgtgttttgtttgcttgtgcttttggtattacccctaagaaaccattgcctaattcaaggtcacaaagatttacacctgttttcttcaaagagtttattatagttttacattttacatttgggtctttgatccattttgagatcatttttgtgtatgctgtgggatagagattcaacttaattctttgcatgtggctatccagttgtctcagcaccgtttcatgaaaaacgatttgttctccattgaattgtcttggtgtgcttgtcaaagaattgtgattttaatttctaatttcctaattactaatgagtttgacaacttttttctgtgtttactatccatttggatatcctttctattgaaatatttgtttgagttttacccagtttttaacttggttttctgctttgttcccattgattttctaggagttctttatgtcttctaaatgtgagtccgatgttgattgtatgtgttgcaagtagcttttcccatactctagcttgtctcttccctttcttggtgtcttttgatgaacagagctccgtaagtgtaaggtagtcacatttatcagtcttttactttagaaataatgtgtttggtgtcttgcataagaaacattttcttaccccaaattcacaaatatatcctctgtactattttccataagcattatagcttcaactttcatattttaggtttgtaatctacctggaattgtttcatttttttttcttttttggatatagtataaggtagcaatttaatttctttcttctccatatgaaaacccaataatctcagcaccattagttgaaatatgtgtctatacccactactgtgcaatattagctttgttataaatcaggtgtctttatgtggattggtctatttctggactcatattcaccactgctttttatttctgtttatgtgccagcaacactccaccttattataatagctttctttatgttagtgtagatgtatgctagagaaaatcttcctcccttacttttctgtaagagtattttccagctcttgttttgcatcattacttctctgtgtgtgtctatataatttcatcagggattacttaaccttcccttcagtggagtttgcctcttcctaggagattctcaccaaggccattaataacaaccaaggagttccaacctggccagtcttattttccagatattttattcattgggactttagggctatttcccagttgcagttagtgattagccatcctgatgactgggcatgctgccaaaatgccaaaatgagtctttcacctctggtcctttgctttacttccagaaaactgcagtagaaacctgacctgatgtccagttttctgtgacagtttttatgtaattaagcgcaaatggccaagtagaattcatacaaagcctactagagtaatattcattggaggaaaacttataaagcctggagtaataccagatgcacttgtccccacattgcccattctttctatgtcagtgtatagaagtctaatgacattttcatactatgagatagggcttacaaccttgggctttatagtttttaaactgcattaagtacagaagctgaagctactcactgttgtgatcaggtgggatacaagagcagcataatgtggcatagttttggtgtaagcccaattttgacaacctagcataaattttgaggggaagtatcccttccctggtataatcagaggctgtgacccagatcttacaggtatatgacatggcatgccagtagcaggaatctttgtcagcattcacggttagggaagtatttaatatcagccttcccttggcatgatgaaaagtctggcgtgtttgctatattttttaaaaaagataccccttatcaaatcataaaagttctttttattcctagtttattgattttttatgatgaatagatttgtttttaattttaccatgcttttcctgccattagggaaagaatcatttgatttttctttgttattattataatattgtttaattttaatctgttcatattattttctagttttgtactaccttgagaaatttggactcttttttttttttttttgatcattcttgggtgtttctcgcagagggggatttggcagggtcataggacaatagtggagggaaggtcagcagataaacaagtaaacaaaggtctctggttttcctaggcagaggaccctgtggccttccacagtgtttgtgtccctgggtacttgagattagggagtggcgatgactcttaacgagcatgctgccttcaagcatctgtttaacaaagcacatcttgcaccacccttaatccattcaaccctgagtggacacagcacatgtttcagagagcacagggttgggggtaaggtcacagatcaacaggatcccaaggcagaagaattttttgttagtacagaacaaaatgaaaagtctcccatgtctacctctttctacacagacacggcaaccatccgatttctcaatcttttccccgcctttcccccctttctattccacaaaaccgccattgtcatcatggcctgttctcaatgagctgttgagtnnnnnnnnnnnnnnnnnnnnnnnnnnnnnnnnnnnnnnnnnnnnnnnnnnnnnnnnnnnnnnnnnnnnnnnnnnnnnnnnnnnnnnnnnnnnnnnnnnnnnnnnnnnnnnnnnnnnnnnnnnnnnnnnnnnnnnnnnnnnnnnnnnnnnnnnnnnnnnnnnnnnnnnnnnnnnnnnnnnnnnnnnnnnnnnnnnnnnnnnnnnnnnnnnnnnnnnnnnnnnnnnnnnnnnnnnnnnnnnnnnnnnnnnnnnnnnnnnnnnnnnnnnnnnnnnnnnnnnnnnnnnnnnnnnnnnnnnnnnnnnnnnnnnnnnnnnnnnnnnnnnnnnnnnnnnnnnnnnnnnnnnnnnnnnnnnnnnnnnnnnnnnnnnnnnnnnnnnnnnnnnnnnnnnnnnnnnnnnnnnnnnnnnnnnnnnnnnnnnnnnnnnnnnnnnnnnnnnnnnnnnnnnnnnnnnnnnnnnnnnnnnnnnnnnnnnnnnnnnnnnnnnnnnnnnnnnnnnnnnnnnnnnnnnnnnnnnnnnnnnnnnnnnnnnnnnnnnnnnnnnnnnnnnnnnnnnnnnnnnnnnnnnnnnnnnnnnnnnnnnnnnnnnnnnnnnnnnnnnnnnnnnnnnnnnnnnnnnnnnnnnnnnnnnnnnnnnnnnnnnnnnnnnnnnnnnnnnnnnnnnnnnnnnnnnnnnnnnnnnnnnnnnnnnnnnnnnnnnnnnnnnnnnnnnnnnnnnnnnnnnnnnnnnnnnnnnnnnnnnnnnnnnnnnnnnnnnnnnnnnnnnnnnnnnnnnnnnnnnnnnnnnnnnnnnnnnnnnnnnnnnnnnnnnnnnnnnnnnnnnnnnnnnnnnnnnnnnnnnnnnnnnnnnnnnnnnnnnnnnnnnnnnnnnnnnnnnnnnnnnnnnnnnnnnnnnnnnnnnnnnnnnnnnnnnnnnnnnnnnnnnnnnnnnnnnnnnnnnnnnnnnnnnnnnnnnnnnnnnnnnnnnnnnnnnnnnnnnnnnnnnnnnnnnnnnnnnnnnnnnnnnnnnnnnnnnnnnnnnnnnnnnnnnnnnnnnnnnnnnnnnnnnnnnnnnnnnnnnnnnnnnnnnnnnnnnnnnnnnnnnnnnnnnnnnnnnnnnnnnnnnnnnnnnnnnnnnnnnnnnnnnnnnnnnnnnnnnnnnnnnnnnnnnnnnnnnnnnnnnnnnnnnnnnnnnnnnnnnnnnnnnnnnnnnnnnnnnnnnnnnnnnnnnnnnnnnnnnnnnnnnnnnnnnnnnnnnnnnnnnnnnnnnnnnnnnnnnnnnnnnnnnnnnnnnnnnnnnnnnnnnnnnnnnnnnnnnnnnnnnnnnnnnnnnnnnnnnnnnnnnnnnnnnnnnnnnnnnnnnnnnnnnnnnnnnnnnnnnnnnnnnnnnnntggccgggcggggggctgaccccccccacctcccttccggacggggcagctggccgggcggggggctgacccccccacctcccttctggacggggcggctggccgggcggggggctgacccccacctccctcctggagggggtggctgccgggcagagacgctcctcacttcccagacggggtggctgccgggcggaggggctcctcacttctcagacggtgtggctgccgggcagaggggcttctcacttctcagacggggcggttgccaggcagagggtctcctcacttctcagacggggcggctgggcagagacgctcctcacatcccagacgggggggcagggcagaggtgctccccacatctcagatgatgggcggccgggcagagacgctcctcactttccagactgggcagccaggcagagaggctcctcacatcccagacgatgggcggccaggcagagacgctcctcacttcccagacggggtggtggccgggcagaggctgcaatctcagcactttggggggccaaggcaggcagctgggaggtggaggttgtagcgagccgagatcatgccactgcactccagcctgggcaccattgagcactgagtgaacacaactccgtctgccatcccggcacctcgggaggccgaggctggcggatcactcgcggttaggagctggagaccagcccggccaacacagcgaaaccccgtctccaccaaaaaaatacgaaaaccagtcaggcgtggcggcgcgcacctgcagtcgcaggcactcggcaggctgaggcaggagaatcaggcagggaggttgcagtgagccgagatggcagcagcacagtccagcttcggctcggcatgagagggagaccgtggaaagagagggagagggagaccgtggggagagggagagggagaccgtggggagagggagagagagaccgtggggagagggagagggagagggagagctctcctgaacatttaaagaagtagagaaatttggactcttacattcataaaaataggttatagatggggtaaaggcttaaataaacagaacctcaaattttcatctagttaaaactaaacataagaaaaatacaatcttttgataggaaaaataaaatattgatagtttttacaacaaaaatttaacgtcttttacgattaaaaaatacataaagttagacaaaaatagactgggagaaaaatatttgctacacatayatttgctactcatggagractagtatccaaatatataaagaactcttacaaatcaggagaaaagatatcctgatggagaaatttgggattaacgcgcagctccagatgaggaaatgcacctgccaataaacaaaaataagcatcacctcactattgattagagaaatgcagactaaaacaaggtgacattattttttcatctatcaggttgaacaaatttaaaatgttttgtagtatctagtgttggctagaacatgggtattctcataccacattgctgagaatataaattggtagaaatactttgtaaggtaatttggtagtgtctattaaaaagtaaacatggccaggtgcggtggcacacacctgtagttccagctactggggaggctgaagtggaaggattgcatgaggccaggagttcaagactagccccgccaacatagcaagaccctgtctctaaatttttttttttaagttagccaggtgtggtggtgagcacctatagtaccagctacttgggaggctaaggtgggaggatcacagaaggccttcaaggttgcattgagctgtgatcacacctgtaaattgctactgcactgtagcctaggtgacacagtgagacccgactcttaaaaaaaaaaaaagtaaacctgtacagtgtttggaatccagcagtttctcccttgcatatctgctgcagagaaacacttgtacactttcacaaggaaacatatacaaatatttcaattccagtattacttgtaatatcaaaatattgagagatgtctttaacatcctttgaattaacgattggacaaaatgtttagttgtattatgggatgttataaaatgtttaatcaggaattaattattgtttcatgaaaaaaaaaactgtgtgaagtaaatatacagccaatgccatttctgtaaaagaaaaaactacacactgaatatagtttctccttgtgtgtatatgtgtgtggcggggggtaaatatttttttatattgggaaagataaataacaaattctcattatagtcattatctttagggagctgggagaagaggactgcattggggaagattgtcaaagaggactgtctccatgttctaagctttttttttattattatactttaagttttagggtacatgtgcacaaygtgcaggtttgttacatatgtatacatgtgccatgytggtgtgctgcacccattaacttgtcatttagcattagatatatctcctaatgctatcccttccccctccccctgccccacaacagtcctcagtgtgtgatgatccccttcctgtgtccatgtgttctcattgttcaattcccacctatgagcaagaacatgcggtgtttggttttttgtccttgtgatattttgctgagaatgatgatttccaatttcatccatgtccctacaaagaacatgaactcatcattttttatggctgcatagtattccatggtgtatatgggccacattttcttaatccgstctatcattgttggacatttgggttggttccaagtctttgctattgtgaataatgctgcaataaacatacgtgtgcatgtgtctttatagcagcatgatttgtagtcctttggatatatacccagtaatgggatggctgggtcaaatggtatttctaattctagatccctgaggaatcgccacactgacttccacaatggttgaactagtttacagtcccaccaacagtgtaaaagtgttcctatttctccacatcctctccagcacctgttgtttcctgactttttaatgattgccattctaactgkygtgagatggtatctcattgtggttttgatttgcatttctctgatggccagtgatggtgagcattttttcatgtgttttttggttgcataaatgtcttcttttgagaagtgtctgttcatatacttcgcccactttttgatggggttgtttgtttttttttcttgtaaatttgtttgagttcattgtagattctggatattagccctttgtcagatgagtaggttgcaaaaattttctcccattctgtaggttgcctattcactctgatggtggtttcttttgctgtgctgaagctctttagtttaattagatcccatttgtcaattttggcttttgttgccattgcttttggtgttttagacatgaagtccttgcccatgcctatgtcctgaatggtattgcctaggttttcttctagggtttttatggttttaggtctaacatgtaagtctttaatccctcttgaattaatttttgtataaggtgcaaggaagggatccagtttcagctttctacatatggctagccagttttcccagcaccgtttattaaatagggaatccatgttctaagttttaaaagaggaatttaaatttaaaaatttaaaggtgaatattgtacaattaaaatttttattcaaaagcaagtattatattttcatttgcatttaacattaacagaatgatttttgtagtaacaatatccaactggatattggaaagcattttaggactatagagaatagagccttctgttagtttcttgaatagtatttttcttttcttttcttttcttttttttgagatggagtctcactctatcgcccaggctggagtgcagtggtgccatctcggctcactgtagcgtccaccttctgtgttccagcgattctccttccttagcctcccgggtagctgggattacaggcatgcgccaccatgcctggctaatttttgtattttcagtagagacggggtttcatcatgctggccaggctgttctcaaactcctgacctcaggcgatctgcctgcctccgcctcctaaagtgctaggattacaagcgtgagccaccacgcccagctgaatggtattttttaatataatagaatttatgatgggttaatattaaaggataggaattatatgtaatttataaactgcttttaaaatgcaagagttttttattactgttgagtgttggctaatagctatggttctaatcaatcatagtttgttgattggaattgaaagaagttacttttggtgccacttatagataggaaggaaaagattcacatttaggatgctgtaaatacttattttttagaaaatttttccataagttggctgggcacggtggctcacgcctgtaatcccagcactttgggaggccgaggtgggcagatgacgacgtcaggagatcaagaccatcctggctaacatggtaaaacgctgtctctactaaaaatccaaaaaattagcccggcgtggtggcgggtgcctgtagtcccagctactcgggaggctgaggcaggagagtggcatgaacccggaaggcagagcttgcagtgagccgagatagcgccactgcattcctgcctgggcaacacagcgagactctgtctcaaaaaaaaatttttttttccataagttattggggtacaggtggtatttggttacacaagtaagttctttagtggtgatttgtgagatgttggtgcacccatcacctgagcagtatacactccaccatatttgaagcctttaacccttgcctgcttcccactctccccccaagtcccaaaagtccattgtatgattcgtatgcctttgagtcctcatagcttagctcctaatttaagtgagaacatacaatgtttggttttcaattcctgagttacttcacttagaataatagtctccaatctcatccaggttgttgtgagtgccattaattcattccttttttatggctgagtagtattccatcatataaatataccacagtttccttatccacttgttgattgatgggcatttgggttggttccatgattttgcagttgcaaattgtactgctataaacatgtgtgtgaagtatcttttttatataatgacttcttttcctcgagtagatactgcgtagtgggattgctggatcaaatggtagttctacttttagttctttaaggaatctccacactgtttttctatagtggttgtactagtttacattcccaccagcagtgtagaagtattccctgttcaccgcatccatgccaacatgtactgttttttgatttttttgattgtggccattcttgcaggagtaaggtggtatcacattgtggttttgatttgcatttccctgatcattagtgatgttgagcatttttttatatgttygttgctcatttgtatatcttcttttgagaattgtctattcagttccttagcccactttttgatggaattgtttttttcttactgatttgttagagtttgttgtagattctggatattagtcctttgtcagatgtatagattatgaagattttctcccactctgcggggttgtctctttactctgctgactgttccttttgccgtgcaaaagctctttagtttaataaagtcccaactatttaatctctgtttttattgcatttgcttttgggttcttgatcattaaatgcttgcctaagccaatgtgtagaagggtttttccaatgttatcttctaggatttttatagtttcaggtcttagattttagtccttaatccttcttgagttgatttttgtataaggtaagcgatgaggatccagtttcattctgctacatgtggctagccagttatcccagcaacattagttgaaaagggtgtcctttctcaactttatagttttgcttgctttgtcaaagatcagttggctgtaagtatttgggtatatttctgggttctctattctgttacattggcctatgtgcctgtttttataccagtaccttgctgttttggtgactctggccttatagtataatttgaaatcaggtaatgtgatgcctccagatttgttcttttagcttagtcttgctttggctatgggctcttttttggttccatatgaattttagaatttttttttctaattctgtgaagaatgatggtggtattttgatggttttgatggggattgcattgaatttgtagattgcttttggcagtatggtcattttcacagtattgattctacccatccatgagcatgggatgtgtttccatttgtttgtgtcatgtatgatttctttcagcagtgttttgtagttttccttgtagaggcctttcacctccttggttagatatattcctaagtattttattttttttgcagctattgtaaaaggggttgagttcttgatttgattctccgcttagttgctattggtgtatagaagagctactgatttgtgaacattaatcttgtattcagaaactttgctgaattcttgtatcagttctaagagatttctggaggagtctttagggttttcaaggtaaatgatcctatcgtcagcaaacagtgacagtttgacttcctctttatcgatttggatgccctttatttcttgggcatccttgtctgattgctctggctacaacttctatgttgaagaggcgtggtgagagtgggcatcgttatcttgtttcagttctcagagggaatgctttcaacttttccccattcaatattatgttggctgtgggtttgtcatagatggcttttgttacattgaggtatgtcccttgtataccaattttgctgagagttttaatcataaagggatgctggattttgtcaaatgctttttctgcatctattgcgatgatcatgtgatttttgtttttaattttgtttatgtgatgtatcacatttattgacttgtgtatgttaaaccatccctgcatccctggtatgaaacccacttggtcatggtggattatccttgatatattgttggattcagttagctagtattttgttaaggattttagcatctgtgttcatcaaggatatcagtctgtagttttctttttttgttatgtcctttcatggttttggtattagggcaatactggcttcatagaatgagttcgggagggttgcttctttctctgtcttgtggaatagtttcaaaaggattggtaccaattcttctttgaatgtctggtagaattctgtgaattctgtgaaaagtctggtcctggactttttttttttttttttttttttttttttttttttgagatggagtcccgctctgttgccagtctggagtgcagtggcgcgatcttggctcactgcaacctccgcctcccagggattcaagcgattcccctgcctcagcctcccaagtagctgggactacaggcatgcgccaccatgcctggctaattttttgtattttagtagaaacaaggcttcaccatgttggccaggttggtctcaatctcctgaactcatgatccacccgcctcagcctcccaaagtgctgggattacaggcgtgagccactgcaccaggcctgggctttttttttttttttttttttttttacactttatgttttagggtacatgtgcacattgtgcaggttagttacatatgtatacatgtgccatgctggtgcactgcacccactaactnnnnnnnnnnnnnnnnnnnnnnnnnnnnnnnnnnnnnnnnnnnnnnnnnnnnnnnnnnnnnnnnnnnnnnnnnnnnnnnnnnnnnnnnnnnnnnnnnnnnnnnnnnnnnnnnnnnnnnnnnnnnnnnnnnnnnnnnnnnnnnnnnnnnnnnnnnnnnnnnnnnnnnnnnnnnnnnnnnnnnnnnnnnnnnnnnnnnnnnnnnnnnnnnnnnnnnnnnnnnnnnnnnnnnnnnnnnnnnnnnnnnnnnnnnnnnnnnnnnnnnnnnnnnnnnnnnnnnnnnnnnnnnnnnnnnnnnnnnnnnnnnnnnnnnnnnnnnnnnnnnnnnnnnnnnnnnnnnnnnnnnnnnnnnnnnnnnnnnnnnnnnnnnnnnnnnnnnnnnnnnnnnnnnnnnnnnnnnnnnnnnnnnnnnnnnnnnnnnnnnnnnnnnnnnnnnnnnnnnnnnnnnnnnnnnnnnnnnnnnnnnnnnnnnnnnnnnnnnnnnnnnnnnnnnnnnnnnnnnnnnnnnnnnnnnnnnnnnnnnnnnnnnnnnnnnnnnnnnnnnnnnnnnnnnnnnnnnnnnnnnnnnnnnnnnnnnnnnnnnnnnnnnnnnnnnnnnnnnnnnnnnnnnnnnnnnnnnnnnnnnnnnnnnnnnnnnnnnnnnnnnnnnnnnnnnnnnnnnnnnnnnnnnnnnnnnnnnnnnnnnnnnnnnnnnnnnnnnnnnnnnnnnnnnnnnnnnnnnnnnnnnnnnnnnnnnnnnnnnnnnnnnnnnnnnnnnnnnnnnnnnnnnnnnnnnnnnnnnnnnnnnnnnnnnnnnnnnnnnnnnnnnnnnnnnnnnnnnnnnnnnnnnnnnnnnnnnnnnnnnnnnnnnnnnnnnnnnnnnnnnnnnnnnnnnnnnnnnnnnnnnnnnnnnnnnnnnnnnnnnnnnnnnnnnnnnnnnnnnnnnnnnnnnnnnnnnnnnnnnnnnnnnnnnnnnnnnnnnnnnnnnnnnnnnnnnnnnnnnnnnnnnnnnnnnnnnnnnnnnnnnnnnnnnnnnnnnnnnnnnnnnnnnnnnnnnnnnnnnnnnnnnnnnnnnnnnnnnnnnnnnnnnnnnnnnnnnnnnnnnnnnnnnnnnnnnnnnnnnnnnnnnnnnnnnnnnnnnnnnnnnnnnnnnnnnnnnnnnnnnnnnnnnnnnnnnnnnnnnnnnnnnnnnnnnnnnnnnnnnnnnnnnnnnnnnnnnnnnnnnnnnnnnnnnnnnnnnnnnnnnnnnnnnnnnnnnnnnnnnnnnnnnnnnnnnnnnnnnnnnnnnnnnnnnnnnnnnnnnnnnnnnnnnnnnnnnnnnnnnnnnnnnnnnnnnnnnnnnnnnnnnnnnnnnnnnnnntagtttcttttgctgtgctgaactctttagtttaattagatcccatttgtcaattttgtcttttgttgccattgcttttggtgttttggacatgaaatccttgcccatgcctatgtcctgaatggtaatgcctaggttttcttctagggtttttatggttttaggtctaacgtttaagtctttaatccatcttgaattgatttttgtataaggtgtaaggaagggatccagtttcagctttctacatatggctagccagttttcccagcaccatttattaaatagggaatcctttccccatttcttgtttttctcaggtttgtcaaagatcagatagttgtagatatgcggcgttatttctgagggctctgttctgttccattgatctatatctctgttttggtaccagtaccatgctgttttggttactgtagccttgtagtatagtttgaagtcaggtagtgtgatgcctccagctttgttcttttggcttaggattgccttggtgatgtgggccctttttggttccatatgaactttaaagtagttttttccaattctgtgaagaaagtcattggtagctttatggggatggcattgaatctgtaaattaccttgggcagtatggccattttcatgatattgattcttcctacccatgagcatggaatgttcttccatttgtttgtatcctcttttatttccttgagcagtggtttgtagttctccttgaagaggtccttcacatcccttgtaagttggattcctaggtattttattctctttgaagcagttgtgaatgggagttcactcatgacttggctctctgtttgtctgttgttggtgtataagaatgcttgtgatttttgtacattgattttgtatcctgagactttgctgaagttgcttatcagcttaaggagattttgggctgagacaatggggttttctagatatacaatcatgtcatctgcaaacagggacaatttgacttcctcttttcctaattgaataccctttatttccttctcctgcccaattgccctggccagaacttccaacactatgttgaataggagtggtgagagagggcatccctgtcttgtgccagttttcaaagagaatgcttccagtttttgcccattcagtatgatattggctgtgggtttgtcatagatagctcttattattttgaaatacgtcccatcaatacctaatttattgagagtttttagcatgaagggttgttgaattttgtcaaaggctttttctgcatctattgagataatcatgtggtttttgtctttggctctgtttatatgctggattacatttattgatttgcgtatattgaaccagccttgcatcccagggatgaagcccacttgatcatggtggataagctttttgatgtgctgctggattcgttttgccagtattttattgagaatttttgcatcaatgttcatcaaggatattggtctaaaattctcttttttggttgtgtctctgcccggctttggtatcaggatgatgctggcctcataaaatgagttagggaggattccctctttttctattgattggaatagtttcagaaggaatggtaccagttcctccttgtacctctggtagaattnnnnnnnnnnnnnnnnnnnnnnnnnnnnnnnnnnnnnnnnnnnnnnnnnnnnnnnnnnnnnnnnnnnnnnnnnnnnnnnnnnnnnnnnnnnnnnnnnnnnnnnnnnnnnnnnnnnnnnnnnnnnnnnnnnnnnnnnnnnnnnnnnnnnnnnnnnnnnnnnnnnnnnnnnnnnnnnnnnnnnnnnnnnnnnnnnnnnnnnnnnnnnnnnnnnnnnnnnnnnnnnnnnnnnnnnnnnnnnnnnnnnnnnnnnnnnnnnnnnnnnnnnnnnnnnnnnnnnnnnnnnnnnnnnnnnnnnnnnnnnnnnnnnnnnnnnnnnnnnnnnnnnnnnnnnnnnnnnnnnnnnnnnnnnnnnnnnnnnnnnnnnnnnnnnnnnnnnnnnnnnnnnnnnnnnnnnnnnnnnnnnnnnnnnnnnnnnnnnnnnnnnnnnnnnnnnnnnnnnnnnnnnnnnnnnnnnnnnnnnnnnnnnnnnnnnnnnnnnnnnnnnnnnnnnnnnnnnnnnnnnnnnnnnnnnnnnnnnnnnnnnnnnnnnnnnnnnnnnnnnnnnnnnnnnnnnnnnnnnnnnnnnnnnnnnnnnnnnnnnnnnnnnnnnnnnnnnnnnnnnnnnnnnnnnnnnnnnnnnnnnnnnnnnnnnnnnnnnnnnnnnnnnnnnnnnnnnnnnnnnnnnnnnnnnnnnnnnnnnnnnnnnnnnnnnnnnnnnnnnnnnnnnnnnnnnnnnnnnnnnnnnnnnnnnnnnnnnnnnnnnnnnnnnnnnnnnnnnnnnnnnnnnnnnnnnnnnnnnnnnnnnnnnnnnnnnnnnnnnnnnnnnnnnnnnnnnnnnnnnnnnnnnnnnnnnnnnnnnnnnnnnnnnnnnnnnnnnnnnnnnnnnnnnnnnnnnnnnnnnnnnnnnnnnnnnnnnnnnnnnnnnnnnnnnnnnnnnnnnnnnnnnnnnnnnnnnnnnnnnnnnnnnnnnnnnnnnnnnnnnnnnnnnnnnnnnnnnnnnnnnnnnnnnnnnnnnnnnnnnnnnnnnnnnnnnnnnnnnnnnnnnnnnnnnnnnnnnnnnnnnnnnnnnnnnnnnnnnnnnnnnnnnnnnnnnnnnnnnnnnnnnnnnnnnnnnnnnnnnnnnnnnnnnnnnnnnnnnnnnnnnnnnnnnnnnnnnnnnnnnnnnnnnnnnnnnnnnnnnnnnnnnnnnnnnnnnnnnnnnnnnnnnnnnnnnnnnnnnnnnnnnnnnnnnnnnnnnnnnnnnnnnnnnnnnnnnnnnnnnnnnnnnnnnnnnnnnnnnnnnnnnnnnnnnnnnnnnnnnnnnnnnnnnnnnnnnnnnnnnnnnnnnnnnnnnnnnnnnnnnnnnnnnnnnnnnnnnnnnnnnnnnnnnnnnnnnnnnnnnnnnnnnnnnnnnnnnnnnnnnnnnnnnnnnnnnnnnnnnnnnnnnnnnnnnnnnnnnnnnnnnnnnnnnnnnnnnnnnnnnnnnnnnnnnnnnnnnnnnnnnnnnnnnnnnnnnnnnnnnnnnnnnnnnnnnnnnnnnnnnnnnnnnnnnnnnnnnnnnnnnnnnnnnnnnnnnnnnnnnnnnnnnnnnnnnnnnnnnnnnnnnnnnnnnnnnnnnnnnnnnnnnnnnnnnnnnnnnnnnnnnnnnnnnnnnnnnnnnnnnnnnnnnnnnnnnnnnnnnnnnnnnnnnnnnnnnnnnnnnnnnnnnnnnnnnnnnnnnnnnnnnnnnnnnnnnnnnnnnnnnnnnnnnnnnnnnnnnnnnnnnnnnnnnnnnnnnnnnnnnnnnnnnnnnnnnnnnnnnnnnnnnnnnnnnnnnnnnnnnnnnnnnnnnnnnnnnnnnnnnnnnnnnnnnnnnnnnnnnnnnnnnnnnnnnnnnnnnnnnnnnnnnnnnnnnnnnnnnnnnnnnnnnnnnnnnnnnnnnnnnnnnnnnnnnnnnnnnnnnnnnnnnnnnnnnnnnnnnnnnnnnnnnnnnnnnnnnnnnnnnnnnnnnnnnnnnnnnnnttctctgtattggttattctagttatacattcttctaaatttttttcaaagctttcaacttctttgcctttggtttgaatgtcctcccgtagctcagagtaatttgatcgtctgaagccttcttctctcagctcgtcaaagtcattctccatccagctttgttccgttgctggtgaggaactgcattcctttggaggaggagaggcgctctgcgttttagagtttccagtttttctgttctgttttttccccatctttgtggttttatctacttttggtctttgatgatggtgatgtacagatgggtttttggtgtggatgtyctttctgtttgttagttttccttctaacagacaggaccctcagctgcaggtctgttggaataccctgctgtgtgaggtgtcagtgtgcccctgctggggggtgcctcccagttaggctgctcgggggtcaggggtcagggacccacttgaggaggcagtctgcccgttctcagatctccagctgcgtgctgggagaaccactgctctcttcaaagctgtcagacagggacatttaagtctgcagaggttactgctgtcttttggttcgtctgtgctctgcccccagaggtggagcctacagaggcaggcaggcctccttgagctgtggtgggctccacccagttggagcttccctgctgctttgtttacctaagcaagcctgggcaatggcgggcgcccctcccccagcctcgctgccgccttgcagtttgatctcagactgctgtgctagcaatcagcgagattccgtgggcgtaggaccctccgagccaggtgcgggatgtaatctcgtggtgggctgttttttttttttgtttgtttttttttktttttttgagacggagtctcgctctgtcgcccaggccagactgcggactgcagtggcgcaatctcggctcactgcaagctccgcttcccgggttcacgccattctcctgcctcagcctcccgagtagctgggactacaggcgcccgccaccgcgcccggctaattttttgtatttttagtagagacggggtttcaccttgttagccaggatggtctcgatctcctgacctcatgatccacccgcctcggcctcccaaagtgctgggattacaggcgtgagccaccgcgcctggcctgggctgttttttaagccggtcggaaaagctcaatattcgggtgggagtgacccgattttccaggtgcgtccatcacccctttctttgactcggaaagggaactccctgacccttgmgcttcccaagtgaggcaatgcctcgccctggttyggcttgcgcacggtgcgtgcacccactgacctgcgcccactgtctggcactccctagtgagatgaacccagtacctcagatggaaatgcagaaatcaccggtcttctgcgtcgctcacactgggagctgtagacgggagctgttcctattcggccatcttggctcctccttctcaatcattctggacttttttttgttggtaatttttaaattaccatttcaatctcgctgcttgttattggtctgttcaggggatctaattcttcctgatttaagctaggagagttgtatttttccagcagtttattcatttcttccaggttttctagtttatgtgtgtaaagatgttcattgtaggtttgaatgatcatttgtatttcagtggtgtcagttgtaatatcttctgtttcgtttcttaatgaagttatttggattttctctcttcttggttgatcttgctaatggtctatcaattttatttatctttttgaagaaccagctttttgttttatttacctttggtatttttttgtttgtttgtttgtttcaatttcatttagttttgctctgatcttagttatttcctttcttctgctaggtttaggtttgggtttggtttgttcttgtttttctagttccttgaggtgtatccttataatgtcagtttgtgctctttcagtctttttgatgtaggcacttgaactttttgagcttttgaacttttgagcttttgatggagggctatgaactttcctcttagcactgcctttgctgtattccagaggttctgataggttgtgtcattattgttcagttcgaagaattctttgatttccatcttgatttcatgttgacccaatgcttactcaggagcaggttatttaatttccatgtatttgcacggttttgaaggttccttttggagttgatttccagttttatttaactgtggtctcagagagttcttgatataatttcaattttcttaaatttattgaggctcgttttatggcctatcatatggcctgtcttggagaaagttccatacactgttgaatagaatgtgtattcagtggttgttggataagatgttctatatatttgttaagtccatttgttcgaaggtatagtttaaatccattatttctttgttgactttctgtcttgatgacctgtctagtgctgtcagtggagtattgaagtcccccactattattgtgttgccatctatctcatttcttaggtctagtaatacttgttttataaatttgggagctcaagttttgggtggatatatgtttaggattgtgatattttcctgttggacaagggcttttaccattatctaatgtacccctttgtctcttttaactgctgttgctttaaagtttgttttgtctgatataagaatagctacccctccttgcttttggtgtccatttgcatgaggtatttcataaaggcacccctgtactttatgagagtatgtgttaggtgagtctcctgaaggcagcagatggttggtgagttgttatccattttgcagttctgtatcttttaagtggagcatttaagctatttacactcagtgttagtattgagatgtgaggtactgttgcattcatcatgctatttgttgcctgtgtactttggtttttttgttttttgtttttgccttttaacttatatttttgttttataggtcctttgtgatttatgctttttaaagaggttctgttttgatgtgtttccaggatttgtttcaggatatagggctccttttagtagtccttgtggtggtggcttggtagtggcaaattctctcagcatttgtttgtctgaaaaagactgtatctttcctttatatatgatgcttagtttcgctggataccaagttcttggctggtaattgtcttgtttgaggagactgaagataggacccaatcccttctagcttgtagggtttctgctgagaaatctgctgttaatctgataagttttccttgataggttatctggtgcgtctgtctcacaactcttaagrttctttcctttgtcttaactttaggtaacctgatgacagtgtgcctaagtgatgatccttttgcaatgaatttcccaggtgttctttrtgcttcttgtatttggatgtctaggtctcttgcaaggccggggaaattttccttagttattcccccaaatacattttccaaactttcagatttctcttcttccttaggaacatcgattattcttaggtttggtcgtttaacataatcccagacttcttggagtctttgttcatattttcttattcctttttctgtctttattggattgggttaatttgaaggccttgtctttgagctctgaatttctttcttctacttgttcaattctattgctgagactttccagagcattttgcatttctgtgagtgtgtccagtgcttcctgaatttttgattgttttttttctttaagcaatctatttccttgaatatttctcccttcacttcttgtatcattttttggatttccttgcattgggctttgcctttctctggtgcctctctgattagcttaatacctaacctcctgaattcttttacaggtaaatcaaggatttcttcttggcttagatccattgctggtgaactagtgtaattttttttgggggggaggtgttaaagagccttgttttgtcatattaccagagttggttttctggttccttctcatttgggtaggctctgtcagagggaaggtctaggcggaagtctgttgttctgattcttttgtctcatggggtgttgcttggatgtagtactctcccccttttcctatggacgtggcttcctatgagccaaactgcagtgattgttgtctctcttctgggtctagccacccagcaagtctacccagctccaagctggtaccagggattgtctgcagagtcctgtgatgtgaactcctgatctcaggtgatccacctgcctcagccatccaaagtgctgggattacaggcatgagccactgcacctggcctcagttctttaactttatgctctttcacttaatataatatttttgaggttcactgtgttgtagcatgcatcagtacttcattcctttttatgactgaatactcttccatggtacggctagaccaaattttgtttacttgttcattaattgatgggcacttggttttttcattagttgatgggcacttgtttttctttcccattttcatctattatgaataatgtggctctgaacattcatatataaagctttgtgtgtacatatatttttccattttcttgcaaagatttctataaatagaataactgggtcatatgatgagtttatgtttaacttttaaagaaattgccaaactattttccaaaataaccataccatttctattatgtatgagaatttcagttttctatgtctttatcaacacacttatacattgttggtgtgagtgtaaattagttcaaccattgtggttgaacttacctatgtaacatgtaccattagctatgaacaaaccttcacatgtacccctgaacctaaaattaaaagttttttaaaaatcacgcatgggtgttagattttgtcaattgacttttgttcatctatgaagataattatgtggtttttattctttatattattaatgtgtgttagatttttgtcaatggatttttattcatctgtgaagatgattatgtggtttttgtcctttatattattaatgtaatatataatgtgattttctggtgttaaaccacttttacgttcctgtgattaatgccacttaattatgtatataattctttttacatattactggattcagtttgctgatatttgttaagaatttttgtttttggtagaagggagattgtactgtaattttcttgtgaaatatttgtcatgcttttttatctgaatagtactagcttcatagaattagttggttagtaaatgttcttttctcatttattttctgaaagagttgtgaagaattggtattattattattttaaatatctgatagaattaactggtgagaccatctggatctgtggtttttttttttttgaggtgtgatttttaataactaactcattagaaattatttagattttctgtttctttttgagtcatctttagtagtttggtatttctaggaatttttccatttcatctaagttatctaatttgttgtcatacaattgttcataatagttcctcataattattttcatttctttagtgtcagtagtgatgtgttccctttttcatccctggttttggtaatttgtgtctttcctctttttttcttggttagtttagatgaaggtttgtgaattttgttgatcttttcaaagaaccaactttgggtgtcactgattttttttattattatttttctgtgttctagtcaattaacctgtgctctaatatttattatttcctttcttctgcttgctgcaggcttactcttcctaatttcttcatgtggaagcctaggttattgatttgagacccttttttgtttttgatacaggtttctaaaataaatttttctccaagcattgctttagttgagccctatacattttgatttgttgtgttttcattttcattcaacttcaaatattttctcatttcccatttgatttcttcttgatccctgagttacttggaagtgtggtgtttaattttgaaatatttaaggatttccctggtttcttttctgttgttgatttataatttaattcagttctggttgaacaacatactttgtatgatttctgtcattttaaatgtattgagatttgttttgtgacttggtatttaattcgttcttggaaatgattagcactgagaaagaatttgtatttttacagttactgggttgaatgttttctataatcagttagcttgagttggttgatcatgttgttcaagtcttctgtatccttgatgattttctgcttagttgttctatcagttattgggtgggactagacatctccaactattatttttatttttatttattttatttcaataggcttttggggaacaggtggtgtttggttacatggataagttcttcagaggtgatttctgagattttggtgtacccatcacccaagtagtgtacactatacccaatgtgtagtcttttatcccttactcccctccctctcttccccccaagtccccaaaatccattgtatcattctcatgcctttgcgtcctcatagcttarctcccacctttaagtgagaacatgtgatgtttgggtttcctttcctgagttacttcacttagaataatggtctccaactgcaccctggttgctgcaaatgctattatttcattccttttaatggctgagtagtattccatggtgtatatatgtgtgtgtgygcgcgtttgtgtatatatatatakakagagagagagagggcgcattttctttatttacttattgattgatgggcatttgggctggttccatatttctgcaattgtgaattgtgctgctataaacatgagtgtgcaagtgcctttttcatataatgacttcttttcctctgggtagatacccagtagtgggtttgctggataatggtagatctactttttagttctttaagtaatctccacactgttttccatagtggttgtcctagttcacattcccaccatcagtgtagaagtgttcccttttcaccatatccacaccaacatctatctttttattttttaattatggccattcttgcaggagtaaggtggtaccacattgtggttttaattttgcatttccctgatcattagtgatgttgagcatttttttcatatgtttgttggccatttgtatatcttcttttgagaattgtctattcatgtccttaacccactttttgatgggattatttgtttttttcttgctgatttgtttgaggtccttgtagtttctggatatcagtcctttatcagatgcaccatttgcaaagcttttctcccactctgtgggttgtctgtttactatgctgattatttctttcgctgtacagaagctttttagtttaattaagtcccatctatttatctttgcttttctcgcatttgcttttgggttcttggtcatgaagtctttgcctaagcaaatgtgtagaagggtttttccagtgttctaggattttaatggtttcaggtcttagatttaagtctttgatccatcttgagttgatttttatataaggtgagagatgaggatccagtttcattctcctacgcatggctagccaattagcccagcatcatttgttgaataggatgtcctttccccgctttatgttttgctttctttgttcaagatcagttggctataagtagttgggtttatttctgggttctctattctgttacattggtctctttgcctatttttataccagtgccatgctgttttggtgactgtggccttatagtatagtttgaagtcaggtaatgtgatgcctccagatttgttctttttgcttagtcttgctttggctatgtgggctctttttttggttccatatgaattttaagatttgtgtgtgtgtgtggttctgtgaagaatgatggtggtattttratgggaattatgttgaatttgtagattgcttttggcagtgtgatcatttcacaatattgattctactcatccatgagcatgggaggtgtttccatttgtttgtgtatgatttctttcagcagtgttttgcagttttccttgtagaaatctttcacctccttggttagatatattcctaagtattttattttattgcagctattgtaaaaggggttgagttcttgatttgattctctgctggctcactgttgctgtatagcagtgctactgatttgtgtacattgattttgtaacctgaaactactgaattcatttatcagatctaggagctttttggatgagtttttagggttttctaggtagacagtcatatcatcagtgaacagcaacagtttaacttcctctttaccaatttggatgtcctttatttctttctcttgtttgattgctctggctaggacttccagcactatgttgaatagaagtgatgaaagtgggcatccttgtcttgttccagttcttggggaatgctttcaactttttcctgttcagtataatgccaactgtgggtttctcctagatggcttttattactttaaggcacatcccctctgtgccgattttgctgagggttttaatcataaagggatgctggattttgtcaaatgcttttttggcatccattgaaatgatgaagtgatttttgtttttaattctgtttatgtggtgtatcacatttattgacttgcgtatgttaaaccatccctgcatcactggtatgaaacccacttggtcatggtggatatctttttgatatgctgttgaatttggttagttatattttgttgaggatttctgtgtctgtgttcatcagggatattggtctgtagttttctttttttgttatgtcgtttcctggttttggtattagggttatactggcttcttataatgatttaaggaggattcactctttctctatcttttggaatagtttcaataagattagtaccaattattctttgaatgtctgatataattcagctgtgagtttatctggtcttggacttttttttgttggaaactttttattaccatttcaatcttgctgcttgttattggtctgttcagagtttctatttcctcctggtttgatctaggagggtttgtatatttccaggaatttatccatcacctctagattttctggtttgtgtgtataaaggtgttcatagtggccttgaatgatcttttgtatttctctagtattttggttttaatatctcccgattcctttttaattgagcttacttggatcttctctcttcttggttagtcttggtaatggtctrtcaattttgtttatcttcaaagaactagctttttgtttcatttatcttttgtattttttgttgttgttgttgtttcagtttcatttaattgtgctctgatcttggttatttcttttctcttgctgagtttaggtttggtttgttcttgtttctctagttcctggaggtttgaccttagatcatctatttatgctctttcagactttttggtgtaggcatttagtagtatgaactttcctcttagcaccttttttgctgtatctcagaggtctgtatatactattattgttcagttcaaagaattttttaatttccatcttgatttcattgatgacctgacaatcattcaggagcagattatttaatttccatgtatttgcctggttttcaaggttccttttggagttgatttccagttttattctactgtggtctgagagtgtacttggtataattttaattttcttaaatttattgagacttgttttgtggcctgtcatatggtttattttggagaatgttccatgtgctgatgaatagaatgtatattctgcagttgttgggtagaacgttctgtaaatatctgttaagtccatgtgttgtagggtatagtttaagtccgttgtttctttgttgactttctgtcttgatgacctgtctcgtgctgtcagtggagtattgaagtacaccactattattgcgttgccgtctatctcatttcttaggtctagtagtaattgttttataaatttgggagctccagtgttaggtgcatatatatttaggattgtgatattttcctgttggactagtgcttttatcattatataatgtccgtctttgctttttaaactattgttgctttaaagtccgttttgtctgatataatagctactcctgctcacttttggtgtccatttgcatggaatacctttttccgcccctttaccttaagtttatgtgagtccttatgtgttagatgagtctctttaagacagcggacttggttggtggattcttttttttgagacagagtttcgctcctgttgcccaggctggagtgcaatggcgcgatcttggctcaccgcaacgtccgtctcccaggttcaagtgattctcctgtgtcagcctcccgagtagctgggactacaggcatccaccaccatgcccagctaatttttgtatttttagtagagacagggtcaccatgttggccaggctggtctcaaactcctgacctcgtgatctgcctgcctcggcctcccaaagtgctgagattacaggtgtgagtcaccgcacctagccctcttacattcagtgttattactgagatgtgagtgaggtactattctattcatcatgctagttgtagcctgaataccttgttttttatttttcattgtgttattgttttataggccctgtgagatttttttctttaaggaggttctattttggtgtatttcaaggttttgtttcaagatttaggactccttctacagttattgtagtgctggcttggtggtggcgaattctctcagcatctgtttatctgaaaagaactttatctttccttcatttatgaagcttagtttcactggatacaaaattcttggctgataattattttttttaaggaggctatcgataggaccccagtcccttctagtttgtagggtttctgctgagaaatctgctgttaatctggtaggttttcctttatagcttacctgatgcttgtgcctcacagctcttaagattctttccttcatcttgactttagataatctgatgactaaatgcataggtgatgatctttttgtgatgaattttctggctgttctttgagcttcttgtatttggatgtctaggtctcttgcaaggccggggaagttttccttgattattccttcaaataagttttccaaacttttagatttatcttcttccttgggaacaccagttattcttaggtttggtcatttagcataatctcaaacttcttggtaccacccagttggtagtttttttatcctcatcctctcccaccctacaccctcaagtaggctccagtgcctattgttcccttctttgtgaccatgtgcactcaatgtttagcttcccttataagtgaaaacatgcagtatttggttttctgtccctgtgttaatttgcttaggataatggcctccagctctatcgatgttgctgcaatggacataatctcattcatttttatggctgcatagtattccatggtgtatatgtactacgttttcttcatccagtccactgttgttgggtatctaggttgattccatgtctttgctattgtgtgtagtggtgcagtgaacataggagggcctgtgtctttatggtagaactgttagtccaaactgtaccattttgtaagccccttgtcatttcatagaccttgatcaaagtgaaacattccttgggggactgggccgtgagaaacatcctgcccgactgcctgactttcttatcacattctgctgggaaaaagtccaaggaacatcactgtcacatcctgccagaacaagggccaaaccacctcatcatgggaacatcttatcaacatcctcccgggcagcaagccataaccctcagacccctccctcccaggcctaaaattgccccagcctgtaagcagaggtgggccctggcattaagctggtgccccgcctctgcaggtcttatgctggacataaaacctgcattgctgtagagccgccaactctctctcagtctttctttaatcctcgccttctcatcaaaacctaagaagaacaattcatattccttcgggttcgtatttagtaatgggattgctggattgaatggtagttctgaggtctttgagaaatctccaaactgctttccacagtggctgaactaatttgcattcccaacagcagtgtgtaagcattcccttttctctgcaacctcaccagcatctgttactttttgactttttaataatagctattctgactggtacargatggtaccaagcatatgaaaaaatggtcaacatcactaatcattagagaaatgcaaatcgaaaccacaatgagatacaatttcacaccagtcagaatgactatttttatgctttcaacagtttcactctgatgtgtatatatttgaatatttttgtatttattctgcttgagactttttgagcctcttgggtacataaattaatgttttttctaaatcaaacttatgaggttttcagccatggtttcttcttatgttctttttcccctttgtgtctctcttttcctatgaaaactcctatcatccaaaatgttggtacccttggtcatgttacacaggtctccaaagcactgttcatttttcttccttctttttttattttcatcagctggtttatctcagtagatctacaagttttcttattctttcatctgcctgtgcaagtctgctattgaactttttctggtgaatttttcattccagtcattgcactttgcaaatctagaatttctatttggtttcttaaaaaaaaaaatcatttctgtcactttattggtagtctcataagacatcttgttgtacttccctttaaattaaatattttagtttcctttagttctttgaacatatttatattagctgacttaaagtttttgccagtaagttcaacatctgggcttcctcaggaataaattctattgactactttttttcccccatagatgggtcatagttaagtatttctttgtgtgtctcataattattttgtcagaaacattatattttaaatattataatgtgacaacactggtaatcagaccttccctttccctatccctggggtttgttgtttttgttgttgtttgtgaccttcctggactatttctgtagtctttattctgtatcttgtatagacactgaagtctttgtttgattagctgagtcacaaataataatttgacagattttcttaaatgctttaaaccagtatgtctcccatcattttccaacgggtgctgtgtatgttggggcgtgctttccatgcccygggagttcacagctctgccttagccttcacttcctgctttgtgcagagcctcagagtcaagcaaaggttagagagcggagctctgtcaggtctttagtggctgtttgcttagccctgcacatgcacatgaccttctgtatccccagaaatattttagaaattttcaaagccccctaaggacatctcatttctcaaattttccttttaagttttttggccagcctcttgtttgcccctgctaaaattgctgcttctggcagctgcaagattaaccaaatactactgatttttttggacaaactccctgggcatagggcttttcatgctgaatgagctcttgagtcaggtgaagtaaagattagcytgtgaatagggcttttctaggagcaccagacaggtcacatagtgacagttctctggggatgagattttggcccagagctgcttttgtagctaggctgctggcattcacagttactgtggttctgaggctgctggtttccaagactgctatggaactgggaagaggtgcatggaaattgagaatgagtaggttaaaacaccagaaacttcaccatttttactaagattcagctacttttcttaaatagatgttcaggattgttgcaaatctttgattaattttttagagttctgcaaaagttgattttgacaattttgccagtgttctaattgctttgtgatgaaatgaatttttagaaatccctcatccaccattccagaagtgcctctcaatctgcctgtgcttttaatccctatgcatattgcctstctatttgatatctaaataatggcctataaatatttattggcagccatgaaagtccactgtttgatttcattgagagctgcttgcgaaataaacatgaaatggttatttatgaagctgcttcagctatcatccatcttcctaactgcactgcaagagagttggcacctgctgtttcaggtttgttttatatttgatggctggcttttatgttcctaagtttttgctttaagtttcataggtctacagaataggtattaagaatgttttctgaacactagctctgtgtatatatagcctttgcattctgatagcttatatgtagatagtttattttagttgttccttactttattactttttttaatgtttctatttctccatataaaacttttgaaagaattttatttatatgtacatagtttattaataatagttctttattgcttttttttaaagtttctgtttcctcgtatgaaacttttgaaaacattttacagttttccttggtgtttaaaaagcccatttgttttcagaactgtcaatatttctaccatttagttcaggtattaatgggtattctaatttttttttaaaaagagcaaactttgtttcttatttaagtttttataactgaccaaaagtgctttttctttttttttttttctttttttttttttttttgagacggagtctcactctgtcactgaggcaggagtgcagtggcacgatagctcggctcactgcaagctctgcctcctgggttcacgccatgcttctgcctcagcctcccgagtagctgggactacaggcgccccaaaagtgctttttctattttgatgttacatttttcatgtaaatttttgatgctgtgataaaatgtatgcatattttgaatgtgattcattatgtactatattttcagctatatggtatatgatgagataaggaatattcacagcatatataggtaatagtcactgtatctatatctgtattttacttcttcaacttttctatagttctcttaagccaggagtattcacggtatgtatatgtaatattacttaatgttacatattattattattatttttttttagttcttcaacttttctgtagttctcctaagccagccttgagatatgcagctgtgaggaccttgaacaaggtaggtgtttctttgctaattattgacttatatcagtatttaattgagaaacattaaatgtgaagcatttggttttctctccaaggttagtatatgtgatttatgggcttcacctctacaacacttcacttgtatttgtggccttgagtatgctcatttttattattatttagctgaagattataactcatttctgacttctaagcattttatattcaagagccacactgtccaatatggtggccattagccaccagtggctatttcaatttaaattaattaaaataaaaaattcaaccctcagtcacatgagtcacacttcttgtactcacagccacatgtggtcagtggctgttggacagtgcagatcttgaacatttctgtcattgaagaaagttctcttgcacagtgctggtctacagcagccctgtccagtagaaacccactgtgaatcacatatgtaatattaaatttcataataaccacattaaaatttttaaggtaaaattaattttaatagtatattttatcataatacatataatatgtcatctcaacatgtaatagatatttttacatatctcaagtttttgacatccagtatatttacatttacagcatactcagtttggattagccacctttcaaatgcctggtagtcacatgttgctgttggctatgttattagacagtatagatttagaggatataatacagaaacacagaataaattaaataagcatagaaaatgtaaatgaaagttaaatgtaatagaagacttgtcataggcaatacataattataaattaattgtgtaaacagtcgaagaaaagagaagtttagagcagccatggaagaaacctttatagaacaacaatttaaatggttttttatttatttattttttttggagacagagtctcactttgtctcccaggctagagtgcagtggcacgatcttggcacactgcaacctccgcctcccaggttcaagcgattctcatgcctcagcctcccaaatagcagggatcacaggcacctgccaccacgtccggctaatttttgtatttttagtagagacagggtttcgccatgttggccaggctgctctcaaactcgtgacctcaggtgatctgcccacctcggcctcccagagtgctgggattgcaggtatgagccaccaagcctggcctaaattgtttttaaagagttgatacaggtctacaatccctcatctctaatcttggggccagatgtgtctcagaatttgcttttagttaaattttagaaaggttatatggtgttatctcttatttactaaccccagtgggcctggggcagcatcccaccattaaaaaacattaatatttttgcacaaaacatatgactatccttgtcaagtggtataaattaagaattaaagagtttcgcattagtttgggtcatgttttgctgttaaatggattttcatcccagtgctctgctttccagagtgttttcagattttccaaattgtgggtaagggattccataccaatattgggatagacaaagaggtgggacaacatcaacaaaaacaaggatgcaggagaatggcagaccatgtagtaaccatagataatgcagtttggctggagtttgcgtcttgaaatgcagcagtattttttaactgataagatattaacagtctttgtcgagcactgactactatgctagatcctgttgtcagtactcctaacatctaatagaatagacgtatatgaacacacgtactataaggaaatacaggccaattataattttttaaaaatggtaatgttagaaaggttagaggaacctaacaaaagagagtacgatgctatactctggccgttgatcatttattaaaagatataccttgttaactggagccattctttttgtttttgaagcaattacttttaacttatcctgtcctctttggattgccacttacctcaattaaaatttaagttctggcctttatcaaaagcaatttgcttaattttttttcttgcccttccacaaggtggcaatgaagcacccctctgctgttactgcctgcaatctggacttagaaaacttaatcacagactcaaacagaagcattgctaccttagccattactacactcctcaaaacaggaagtgagagcagtgtggaccggctcatgaagcagatatcttcttttgtgtctgaaatctcagatgagttcaaggtaagagtttaaacatgatcatattttctcccagtctgttggctgcctatttattttcttaacggtatcatttgagaagcagaagttttaaatttttatgaagtctaatttatcaatttttttctttyatagttattactgttccctaagaaacctttatctacttgttttctcatgctttaggctaaatgctttatggttttagattttacattttaggcaatgatccaacttgaattactgtttgtttggtaagttcagtattttttccatacctatatctactgtattccaccataatttgttggaaagacttccttttccctgttggagtgctttggcacctttgtctacaaagcaaatacccatatattttaggtatatttttgggctttgtattatgttactgaactgtttgtcaatccagtaccagtaccacactaatattgattaatgtagcattatggtacctcttaagtagtgyggtcttccaactttttcttttttaatattctggttcctttgcatttcctatgaaatttaggaccaatttatcaatttctactaaacaagcctgctaggattatgactgggattgtgttgaatctataaatcaatttggggagaactgacatcttaacattatttttctatttcatgaatatggtatatctctccctttagatcttctttaatttctctgagcagtgttttgtagtgtttactctagaggtcttgcaaatctgttgttaaatttatatctaaatattttatgcttttgatattttattaaaatttttattttattgtttactattaatgaaaaacttttaaaaaatacttctccatattaacttggtatcctgtaaccttgctgagtacttttactggttctagtcatcattatacgtattccttgagattatctatataaataattgtgccatttgtgaatagaggcagttttacttctttatatccaatccaaatgcctttcctttgtttttcttgcctaattaaaaaagtacttccagaacagggttgaatagaactggtgagagtatgtcagagatgattttaaaaaaataaataaataaatttcagttaaaagaataaaagtagaaacattttattgcttcattctttttttatactcagtcaagtaatataactaaccctatttactctctacttagtatgcatccagacttttaaaaaacaaactttacccatgtattcaagcagacagttttgtgcatctggtgtagcagttgctgttctagttttttcaaattgcatttgtaggagtgagttttttgctaaagacgtgtatttgttattaagataccttggctttgattttgagtgcctgtggtagtgggatcttcgtatgacctcttgagcagtacacagggtcagtggtctctatgattcctcagtgacttagggtacaggcattagttgaggttgtggtgaagtttagctggggatctggacacatagtcagtcagtctttgggctccagtagtggcagcagtacaccaaatgtgcctatttttaggcccagcttacactggctccagtgtttgtgggtactagagggctatccttgggcctcaaggtggcttgctagaaagagatactgagagcagtgagctcagtgtgtgagtgggttctccggcccctggcagctggggtggtgtgggtgatgggcagtagtgatgttggagcaacctacagggacacaagcagtcttatgttggtgttggcagaagctgcaatgggttgggtaggctgcattttccgcattttctttaggatttttagtcttttgtttccttaatttttttgtatattcaggatattagctctttatctgtgaaagatgttatgaatatcttctcccggtttgtcatttgtcttttgacttttcttatgatgtctttggacatgcaaaagtgttattttttttaggtagtcatatttgccaaccttttattttatttgactttgaattcataattaaaaattatattcccttcaaattttagagtaattcactcatgttctcttctaatacatttatagtttcatattttacatttakatctctggtccattgaatttttttattatatatgctataaacagattcaatcttatccttttccattgactacacagttagttgccccccaaaattctatttaaagccaggtgtggtagctcacacctttaatcccagcactttgggaggccaaggcaggggcatcgcttgagtccaggagttcaagaccagcctgggcaacatagtgagaccctgtctctacaaaaaaatacaaaaattagtcagacatggtggtgcacacctataatcccagttacttgggaggctgaggtgggaggatcacttgagcctgggaggttggggctgcagtgagctgtgatcatattgcactctgtcctgggcaacagagcaagatcttctgtattagtatgttgtcacactactataaagaaacacctgagactgtgtaatttataaagaaaagaggtttaattggctcacagttctgcaggctgaacaggaagcatggcagcatctgcttctggggcagcctcagggagcttttactcacagtggaaggcaaaacaggagcagacgtcttacatggcaggagcatgaccaaggggggtgtggaggagtgttacacacttttaaatgaccagatctcacaagaacttactatcacaagaacagcaccagcagggaaatccgcccccatgatccagtcacctcccaccaggccccacctccaacactggcgattacaattcaacatgagatttggttgggggcacagatccaaaccacattaccttatctaaaaaaaaattattttaattttttctgtagacgggaaagctgaaagaaaatttttaagaccgtctttgccccagtaatttcagacatcatctttatcatatgtacttgagtttgtatgttcatacaaactcaaaaaagttgcgtatgtacttgagtctgtttctggagtgtcttttctacttatatattggtctgtttattcatatactactgctatactctgttctaaatatagaagctttgtaggatgcttagccctccatcatagttctttattttcattgttttcctggctattcttgcatgtgtttttttttttttttttttttttttnnnnnnnnnnnnnnnnnnnngctggagtgcaacggcgtgatctctgctcactctgcaacctccccctcccaggttcaagcgattcttctgcctcagcctccccaaagagctgggattacaggcacccgccacccgccaccatgcccagctaattttttatatctttagtggagacgaggtttcaccacgttggccaggctgttctcgagctcctgacctcaggtgatccacccgcctcgacctcccaaagtgctggaattacaggcatgagccaccatgcccagccacatgtttatttttctaatgaactttagtatcaagttgtctagcttcataaaaaaccctgttgacattttctgttgggatcacgttaaattcataagttaggggagaatacatatcctgatgatgttggaacatcctaagaacaaggatgtcttttaatttgttcaaatctgcttttatgcctttcaagaatgttttataaaaaatatttttatattagttttgaatggttttaaaatgcttatttctaaataacttacctttttcattgctattataaatgttttttattccattttatcttctacctggttatcatttatgtatatgaatattactggttttgcatgttaattttatatcctgctaccttggtgaattatcgagttagttttattattcattctctagggttttcatatataccatcatgtcatctaaaaataaagatatttttgtttgttttgtcttctccgattcttgtttctttgttttcccttatctaattgcattggctaatatctccagaataatgctaaataattgtggagatagtggcatccttgcatcacttctgacctcaatgggaatgcctttcagggttccatattaagtaatatgctgtcattaggattgaagtatatatgtttatgttatggacatatccatctgttcctttttttttcaagaatgtttattaggaatggatgttggattttatcaaagccttttcagcattttggatataatcctttgactcatgaatgtgatgttattttatcaattttctaatgctgaaccatctttacattcttgataaaacccatttcatcatggtgcattatttctttaaggtagtgttagaatctattaactaatatatttcttagaatttttacatcggtatttataaatgattttagtctgtaatttttctttctgtacatatataccatctttattaggcttaagtatcattgcttcatacaaacattatggagattttctttcattttctatgctctgaaactgtatatatggatttggggttatccgattgttggtagacaattctaaattctccatgagtctcttctcatttctgcacatcttgcaagttaggcgctaactgccctctgtttcctgctaccataactgtattccctttctataatacaagacatcttctagccttagaagatagagatcatgtctccctctaaaggaaagggaagatttccttgcagccccaggaaatactaatagtatttagagcaaaaagccctctggagcaaaaagtaaacatgtttatggtccaatataataatgttttccttcggaaaaaaggacaggcatacttactccccactgtaaaatgttcaggttccatccttagggttcttattcagtaatgcagcctactgcaagaccaggtattatctggctctctttgcattgcactttgggaattggggctcaggagacccaccccaaaatgctcacactctggctactgctactgctgtgagtagttaactgtctttcatcgctgagccaggagtctcttgttttctaccagcatccatgaaattgtgacaggttaacttgttagccacaagcagggtaaaatctcacgttcttcacacatcttgacactggtctttatttttattttattttattttatttattttttgagacagagtctctctctgtcacccaggctggagtgcagtggtgcgatctcaactgactgcaacctccgcctcccaggttcaaccaattctcatgtctcaggctctccgagtagctgggactgcaggcccacgccaccacacctggctaatatttgtatttttttagtagaaacggtatttcaccatattggtcaggctggtctcgaactcctgacctttggtgatccacccaccttagcctcccacagtgctgggattacaggcattagccaccgtgcctggctgacactggtctttaaaattgtggtaaaattcccctagaaaccattttgtgaagtagttccttgatagctttctctattcttctatggaagtcagtctgttcaagctttttatctttatggttcactttaaaatctttgatgtgatcatttgtctgagacagagggaagggatctgttgaatgaactttatttttacattgctttgtattttcctttgtggtctccttggttatcttccatgaagaacaattattgtcattttaggcaactacaggatcttcttagcttgtagtaagtaggaaagtatgtttagtagccataattataaagatgaatgtcttttctctgtttgctttttataggtggtagttgtacagtcataaaaatgaatattctttttgtttttctacaggtggtggttgtacaggcaattagtgctctctgtcagaaataccctcgaaagcacagtgtcatgatgactttcctctccaacatgctccgagatgatgtaggtagactactttttaatcataggaagttgctgtcttaaattcttaggattgccatgaaataccatagtgttttaagatttccttatcatctcagtatgcctctcaagtagtacactaagtctggttactgtcttattactaaacatgccattgctttgctttccccacttggagaaaaaacacttttgcttctttcataaaaggtgggaaatgaaatttgaatattataagcataaaccttggagtgtaagcatttctccaaaatgtgtccctagaatgaatggcagttttatcttcttttttgccagggaggctttgagtacaagcgggccattgtggactgtataatcagcattgtggaagagaaccctgagagtaaagaagcaggcctagcccacctttgtgaattcattgaggactgtgaacacactgttctggctactaagattctacacttgttgggcaaagagggccctagaacgcctgtcccctccaaatatatccgttttatttttaatagggttgtcctggagaatgaggctgtcagagctggtgagtcattgggacactgatattgacgatgctgatcttttgaaatacttaagagagtgataatgaaattggaaaatgaagttgcaggatttattggatggtgggattttagagcatgcttaggkcccagatatctttctttgtactcaatttccaccctcatttttgccttagattagacaaataacccttcgctttcagtaagataggaatactatgatggctcatccgttttttcagttatagccgtaagcatgaatgtttgtagaatttgtttatgtgtttctatatatatatttttaagcgacttttcctccctaatctttctttcccttagcatatgaatagatccaaatctctcccattaaagatgtaaactgtctatgagcttttcactagctactgactctatactttccttcccctcggagataaacttgaagtagccgttattagctgcctgcatgaattcattatccatttttctctttaactcagaataatgtagctctcccttaaaaatcctcaagtaattttattgaaaattacttataaactagttgtaaaatcaagttagatactttaatgttcttacctttgtttacactcagtccacttgatgtgctattgactgaacacttcgtgaaaccccatagccttggtttccacaatagcctacatgtttccatcactcctcactcttatttacagagctcctctttccagcaccattccttaaaatattagttctctgtaagattttgacttctcaacatctacattcctcttggtgatcattttcagagctctgctaataggctgtgacattccagtcatgtctctttcctgaacttgtttgtccaaataacttaaagcacttcaaactcaacctgaaattcaaactaacctcacattcatcatccactcagttatcaagatagaatcttgttctgctgccttacagcccctatctgttctttagcaaagcgctttcaattgtgtctccttaatatttcttcattctcttctattttcttggtgctgattgaggctgtcatccgtttcagatccctagctatctgactgcttctagactcacatatatcctgcctattctttacactctgctaaaaaaaaaagaaaaggcgggggggactttcaaatgtacaaatttatctcatatttaatatcctttaataataatgttgagattaaaccataccctaattttgttttattgccagtctctcccttgtctcttcttgctctccaacatgggtcctttgctcagccttgcccaactgtccagtaatacaccacactttcttctctgggcaggggccattcgaacgtgttattttctctgcctctaatactcttatcctgcctttttcctctggctaacagtacttggtcttcagattttagctcaagtaatatgtattaactctttgtcttagttttccaccaccaattcggatttagttcctttctgtgtattcacatagcatcctggatatatttcttccatggacttacctatgatgtcttgtaattgtctctctacatacctatctttcccactagagtgtagctccttgagatcagggacatgtcttttatctgtcccagtacctagcacaattcctgacaaaagtttggtgaacaatgaatctttgttgaatgagaggaattttaataatagaatttctttttatgcttggggctggttgtttgagattagagcttaatgacatcagtgtgatatataaggggttgtggtggggtggagatatagctcctacagaaaatctatatgaatctttttcctcaatttttggaagattttcctattcagagctctcttgggcttgcagaattctatttatgcttaacagtatcaaagaaataagatcaagaaacactcaataaaacaagggagtttatctccactgaacatggggacacttttctaattttttttcaaatggttattggttaactctgagaaaccaatatttatgtaccataattgtatgcttcattatagctgctgtgagtgctttggctaaatttggggctcagaatgagagtcttctcccaagcatccttgtactcttacagaggtaagttaaataatgtcttttctaaaaaaaaataagaattctatatggttaaacagtgaaatcctcattctaccatagggcggatgcactctaagccctaagagtagagttattggagcaagtcaggggcaaatggcaattcctttctctttttagtaattatgtatacctcccaatcaatttgatgtgctattgactgatcacttcatgaaagcccctagccttggtttacacaatagcctacatgtttccatcactcctcactcttatttatagagcttctcttcccagccccattccctaaaatattagttctccatagggttttatttgctaggtacatgtcacatttgattttggctttctctcacatgattttgagaaagtgacttaaatacatttgcctcaatttgtacaacaggggcttacttaaaaaaactgttaggtaattcactatgcagagttaaaaataatagtttttcattgtcttcatgactctatttgatgaggaaaagacttgctttagcaaactgtgattgcatcttataattgaagcagataaattacaagccaaaggttggctagtttacgtaaaacaaattgtcatttgagcaaaaacagtggctggattttgaatttatcttttcagtatccttggagagtataatactcccatttcctaattacagagaagtctaagtcttcaacagggtcatgtagttacagatggaagaaaagactccagactgctatttcatgttcttgtgctcctcgttattttaatgcctacttatgtagtgcttgtgattcacagtagcagtatttctttagtaattcagagcagtacccaagatttgtgaagactttaggagccactgttggctattgttgagcacttttttaaaggtagtatcagatgacgacctgagctgtgtcctttagatttggtagtagagctattggaagtctttggggtactgtgacatgactattctgtttcccctggacaggtgtatgatggatactgatgacgaggtacgagacagagctaccttctatctgaatgtgctgcagcagaggcagatggcactaaatgccacatatatctttaatggtcagtgaaagccaaggatgtacacttttgttcctcaaatggtgtcttggaagcatattttatgatttgcatatgagctaacttcactaggcaaatgcttggtttttgtctttgagtgcacttccatttctagagaaacctgtgtttataggatattttctaatttggtaatgataattcctatgcagcaatctataagaatatagattgggcccttacattttttaggaacgttgctcacttattcctggttctccttgaactccctcttggatgggtttacatttttcccgttttcttatgctatcattgttcccatatagctaagttgctttcttttctgggaggtacatacattttgttgaaaatgtgtatgctatgctcccatgtttccttgaatgaaataagtcagtttataagtttataaggtaatttcaagaatatcctttatttttatatttaggttataaagcttttggttatatttttctcttccttcagaaagcttagataaatattacaaacctgggcctatttggattcgaggattggcaagaggttataatgctgagatttctctatgtttcacaggtttgacggtctctgtaccagggatggaaaaagccttacaccagtacacgttggagccttcagaaaaaccgtttgacatgaaatcaattcctcttgctatggctcctgtctttgaacagaaagcaggttcactctattcrtttttctgtgtataagtagttttgcaaaactaaaaaatattagcatattttctctaatactcatttaattgtcactcttttttttttttttttttttttgagatagagtctcactcccgtcgcacaggctggagcacagtggcgcgatctctagtcactgcaacctctacctcccgggttcaagcgagtctccttcctcagccttccgagtagctgggattacaggcatgcgccaccacacctggctaatttttctatttttagtagagactggatttcaccatgttggccaggttggtcttgaactcctgacctcaggtgatccacccacctcggcctcccacagtgctaggattacaggcgggagccaccgtgctcagccgattgtcaccccttctaaatcttttagatttaagacatatttttattagagtttaaaaaaaactcctggtttttacataaaagcagtaagatgaaatgcactccaaaatgaagggttttttttaatgcaaagcattacagtatctgaagtcagttgccactgtgcatctcagagcagtaatagtgctgtcgcctcctatttttattttctgaagttgataatctctaagttaattgattttgttattggaggttcgtcttaaaagaatttatgggcgacaatcataaaaaatattcccaaagaatatctaactttaaaacttaaaaacaaaaacaaaagaagtcataaatgtttagtggttagaacacaaaactgggaagaaacaattttatgcttattttcaacattttcagtttttctgttgatataagtaatttttcctattttgatcatgagaagatttttaaaataaattgtttttccttttctgagtaatttttgtacattccagtccatttaaagcaaactctatatttttagggcttactttatgattccacaatatatgttcactaaatacattttaatttgagtgtccccccaccagaagtgatagataacctataagtatgatctagtaatagctcattatatatctgctagaaatgtctgctctcctctctttctgtctgcattgctagcttgatagtagtgggagaagttcacttacttgctcatatctgtctttatagaaatcacacttgtggctactaagccagagaagttggctccttccaggcaagacattttccaaggtatgatgatttgatggttagacgtaataatctttcccctaggcattgtaaatataaaaagtctaccagtcttactcaaattgatcggttctcaatataggaaatcttcgtgtggctgaacaccatagggtatagttgctgaggctacctggagtccatgaactttccagtttgtaattgctaattgggaatgtttttcttttctgtatctcgttggttaacagggaactcattgtaaaataagtatttactttctttttttttttttttgctttttgctttcattaatatataagcttacttacttgaaagatgacttcactaaaacttggggacatattagttgaatgttcaactattagtaaggctatggaaactaaagcattttttttttttgagacagagtctcgctctgtcacccaggctggagtgcagtggcacaataccggctcgctgcaagctctgcctcctaggttcacgccattctcctgcctcagcctcccgagtagctgggactacaggcgcctgccaccacgcctgactaatttttttgtatttttagtagagacggggtttcaccatgttagccaggatggtcttagccaggatggtctcgatctcctgacctcgtgatccgcctgcctcggcctcccaaagtgctgggattacaggcgtgagccactgctcctggccaactaaagcattttttaagcatccagactgaagtctttccctgtcttcttcatagcctacgttcttttttcttgatagaacaattggctgccattcctgagtttctgaatataggacccttgttcaagtcttctgagcctgttcaacttacagaagcagagacagaatattttgttcgatgtatcaagcacatgtttaccaatcacatcgtgttccaggtaagataatgcccttggctgctgtagagatttagtataaactggtatgctttgagacaaatatcctttacctataattctagtttctattatagagaattaatttggcagaatttctggttttcttgcttaacaccagagctatagagatcccttcatgtgatgggtaacttttgatggttaaaatctaaaggacataaaactgaaatgtgtgatgaagttggacaacataaagtataaccaattttctaaaatcagcatttaacatcagggtagattaagtgggctattctgagaacttagatttgacagccatcagacttctgccatcttgtttgagacagcagtctcaggaaagagaaaaaactgatgaataatataaacaaaagacctcaagaataaggctctccctgttgccaaaagaagaatcttaggaggagacctaccctgctctgtagagatagaaggtatagtgggttccagagctgagtagtgggttatgagtaggaaggataacttgttatccttcacagcttttccatttactgacttttcagtttgactgcaccaacactctcaatgaccagctgctggaaaaagtgacagtgcagatggagccatcagattcctatgaagtgctgtcttgtatcccagcccccagccttccttataaccaaccaggaatatgttacactcttgttcgtttgcctgatgatgaccctacagcaggtactaaccctcagaagggaggagatacgtgattcagaatgcatttccttgtgagctcttcaactcttcaaatgctcagtttaagaatgtgatgcttttctagaatttaatgatgagtgtttgtgtgtgtgtgtttgtgtgtgtgtgaatatatatatttataaaatggtttactgctgcagaaatattaattttaaaactaaatctctgagtaaaatttgctgaacacttaatcttaaaagagaaactgagtgtgtatagcagtagcacaaaaaggaactcaagctttctgttggaataatgtgaccacttgtgagagttcatatacctggtctcctgtgaagaatcttgaccctcttctcctcaaagtttctatctagttagatagaacttggttatgtagtagattgttggcattttaaaatacatcatttttgaaggtcctgtagcataaggctggtgtctgagagcatgtctcagcctagtgagtagcttagccaaccatgtgtgtccacattaagaagggcttttaattccctccttgacccatatgcagtctttgcagggtggagaaatagcccctaaaagacagccaactagtgccaatagtagtatttacttatttggagacttgggaaggtgaatgtcaagtatttattctacttgattccccccatcatcattttcctccttgatttcttctcttctcatgttcagtgcacaatattcgtaactgttacccagttttcacagaaataagcacacacatcacatttatgttttgaacaacttttactgctcgtaagtacaggagaaayagaagttaaaaaattaacaaatactgggaaagttacagagttacaataaatcataaaagcactagtaaatagttatccctggtcatcattcagttacatttggggcttaacctgctttcttttagcccctctccaaactcccttcttagatgttggttcctgggagcccctgtccagtcttatctgtgttgggtgatagactaggctactcagactctagcacgaggtagattcacgttggcaccactgctgtgtctgaatcccagattgttccctctggccctgggtggaactctacttctattmtttagccaccctggatccataaccccctgagtaggaaggcactttcctatctggcctccaatatttctcctttgagctcgaggctatctggctttaacctttaattacctcctttatccctttgtgaggtttctctagttccatttccttgtaacttcgctttctctcctggtctgtttttctctccagttagatttgtctgaaatatgtccactagccagtarttaagctggctgtactcttaagtaaagctagttttatttacctttttctaaactagtatttgggcccaatcttaatgtagtcctgtggtttctaccattgtctggagagactctgcacttcatcagttcttttccagtagccatccctccatgtttcaaaattcctcctgctattctacctctcaccaatgtcctgttttttaagggatgctattactttgccacttaatttcagagggaagtgaaatgctgaacccattgaagaatcaatcccttgccaattgagaatactagctcttcccacttccccaggttcattttgctaactaataactcaggtggctcacaccccagaaagtattcttaacggaatctaagaagtataattttataataccaaaatacacaaaacaacaatatagaaattacatatagtataggaaaaaaccaacaacaacaacaaaacatttccaccaagagaggaaaaagaggagaggttttcttgcccctcttcactaaggagttttaaaacatagatcttacaaattagcccagagatttcaacatttggtctgctggctatggactcttttgcttgatggtttgtttgatttttgtttataaaagtttggcatttagggaattgtttaaagttttgttagtagtaagtttatatttgacccatcatatacctacttaaaaaacaaactcctttctatttagttttttgtcagaattctcaaatttttaatccatggccaatctaaagtctatgctgtgcaatggaagaagtgaaataccagggcatagatggtaataggtatctttcacccattccttcctttttgcattttcccatcacagatattccaaattttacctgtcacctcaaggtcttaaacatcaatatgtctcatttcagaaaaataatatttttccttataatcgcagtgaaaaaacagaaattcttggtttgatttccttcaacttgaaaacagtatagcataatagaagggaatatgggtttgatagacagatgaggatttgaatgctggccctgctacatactgactgtgtaatcgtggacaaattatttgatactacttaggactgttataggatgaaatgaaatgaaatgaaatgaaatgaaatgaaatgaaatgaaatgaaagaaataataggtaagnnnnnnnnnnnnnnnnnnnnnnnnnnnnnnnnnnnnnnnnnnnnnnnnnnnnnnnnnnnnnnnnnnnnnnnnnnnnnnnnnnnnnnnnnnnnnnnnnnnnnnnnnnnnnnnnnnnnnnnnnnnnnnnnnnnnnnnnnnnnnnnnnnnnnnnnnnnnnnnnnnnnnnnnnnnnnnnnnnnnnnnnnnnnnnnnnnnnnnnnnnnnnnnnnnnnnnnnnnnnnnnnnnnnnnnnnnnnnnnnnnnnnnnnnnnnnnnnnnnnnnnnnnnnnnnnnnnnnnnnnnnnnnnnnnnnnnnnnnnnnnnnnnnnnnnnnnnnnnnnnnnnnnnnnnnnnnnnnnnnnnnnnnnnnnnnnnnnnnnnnnnnnnnnnnnnnnnnnnnnnnnnnnnnnnnnnnnnnnnnnnnnnnnnnnnnnnnnnnnnnnnnnnnnnnnnnnnnnnnnnnnnnnnnnnnnnnnnnnnnnnnnnnnnnnnnnnnnnnnnnnnnnnnnnnnnnnnnnnnnnnnnnnnnnnnnnnnnnnnnnnnnnnnnnnnnnnnnnnnnnnnnnnnnnnnnnnnnnnnnnnnnnnnnnnnnnnnnnnnnnnnnnnnnnnnnnnnnnnnnnnnnnnnnnnnnnnnnnnnnnnnnnnnnnnnnnnnnnnnnnnnnnnnnnnnnnnnnnnnnnnnnnnnnnnnnnnnnnnnnnnnnnnnnnnnnnnnnnnnnnnnnnnnnnnnnnnnnnnnnnnnnnnnnnnnnnnnnnnnnnnnnnnnnnnnnnnnnnnnnnnnnnnnnnnnnnnnnnnnnnnnnnnnnnnnnnnnnnnnnnnnnnnnnnnnnnnnnnnnnnnnnnnnnnnnnnnnnnnnnnnnnnnnnnnnnnnnnnnnnnnnnnnnnnnnnnnnnnnnnnnnnnnnnnnnnnnnnnnnnnnnnnnnnnnnnnnnnnnnnnnnnnnnnnnnnnnnnnnnnnnnnnnnnnnnnnnnnnnnnnnnnnnnnnnnnnnnnnnnnnnnnnnnnnnnnnnnnnnnnnnnnnnnnnnnnnnnnnnnnnnnnnnnnnnnnnnnnnnnnnnnnnnnnnnnnnnnnnnnnnnnnnnnnnnnnnnnnnnnnnnnnnnnnnnnnnnnnnnnnnnnnnnnnnnnnnnnnnnnnnnnnnnnnnnnnnnnnnnnnnnnnnnnnnnnnnnnnnnnnnnnnnnnnnnnnnnnnnnnnnnnnnnnnnnnnnnnnnnnnnnnnnnnnnnnnnnnnnnnnnnnnnnnnnnnnnnnnnnnnnnnnnnnnnnnnnnnnnnnnnnnnnnnnnnnnnnnnnnnnnnnnnnnnnnnnnnnnnnnnnnnnnnnnnnnnnnnnnnnnnnnnnnnnnnnnnnnnnnnnnnnnnnnnnnnnnnnnnnnnnnnnnnnnnnnnnnnnnnnnnnnnnnnnnnnnnnnnnnnnnnnnnnnnnnnnnnnnnnnnnnnnnnnnnnnnnnnnnnnnnnnnnnnnnnnnnnnnnnnnnnnnnnnnnnnnnnnnnnnnnnnnnnnnnnnnnnnnnnnnnnnnnnnnnnnnnnnnnnnnnnnnnnnnnnnnnnnnnnnnnnnnnnnnnnnnnnnnnnnnnnnnnnnnnnnnnnnnnnnnnnnnnnnnnnnnnnnnnnnnnnnnnnnnnnnnnnnnnnnnnnnnnnnnnnnnnnnnnnnnnnnnnnnnnnnnnnnnnnnnnnnnnnnnnnnnnnnnnnnnnnnnnnnnnnnnnnnnnnnnnnnnnnnnnnnnnnnnnnnnnnnnnnnnnnnnnnnnnnnnnnnnnnnnnnnnnnnnnnnnnnnnnnnnnnnnnnnnnnnnnnnnnnnnnnnnnnnnnnnnnnnnnnnnnnnnnnnnnnnnnnnnnnnnnnnnnnnnnnnnnnnnnnnnnnnnnnnnnnnnnnnnnnnnnnnnnnnnnnnnnnnnnnnnnnnnnnnnnnnnnnnnnnnnnnnnnnnnnnnnnnnnnnnnnnnnnnnnnnnnnnnnnnnnnnnnnnnnnnnnnnnnnnnnnnnnnnnnnnnnnnnnnnnnnnnnnnnnnnnnnnnnnnnnnnnnnnnnnnnnnnnnnnnnnnnnnnnnnnnnnnnnnnnnnnnnnnnnnnnnnnnnnnnnnnnnnnnnnnnnnnnnnnnnnnnnnnnnnnnnnnnnnnnnnnnnnnnnnnnnnnnnnnnnnnnnnnnnnnnnnnnnnnnnnnnnnnnnnnnnnnnnnnnnnnnnnnnnnnnnnnnnnnnnnnnnnnnnnnnnnnnnnnnnnnnnnnnnnnnnnnnnnnnnnnnnnnnnnnnnnnnnnnnnnnnnnnnnnnnnnnnnnnnnnnnnnnnnnnnnnnnnnnnnnnnnnnnnnnnnnnnnnnnnnnnnnnnnnnnnnnnnnnnnnnnnnnnnnnnnnnnnnnnnnnnnnnnnnnnnnnnnnnnnnnnnnnnnnnnnnnnnnnnnnnnnnnnnnnnnnnnnnnnnnnnnnnnnnnnnnnnnnnnnnnnnnnnnnnnnnnnnnnnnnnnnnnnnnnnnnnnnnnnnnnnnnnnnnnnnnnnnnnnnnnnnnnnnnnnnnnnnnnnnnnnnnnnnnnnnnnnnnnnnnnnnnnnnnnnnnnnnnnnnnnnnnnnnnnnnnnnnnnnnnnnnnnnnnnnnnnnnnnnnnnnnnnnnnnnnnnnnnnnnnnnnnnnnnnnnnnnnnnnnnnnnnnnnnnnnnnnnnnnnnnnnnnnnnnnnnnnnnnnnnnnnnnnnnnnnnnnnnnnnnnnnnnnnnnnnnnnnnnnnnnnnnnnnnnnnnnnnnnnnnnnnnnnnnnnnnnnnnnnnnnnnnnnnnnnnnnnnnnnnnnnnnnnnnnnnnnnnnnnnnnnnnnnnnnnnnnnnnnnnnnnnnnnnnnnnnnnnnnnnnnnnnnnnnnnnnnnnnnnnnnnnnnnnnnnnnnnnnnnnnnnnnnnnnnnnnnnnnnnnnnnnnnnnnnnnnnnnnnnnnnnnnnnnnnnnnnnnnnnnnnnnnnnnnnnnnnnnnnnnnnnnnnnnnnnnnnnnnnnnnnnnnnnnnnnnnnnnnnnnnnnnnnnnnnnnnnnnnnnnnnnnnnnnnnnnnnnnnnnnnnnnnnnnnnnnnnnnnnnnnnnnnnnnnnnnnnnnnnnnnnnnnnnnnnnnnnnnnnnnnnnnnnnnnnnnnnnnnnnnnnnnnnnnnnnnnnnnnnnnnnnnnnnnnnnnnnnnnnnnnnnnnnnnnnnnnnnnnnnnnnnnnnnnnnnnnnnnnnnnnnnnnnnnnnnnnnnnnnnnnnnnnnnnnnnnnnnnnnnnnnnnnnnnnnnnnnnnnnnnnnnnnnnnnnnnnnnnnnnnnnnnnnnnnnnnnnnnnnnnnnnnnnnnnnnnnnnnnnnnnnnnnnnnnnnnnnnnnnnnnnnnnnnnnnnnnnnnnnnnnnnnnnnnnnnnnnnnnnnnnnnnnnnnnnnnnnnnnnnnnnnnnnnnnnnnnnnnnnnnnnnnnnnnnnnnnnnnnnnnnnnnnnnnnnnnnnnnnnnnnnnnnnnnnntttcacactgtgtaaaaacactttggggaacatctgcctctgaatctcctaccttgttcctatcaccatagcaattttgtctttgtcactcactcgtgtctcgctctctgcccgtcctcatctcccaccccatacacacccagtctcaacctgactctcctgccctgcctgagactcagctcctctgctcctcctgggtgctgctgtcagtcccaccctcctcccacctcctccctccttaaggcccgtgtcttcaagacgctctccttccacactgtctccatttccctttgcaccttccctccccgtgacaacagatcccctgctctctgctctcacccgcacagcccacttcctctgtgtcactaggcccttctctaggcctcactcctccaccttgagtctgggaccgaggcattggaaaacccagttccaccaccagggtacccggtgccttttcggctacatccatttgctcgctgtcatctttgtcctgatctgtcgggaactgtgttcccacacctgacagtcttgaccctgatgcctccatcagccccactgcacgtgcgtcttcccctcacactccacgtgtctgcccggctctccatcctcccgcatccaccagtgattctcacccgagaatgcaggaccccaaggcggcctatcagaagcatcttttgggcttggtttcttcttttgctattgtctatgttccttttagagactgctattttttttcccttacttttactgagctgaacactgctcacccctcagatgattggatagccctgcctgggggtccatgtccagagacctccctccacgtgaaattcaccccctaccccagataagaatcactgctatggatggccaccttgactccctgacattactccctcatttcacacctagaccattctagtgcttgccataggtggcattctagtacttgccatttaacttcccacttaacacatctcatcttttgtctgcccacccccattaggcctggaactctctgcttggaaccacttcattccttccctatttgccctttaacacacctctgaccccaaacaccagtctgcattggaaacttgttcttttaatgcctccccacccgatacgtcttgtcctcccacctgataggactcttaggccctgtgtcagtatcttcggcctcaacctgtttcttatgggtgcttactattgtcagttttccttaatccccaccccttttttcagatcccttacaagatcggcctgcagaaacttccccctttgtttcccgagttctcagttgtttcctaaaaaccagccatttaccttgacctttcgacctacaagaaaccactttcatttacttctttcggtggatttagacggctaccccagcctgtattcatcacctgcaacattagatatgtaacccaccagctcagttaaataagaaagtttcctccaacccagaacttggctcgattctccccatctggttccctacctcctctcccactcacaccccactgctcccaatccttccctcctttccaacccagtcagtcccaacccaaatcccatcccaaaccccatccccttcacccaacccacccttccccactgcatccatagcaaagaccctggcccaagattcacacttctgcaacaaagttcaaggctttaagagcagccattccttcctgcccattgctgtccacccctttcacactttcccttcccctgccgaaccttgcaggctgccctgagcactccacattcctttgttcctactctgggacctccccgttcacctcgctccaactatggctgtcctgcctgtggctgtcctgcccagctcccttccaccatgctttctgccctccatccttccctgggggcccctccaccctgtctgtcttctgtaggtgactcccctgttggcgctgcctcatcgtcccacttccacattctttcttgaagcctttccccttgcatccacatttcttctctttgcttccttggccaagggaaggtacctgcctgtctgtggccagtatttctctcagccacccagggcctgtcgcttcatctgactcagtcatctcttctccatagggatgtgctcactactttgacctgctttcaccgctcaaacttttccatcctctctctatcccaccttctcttcaagaactgttttctgttgctcctccagatcttccactgattgaggccagtgccttcccttaggctgccttttccttcccctcttccactccagccttgtttcctcttttctctttctgttccatgaagtgagttcctacaaaactctacagccagtcccgccacttcctcctcttcctcctttcttcatctccattatttccatttaccttggatagggtcccagtgagcccatgcacccctgcccatcacacctgatcttgcagtacccattgaagctatctggatccaccatttcttctttccctcttggccacactacctttactatacccttgtttagaatttaagaccttcttcttacacaggtcctgccatccatcctgttctgcctttcctcctctctgccctctggaaaaagtttccaaaaatgaagcccccgtatcagcacccaaaccttcatcctatccaaactctgggcatgcccactgtgcccatttactactgacctaatctcccactaaatctaagatgctacctgtgtttgaaggcccccgcttcctacttcactgcacctctgtagtgaagtgtggtgtagtgcatattttcagttgcaagctacacctccatcctctcaggctcccttgacaacagaggttcagactcagtggtcactaggaattgtcttctctccattagttccctctaacacttgcaagtatctttctgcccacatactagactcaaaacacatgagtccatcccccycaggcccccagcccccaaggtttacctgccagtacgttccatgcaggtgctgtctgaatgtgcagtgatgccccatttcctccatttaccctgagtgacttaggcaccttccccctactttcctttcctaaggatccacttctgaaaagcctgggattttgcctccctaccgtaatcctatgggttggccttgataagaagcatgataccaacttccctgagatctgataaaaccccatttggggaactctgatttcctccttccccttttctgcatcggaccctgtacagacactaagctccccacaacttcatgatgttctttcccctcctgcaccacaaatctctttcttttcccatcaacttccctgaccccactcacatcacaccaccttcatgtggctgctccactccaatgtctcactttttccacacannnnnnnnnnnnnnnnnnnnattaaccatattaacttggcattctgtactaaaaacacaacttcagttaagtaagatttgcctcagagttttttactttaactcacctccactcacccactgggatccatattattaggctcagtgaagctttgcattcttctaagccaagcatttaatctgaattttaactcaaatactaaaaaaagcagtattggtagaacatttgattcagccaccctttccccttcctttatcactagaatttgcttcagtctggctttaaaatcaatattcctgcagtctaacccattgaaagatctgccaggattctcaatctgagatttccttatttacccactcatttgtcacatacccagtctgccattcctcaaactcactgaaatttccctcatttcctttcaagccatctttctaacctatttgataccccttttctaccccatcatcttcaatgtctctaatttttgttgctgacttgacttaaatgatcctatctctacagaatgcaacttaatcatggtgtacccactcatttctgccttttgccttaggggaaaaacaaaacaaaaccctgctctattggtaacgcccagtctttgttcatctgtccttgaaattgattcacaatgtgaatatgtataagcttcctcatgacccacctccagtgttcagaacacttccttcctgttctcttggtgtccaacatacttacctgcatccttagctagtagaactgacattctgaggattgctgatgaagctcatccttcagactccgcttcataaacctatctctatatgggaccgtttattctcctgactctaagcattcatcaagtgtttccctcaaggagctttaaggaagccaccaaattccctaatgacaagttctttctatatagttttcctctttgccattattccatactgtggatcaaggggcaacaatacccaccctaccaactctgacattcctaaatcccaaagtggtttaaactgtatactgtccccttaatttcaatcttgttaaacagagtaatacttccttctcattttggctctgctaattttgttggagaycacattaaacacatagtaacctatgtccaacccccacacttgcaaattttacattgttaattgtttgctttcaaaatcctgaccttcagtgattgccaacactgccttccatatcagttggggttgctttaccatcaccctctataaggtttcttctttttctgttttcctattcaatgaagtagttaccatgacaggtaaagtgttgttaccccactcgcttgtcgtctaggatttaacttctattccctaaaatgctcctacactcagccatgataccgaacataccactgacttgcccctgagatttgccagtgcccccactttgggaactctgcattccaccttcccctattccatgtcagcccttttactgatgctaagccctgcacaaattcataaggttatctcccctcctacctgcctcctgtcccttcttttaccataaacttccgtcatcaaatttacatcccaataactgccttagaatggctgccagactctctcattccatgtggtatgccagtgtaaatttgcacagtctacacacagtgttgcctcccactgtcatcttccagaaactccttttcatcttcaacatccagtcctgcatgccctgccacctccaagtcaatccacagactcaggaatctttcctgaactctgaccccttcctgccctgccccccactgatgacaccactgccagcttccatgtcctcaacctgctgtactgagtccatctgctgtctcagttcacccctaaccgtcctgtattctcagttctgcctctaaggaacagtggtttcctctctctgttgtgtcctctggccttycatcgtctcgccatgccctttattgacacacggtcctcaatgtttccaaggtgccaacacctctacaccctgtttctgtggcctcatctcacctctccttcattccttccgtgtcttacccacaccatgctttctcctccatgacctgcatcaaacacttcrccccttttgggcaaaaaggaggattctctacgttcacacccacactcttgctcttggcatgcctcccttgctgcagtacattccctgatcctctcaacaagctcacctctgtaagctgctggcctccataacctgctccaactcattcttcttgcccattggggaacacctctcctctgtcctgctctcccatatgctgcaaactcaccctctgctctcccagctcccagctcctgggcccaggttggtcgtttctcctgctttcctcctctactgcatagcacggtactgtcccacctgcaccatgctgcgttctctcagcaccacctgtgattctgccactggcctaattcgtgttctcaggtgtgtcctcccttcttgacctggccccgcacccactgctccaccagatgcagtcctctctgtgtcacacgtactgcactgaatccacacgctctgctgtccaagctcacgtcccagtggcccaggctatgagtcctttccagggccccacaaccctgactcccctaaaccttcctgattcttttctcatcctttctttcacactgtggaaaaacactctggggagcctctgcctctgaatctcctaccttcttcctgtcaccagagtagttttgtctttgtcactcattcgtgtcccactttctgcccatcctcgtccccccggtacgaatgcacccagtctcaacctgactctcctgccctgcctgagacccagctcctctgctcctcctgggtgctcctgtcagtcccaccctcctcccacctcctccctcctccttaaggcccatgtcttcaagacgctctccttccacactgtctccatttccctttgcaccttccctccccgtgacaacagatcccctgctctctgctctcacccgcacagcccacttcctctgtgtcactgggcccctatcttggcctcactcctccacctgagtcctcgagtctcggaccgaggcgctggaaatcccagctccaccaccatggtcccggtgccttttcggctacatccatttgctcgctgtcatccttgtcctggtctgtcgggaactgtgttyccacacctracagtcttgaccctgatgcctccatcagccccgctgcacgtgcatcttcccctcacattgtacatgtctgtccggctctccatcctcccgcgtccaccagtgattctcacccgaggatgcaggaccccgaggaagcctatcagaagcatcttttgggctgggtttcttcttttgctattatctgtgttccttttagagattgtttttttcccttactttttctgagctgaacactgctcacccctctgatgattggataggcctgcctgggggtccatgtccccagccctccctcgggtgaaacccacccctcaaccccagataagaatcactgctgtggacggccaccttgactccctggcctttactctcctatttctagcatttagtattttggtatttccaggtacacttcctactcataagaccagcatttccctccccctgcccaacagtcctggcactctccacttggaaccacctcattgtctgccccatttaccccttaacacacatcgtgcccaaaagcccagtctgcatgagagagttgcgcttctgacacctccacaccccaccctttatgccctgacccatctaatatgactcccaggcactcagttaatacctttggcctcaatctaattttcgtaggcccttactactgacatttttccttcatcatccctcctcttttcatatcactgaccaggtgcccccagagagacttcccatttggtggtcatcatcctgtttgtttcccagaaaccagccctttaccttaaccttttacccttcctgagctactctgttttttcttcttttgccggactcagatgtcttctctagcctgtattcatcaacctcaacactcaacatgtaattgtccaccagctcagatgaataagatggtgttctcaatgcctacagcttggcccacttcaccccaccccaacccctcccccagtcccagtcccactgcccctaaccctgccccacccattcatcccannnnnnnnnnnnnnnnnnnnnnnnnnnnnnnnnnnnnnnnnnnnnnnnnnnnnnnnnnnnnnnnnnnnnnnnnnnnnnnnnnnnnnnnnnnnnnnnnnnnnnnnnnnnnnnnnnnnnnnnnnnnnnnnnnnnnnnnnnnnnnnnnnnnnnnnnnnnnnnnnnnnnnnnnnnnnnnnnnnnnnnnnnnnnnnnnnnnnnnnnnnnnnnnnnnnnnnnnnnnnnnnnnnnnnnnnnnnnnnnnnnnnnnnnnnnnnnnnnnnnnnnnnnnnnnnnnnnnnnnnnnnnnnnnnnnnnnnnnnnnnnnnnnnnnnnnnnnnnnnnnnnnnnnnnnnnnnnnnnnnnnnnnnnnnnnnnnnnnnnnnnnnnnnnnnnnnnnnnnnnnnnnnnnnnnnnnnnnnnnnnnnnnnnnnnnnnnnnnnnnnnnnnnnnnnnnnnnnnnnnnnnnnnnnnnnnnnnnnnnnnnnnnnnnnnnnnnnnnnnnnnnnnnnnnnnnnnnnnnnnnnnnnnnnnnnnnnnnnnnnnnnnnnnnnnnnnnnnnnnnnnnnnnnnnnnnnnnnnnnnnnnnnnnnnnnnnnnnnnnnnnnnnnnnnnnnnnnnnnnnnnnnnnnnnnnnnnnnnnnnnnnnnnnnnnnnnnnnnnnnnnnnnnnnnnnnnnnnnnnnnnnnnnnnnnnnnnnnnnnnnnnnnnnnnnnnnnnnnnnnnnnnnnnnnnnnnnnnnnnnnnnnnnnnnnnnnnnnnnnnnnnnnnnnnnnnnnnnnnnnnnnnnnnnnnnnnnnnnnnnnnnnnnnnnnnnnnnnnnnnnnnnnnnnnnnnnnnnnnnnnnnnnnnnnnnnnnnnnnnnnnnnnnnnnnnnnnnnnnnnnnnnnnnnnnnnnnnnnnnnnnnnnnnnnnnnnnnnnnnnnnnnnnnnnnnnnnnnnnnnnnnnnnnnnnnnnnnnnnnnnnnnnnnnnnnnnnnnnnnnnnnnnnnnnnnnnnnnnnnnnnnnnnnnnnnnnnnnnnnnnnnnnnnnnnnnnnnnnnnnnnnnnnnnnnnnnnnnnnnnnnnnnnnnnnnnnnnnnnnnnnnnnnnnnnnnnnnnnnnnnnnnnnnnnnnnnnnnnnnnnnnnnnnnnnnnnnnnnnnnnnnnnnnnnnnnnnnnnnnnnnnnnnnnnnnnnnnnnnnnnnnnnnnnnnnnnnnnnnnnnnnnnnnnnnnnnnnnnnnnnnnnnnnnnnnnnnnnnnnnnnnnnnnnnnnnnnnnnnnnnnnnnnnnnnnnnnnnnnnnnnnnnnnnnnnnnnnnnnnnnnnnnnnnnnnnnnnnnnnnnnnnnnnnnnnnnnnnnnnnnnnnnnnnnnnnnnnnnnnnnnnnnnnnnnnnnnnnnnnnnnnnnnnnnnnnnnnnnnnnnnnnnnnnnnnnnnnnnnnnnnnnnnnnnnnnnnnnnnnnnnnnnnnnnnnnnnnnnnnnnnnnnnnnnnnnnnnnnnnnnnnnnnnnnnnnnnnnnnnnnnnnnnnnnnnnnnnnnnnnnnnnnnnnnnnnnnnnnnnnnnnnnnnnnnnnnnnnnnnnnnnnnnnnnnnnnnnnnnnnnnnnnnnnnnnnnnnnnnnnnnnnnnnnnnnnnnnnnnnnnnnnnnnnnnnnnnnnnnnnnnnnnnnnnnnnnnnnnnnnnnnnnnnnnnnnnnnnnnnnnnnnnnnnnnnnnnnnnnnnnnnnnnnnnnnnnnnnnnnnnnnnnnnnnnnnnnnnnnnnnnnnnnnnnnnnnnnnnnnnnnnnnnnnnnnnnnnnnnnnnnnnnnnnnnnnnnnnnnnnnnnnnnnnnnnnnnnnnnnnnnnnnnnnnnnnnnnnnnnnnnnnnnnnnnnnnnnnnnnnnnnnnnnnnnnnnnnnnnnnnnnnnnnnnnnnnnnnnnnnnnnnnnnnnnnnnnnnnnnnnnnnnnnnnnnnnnnnnnnnnnnnnnnnnnnnnnnnnnnnnnnnnnnnnnnnnnnnnnnnnnnnnnnnnnnnnnnnnnnnnnnnnnnnnnnnnnnnnnnnnnnnnnnnnnnnnnnnnnnnnnnnnnnnnnnnnnnnnnnnnnnnnnnnnnnnnnnnnnnnnnnnnnnnnnnnnnnnnnnnnnnnnnnnnnnnnnnnnnnnnnnnnnnnnnnnnnnnnnnnnnnnnnnnnnnnnnnnnnnnnnnnnnnnnnnnnnnnnnnnnnnnnnnnnnnnnnnnnnnnnnnnnnnnnnnnnnnnnnnnnnnnnnnnnnnnnnnnnnnnnnnnnnnnnnnnnnnnnnnnnnnnnnnnnnnnnnnnnnnnnnnnnnnnnnnnnnnnnnnnnnnnnnnnnnnnnnnnnnnnnnnnnnnnnnnnnnnnnnnnnnnnnnnnnnnnnnnnnnnnnnnnnnnnnnnnnnnnnnnnnnnnnnnnnnnnnnnnnnnnnnnnnnnnnnnnnnnnnnnnnnnnnnnnnnnnnnnnnnnnnnnnnnnnnnnnnnnnnnnnnnnnnnnnnnnnnnnnnnnnnnnnnnnnnnnnnnnnnnnnnnnnnnnnnnnnnnnnnnnnnnnnnnnnnnnnnnnnnnnnnnnnnnnnnnnnnnnnnnnnnnnnnnnnnnnnnnnnnnnnnnnnnnnnnnnnnnnnnnnnnnnnnnnnnnnnnnnnnnnnnnnnnnnnnnnnnnnnnnnnnnnnnnnnnnnnnnnnnnnnnnnnnnnnnnnnnnnnnnnnnnnnnnnnnnnnnnnnnnnnnnnnnnnnnnnnnnnnnnnnnnnnnnnnnnnnnnnnnnnnnnnnnnnnnnnnnnnnnnnnnnnnnnnnnnnnnnnnnnnnnnnnnnnnnnnnnnnnnnnnnnnnnnnnnnnnnnnnnnnnnnnnnnnnnnnnnnnnnnnnnnnnnnnnnnnnnnnnnnnnnnnnnnnnnnnnnnnnnnnnnnnnnnnnnnnnnnnnnnnnnnnnnnnnnnnnnnnnnnnnnnnnnnnnnnnnnnnnnnnnnnnnnnnnnnnnnnnnnnnnnnnnnnnnnnnnnnnnnnnnnnnnnnnnnnnnnnnnnnnnnnnnnnnnnnnnnnnnnnnnnnnnnnnnnnnnnnnnnnnnnnnnnnnnnnnnnnnnnnnnnnnnnnnnnnnnnnnnnnnnnnnnnnnnnnnnnnnnnnnnnnnnnnnnnnnnnnnnnnnnnnnnnnnnnnnnnnnnnnnnnnnnnnnnnnnnnnnnnnnnnnnnnnnnnnnnnnnnnnnnnnnnnnnnnnnnnnnnnnnnnnnnnnnnnnnnnnnnnnnnnnnnnnnnnnnnnnnnnnnnnnnnnnnnnnnnnnnnnnnnnnnnnnnnnnnnnnnnnnnnnnnnnnnnnnnnnnnnnnnnnnnnnnnnnnnnnnnnnnnnnnnnnnnnnnnnnnnnnnnnnnnnnnnnnnnnnnnnnnnnnnnnnnnnnnnnnnnnnnnnnnnnnnnnnnnnnnnnnnnnnnnnnnnnnnnnnnnnnnnnnnnnnnnnnnnnnnnnnnnnnnnnnnnnnnnnnnnnnnnnnnnnnnnnnnnnnnnnnnnnnnnnnnnnnnnnnnnnnnnnnnnnnnnnnnnnnnnnnnnnnnnnnnnnnnnnnnnnnnnnnnnnnnnnnnnnnnnnnnnnnnnnnnnnnnnnnnnnnnnnnnnnnnnnnnnnnnnnnnnnnnnnnnnnnnnnnnnnnnnnnnnnnnnnnnnnnnnnnnnnnnnnnnnnnnnnnnnnnnnnnnnnnnnnnnnnnnnnnnnnnnnnnnnnnnnnnnnnnnnnnnnnnnnnnnncacccagggcctattgcttcatcgggctcagtcatctcttctccatagggatgtgctcactactttgacctgctctcctcaccgctcaaacttttccttcctctctctatcccaccttctcttcaagaactgttttctgttgctcctccagatcttccactgattcaggccagcgccttcccttaggctgccttttccttcccctcttacactccagccttttctcctcttttttctttctgtcccatcaagaaggctcccacaaaactccacagccagtcccgccacttccttctcttcctcctttcctcacctcctttatttccatttacctcaggtgcggccccagtgagctgatgcatccctgcccatcacatctaccctttcgttacccattcaggctgtccaggtcactcatttcttctttccctcttggttgcactaccttcacaacacccgtgtgtagaatttaagaccttcttacataggtcccactctctgtcctcctctgcttttcctcctgttttcctctagatgaagttttccataaatgaagtccacactccagcaccaaacaccccagctctctccagtccttggccatactctgtcccatgtacccagctgatactgatctaaactcccattacaactacgagacccactgtgtttgagactctcccttgcctactttatttcatctctatgtacatactttcagctgtaagctatatctctatccttttagccttccgtgacagcagaagctcagattcagtgatcattctgaattgcttcctctgcattggttcctaactactcctccactatttgcaagcatctttctacccacacaatagactcaaaccacgagtccattgccaagtccctgaggttaccatgcccagtgccatcttaccatgcagtgatgctatttccttcatttaacctgagtcatttgtccccatcccccacattctcctgtggacctagttccgcatattcctgggctcttgcatctgctctgatcctacagtctggccttgatgacggtcatgaaaccaacttttcacatgagatctgtcagtgccccagtttgagaactctgcattcccctcacttttccaccttggccccttgaccagcattcatcacccccacagatttgtgaggttgtctcctgttaaatgctttcagtccctttcttttcctattcacttacgtgacccaacatgcatcccatatgccacctcaaatggctgccccactcccacgtctctctttttctcctcaggattcacattaaaaccttgcatcactcatccacccattttctcccactgttctcttccagacaccctccacttcgtcttcagcatccaattcttccttccctaccctcactgctgccaccattgccacagcctctttatccccagcatgctgtactgagtccatctgctgtttgaaaccatcctaccttgtctgttccaccatggcggacacagtcctttcctctgtcgaactcaatccacctgacctttcatcatctcaccacacccttcattgacacgtggtcccctgtgtttccaaggtagcagcacttctatgccctgcttcttccttggcctcctcccacctctctttcattccttgcttatcttacccacactatgctttgtcatccatgaactgcgtcacacactttgccccatctggggtaaagtccctggattctctgcatccgctccctccctcttggcgcctggcatgcctcctttactgcagcgcatccctcctgctctcaacaggctctcctctcttagctgctgggctccattgcctgctccgactcattcttcttgcccattagggaacacctctcctctgtcctcctctcccatgtgttgcaaactcatcccctgatgtcccagcagtcagcccctggggcgcaggttggtcgtttctcctgctttcctcctctactgcatagcacggtactgtcccacctgcaccctcctgcattttttcagcacaatctgtgattctcccactggcctaagtcgtgaactcaggtacctcctcccttcttgacctggccccgcacccgctgctccaccagatgcagtcatctctgcatcacacgtactgcactgaatccacctgctctgcccagctatcagtgtccacatcccagtggtccaggctatgggtaccttccagcaccccacaaccctgactccccaaaaccttctcaattccctttgcatcctttctttcacattcttgtgaaaacactctggggaacatgcgcctgtgaatttcctaccttcttcctgtcaccacagcacttttgtcatcagcgctcactcctgtcccgcctccacctacccaccctcatccccctgccccgccagcacaaacgcacccagtctcaacctgactctcccgccctgcctgagacccggctcctccgctcctcctgggtgctcctgtcagtcccaccctcctcctgcctcctccctccttagcaccgatgtcttcaagacgctctccttccacgctgtctccattcccctttgtgcctttcctccccgtgacaacagatcccctgctctctgctctcacccgcacagcccacttcctctgagtcactgggcccttctctgggcctcactcctccacctgagtccttgagtctgggaccgaggcgttggaaaccccagctgcaccaccgtggtcccattgccttttcagctacatccatttgttagctgtcatccttgtcctggtctgtcgggaactgtgttcccacacctgacagtcttgaccctgatggcctccatcagccccactgcacgtgcgtcttcccctcgcactccacgtatctgcccggctctccatcctcccacatccaccagtgattctcacccgaggatgcaggaccccaaggcggcctatcagaagcatcttttgggctcggtttcttcttttgctattgtctatgttccttttagagattgctttttttttcctttactttttctgagctgaacactgctcacccttcagatgattggataggcctgcctgggggtccatgcccccagccctccctcgggtgaaacccaccccccacctcagataagaatcactgatgtggacagccaccttgactccctatggccacctggactccctgcacttcagtctcccgtttgaggcctggagccttctttttttttttttttttttttttttgagagaagagtttcactctgtcgcccaaggctggagtgcagtggtgcgatctcggctcactgcaccctcacctctggacttcaagcaattctcctgcctcagcctcccaagtagctgggattacaggcatccaccaccacgcccagctgatttttttctttttaagtagagacagggtttcgccatgttggccaggctggtctcgaactcctgacctcaagcgatccacccaccttggcctcccaagcctggagccttcttgtgcttgcatttactgttgaagatcattgttttgaagggccagaatgcccctttatacctgtttttgtttgttcgtttttttactacttctttcatgtgctttttatacttcttacttagcattttttgtgtttttcgcattctaactaacctggtagtcttcccatggaagcactttcttttgcacatttccttttcttctgcacatttccttttcttcctctggcatccttccaccccattcttcccatgcctcgtttctctactccacactcgccctccgactcttgaaaaggatttctcttaaagatctacattgaaactttgacccttcagtacatgaaagcgacctatactctaaacccccttcgtatcggcctgatagcttccacacccgtacaatattttctgttcttattttaatatttcctatccttgaagtttacatactgtgacacaggtggcaagattccacctttaggactgcctccagttactccccactcctcttatccccatcatgcattctttttactgtactatagtattttcattatcttcatactgttaatccatgcatctttcctatcttttcattattattcaggatgttttcatctcatttttggattttcttaaagactctcttagtcctacctggaagctcatttggcaatccattctgcacctctttttctcttctttgacactttgaagcccctgtgccactataatctgtttaccactgtctttctggtgcagtgagcagccctttctagatgtggatgtgcacccttcaattccatttcctggttccctttcccctgtctcagctcagttcctctactcatttctgaacttctttcctcctttttggaatcacatttaagtatactactcaatctacggtgcctctccaccttttttgtttttgcctttttctaatattctactctgatgcatatagttgtcttctgacttgcttcttttctacctcaccctttttcccttccrtatctttggtccatctttaatcatataactcttttcttaatttatgctcttgttcttctgacctcattgtttctgggtttccttattgtgaagctgatttgccctgtgtttacttaagttactctgaaatgttgccaaatccatgcagtgctctttttatttagtgtccatcacttgttttcttccttgttccatatgatacgattatagtggcaaatcttattttttagtatgtcatcctcgcatgacttttcccatcctaaggtaaattttaaatgccttttccctttattctgttgtttttctttttctgccttggaagagcacattgttaaccacccatacactgtgtgtcactcctgtgtattcactaagatcttgctgtcaggcacctccttctgttcgccattcactgctcagtccctttcggtatttcttctttccagcatactgtgctgaactgctttagttctctgtttgttccttggtaggatgcctgccacttgccttgttttatgtccacttcactgaatgtgttgctaatctttctgtccgttgcactttttaatgcaaatgtactttcctggacactgtctctcttatgtccaatttttagttatcattttatcttgtccctttctttctcccttgaagaactgcctacacagttttcttcctgactcgacttttcaagtacaagcaattttcattatcctgtgtgcttgaataataatttttrgtagcaaacacttacattgcattatcttaaatttgaaaaagctcttatccatctccctttaaaaaaactcaacctattttctcagtcatcactaaaacactatgataaaagaaaacttttaagtatttttcataatatacaccattttaaaggataatgacctaattatttaacatatcatcagttcattagcagacatgtttgtgtgtaatacaaaatggtctcctactataataaagactataattgcatttgccttctatactgcaaggaacaatggaatgttttcaatataaataacaaatgcatatacatttttaaataaaatataaaaacaagaagttttttggaaatatttacttaccacctgatgagttgcttgaattgtcccgctcatattatggagaagatgacaggaataatgcataacacatttaacatccttcagcatagggaatgagcctatcagcacaagaaccacggcaaaaatatgccatctcaagtaggcttgggtgcaagctaaaagtttttgttagcacaagaatgctaactcactgcaccagattttctaagtacatggtgagatgtatatataatgtaaatcttttcatattaacaagtatttaggctgtatgagcagatagctggtgatatctgaattcctcattctggtctcaataatatttgctgtttcataccttgcatattccaaacccagactaagtcatacatttttttcctccaaccaagcatcttctcctctcccttttcctttttcttttttatatacacaggtcttctcagttgcttaactttcagccaatcctaacattatttcttaacttcttggccaatttaacatcatacttactgctatgtccttttgtaactccctttgaatatctgccctgccatatcgtaaatattctacaaatcatttacccactgactctataataagtgaatgctgaattattctctggatgttaaccttatcatgattcccaaccagtcctcaaccartagcattcatttgttctacaaagaatcccgatctatacctgtcaatcctcatgtttttaaggtttccaccaatggcttcttatcagggtttatcttaattcatctccttctaaccttccctagcaagcagtcacttaagaaataaatttcccactaagacttcaagtgccagcctatccaacttctattctttttcagactcctgatcttttctcattctgtatacagttcttctgcaatctgacagttctgtttctttaatttatacttgatctgtcttattgtttttccacctactcaaaactgctttctaattcatacaacgtcccatttattgacttgctatcctctgtttcttttttctatcatgagctttggcttaagtatagagcaacagccatttttcctgtcaatatctgtgactattcaaataatgtctttccatttacaaacaacctgaacatttcccttctactccttttctcctttttctctttctcctttggctgcaaactccttacattttctccagcattctttcttcattcagctgtatcatttagtggatataaacatctcttttggatgatatgtacactcttgatattcagcactattcaaccatcttccatcttcctcactttgtacttaatctctttccaccctccattcagtctggacatccctgggatccctgctctgacccattttaagtccgtcgnnnnnnnnnnnnnnnnnnnnnnnnnnnnnnnnnnnnnnnnnnnnnnnnnnnnnnnnnnnnnnnnnnnnnnnnnnnnnnnnnnnnnnnnnnnnnnnnnnnnnnnnnnnnnnnnnnnnnnnnnnnnnnnnnnnnnnnnnnnnnnnnnnnnnnnnnnnnnnnnnnnnnnnnnnnnnnnnnnnnnnnnnnnnnnnnnnnnnnnnnnnnnnnnnnnnnnnnnnnnnnnnnnnnnnnnnnnnnnnnnnnnnnnnnnnnnnnnnnnnnnnnnnnnnnnnnnnnnnnnnnnnnnnnnnnnnnnnnnnnnnnnnnnnnnnnnnnnnnnnnnnnnnnnnnnnnnnnnnnnnnnnnnnnnnnnnnnnnnnnnnnnnnnnncagtggtgccatctcggctcactgcagcctccacctccggggttcaagcagttttcctgcctcagcctcccgagtagctgggcttacaggcatgtgccaccactcccagctaatttttttgtatttttagtagagacggggtttctccatgttggccaggctggtctcgaactcctgacctcaggtgatctgccccccttggcctcccagagtgttgggattacaggcatgagcaactgtgcccagcctactcactcttttttatacatatcttaatagttgctcttacagccagttctaacataatatttctgttctgagcaaatcttagtatcatacttcagcaagttcttcctaatttcctttatttgcactgtcatatatattaacatcagtattatcagcttccatcgataatcacagtgatggatacatcattcttctcaaggtatactcttgaggtatactccctcaatgccacccacctgctccataccaaatacagatcatcttctcaccaaataaaccacttgcccatgctctccagttgctctctcaaaccagtctttcaggtgctatcagtggctttgaatcaagattcaccctgatcttccccctctaccctttcttatcaacaaagctctttaattaaaacttttcattcccccaaaatgaatacacccacttcttcctatcttgatgttacatttgcttcagatcttttttaaagaaaccaaatattgcacatatagttgagacttcctcggtatcactccccaaaatcatttacctctctcccttccaagagaaaatcactacatgaatctgatacttatcctcatacatattttcataattttactacatatccataattaatacgtagtgctgtgtttgcaatgctgtataaatgtatgtatatgtgttctcaatagaaaaaacttcccatcaagacttgaagagctagtctgttttctggctcctgctcgtattcaggccttcgctgctcttcaccatctacaccactcattgcaatcttcaacaacacacatttaacccattagactccttctgagatttgacagatttctccattccagttctttttagtccacagcttatttgtctttttgcaacttgaccactcagaaccctgctctaattaacacagtgctcccattacttagatgaaaaatcctttcttcttatcctgttatgctctatcatatcttacctatccattttggctactagcattaaattatcatagcagtggatatagcattatactcttgaggtttacttccctcatgattccctaccagtcctcaagaaatacaattaatttcctctacagacaaactactcacccaccctccctaaatggtcaataccgatgtatttaaaggttgctagcagtacctttttaggagaattcatcttaataaaactcccttaaactttcttattaaccaagtttttaaccaaaaatttctacctacagcatcaagagctaatctactaattcccatttctgcctgggtccccgaagctctgttagatgcaccattcattaccattgggccttcccacccaatttgaccacttgggcccattttgagatcttagcagtttccccttttaaaaatacatctgatctgcctagttgccactccatctagtcttaacttttgtctgttttatacgatggtcctttactcagctagccagctctctcttccttcttattccatcataaccttgatccaagaatggttcctttaccccccagtcaatacctgcctttcctccagtcatcccctcacatcagcaggaacccttcactttcttcttccattcctttcttcctcattttgccccagagaatcatgctgctatatcttctgtgtccctccttctttcagctgtcacctgtgtgtcattcttagggactcaatgggttcttctggatactcccctccccatgggcactcgctgctcagcccactgccctctgccctgtgccacattctccactgtatttgtctgtgctctcagatctgcctacactttcataggattcttgccactggcctgccctttatgcccatcccatttagcctctctcacctctcaccatactgaccaaacccattacttctaacatttttccaacaaagcttcctggacagcaaaaccttatgccctggctcttactttgccaccttcttaccttactctctccttgttaatacacaactctgacaaatycccaactctcatttcctaatattcccatttagccctctttaatgcccttccatatctgttgtttttctgcactgcatgttctgccccctacctcattcacacgttctctttccctatttagcatccaacctccatcttttgttctctccttctttgcgatttttgcatataagtctcctcagttgcttctctcacttttggcaagtcctaatatgttttcttaatttctgagtacatccttaatgtccctctcagaacatttttccagatttccctttggaggcttcccctgtatagcctaacctttcatagtgatggatacatattctttttgaggtttcctcccctcatatccccactgtctccctcattcaaaaccagttttctactcttcagataagccttcccttccccttagatagcatctaacctggcttctttattttccatcatgacctttcgcccaagtatggtgccaaatacctccagttagtatcattgacactttttttggtcaatactaagtgatgccttctcgtctggaagcaattttaacttcactattgtacacctttttattttgccttataaaaactatattcagtatccctccttcattcagagactgtgtatgtcagttccatagattcagtactgtcttttggataaacagacccctcacactcaacactcactgttcagactgcacactggatctgagatccacagcttcctgaacagtgacccctcataacctcaattcttacctagccacgttctctccttcctctgtctacttgagtggctgtgactggattaacataaaatcactctaccagagttgctactctccctgtcccagtattcctcatcctgtcatgcttcagtgcccttcctcactggcctgcttactgtgctgcaagttcagcctccagcctcattcatttatcccttcccttttgtaccctccatcacctccattctctccatctctcctctcctttcattcaagtctcttcagttgcttcttttaattttcagctgaccctaacacaacagttgctagcagaggctctttatcagaattgttcctagcctgcctttgtctaaagcagtggttctccaactgcagctggttaaaacaagctgcagggccttaccccaggatgtggtttggatctgtatccctactcaaatctcatgtcgaactgtcatccccagtgttggaggtagggcctagtgggaggtgactgggtcatgaggccagtttctcataaatggtttagcaccatccccttggtgctgttcttgtgatagagttcttacacgacctgactgttttcagtgtgtggtacctcctcccactctctatctttctcctgtgaagtgctggctccccaccattcacctgccgccatgattgtaagtttcctgaggcttcctcagccatgcttcctgtacagcctgtggaaccttgagccaattagacttcttttctttataagttacccagtcccaggtatttctttatagcaatgtgagaacagattaatgcaccctgagtttctgactgactaggtctgggggaggggaaaagaattcatatttctaacagattcctagatagtgccatgtaacacattctaagaagcattgctcttcaacttctccctcaaccaagccctttaattaaaaatctcccactaaggcatcaagagcgagtctactgactcattcctattcaggtctttccttctctcccatatactagtcactgcaatctggccttacacccactgaatttggccagttgggcccattctgagatctggcaggattctccaggcatctttatggcgctgtggtctttcttattaccacgccaccttttcagaatcattatctagtttatttaatgctccccttagctttaacccctcttcatktcttttggcccaaatatgggactgtctctccagtcagtcctgccattcttcaaatgaccttttcatctggagtcaactttaatgttttctyctattccttttctccttrttacctatcttgccctaaagatgtacgctaccttatcttcagcctcccttcttttagctgctgtccatatttcattcagatggactctgtctcctcctgaatggcacttcctagccaaattctctctagtgtctgtctctcatctgtagaaaatcttcacatgacagagtaacttctaagagtaactttaataccgcacttacatgatattcatttgtttctcccctttggtgatttgccctcccttaattatatagagtaaaatttcatctaccatctgtacctggmaacaaagaagtttyacccttgagatgggtttccaacatgatctccagccactcctcttccaatattagtcatccattctacaaactactcaaagatctatcctggtgtctttaagtgctgccctattagggctcatcttaatccatctccttctaatccttctcattaaacttctcacaaaagcttcscattacttttcaagcacttgttcttcttccattgtrtctactgcttttcaaagtctgcaattaagagccaacatttgactgaataaacccacattttttaagggtttacaagatttcccattctgggaaacactttcctcattttacctgtccatgccactccacctacgcttacctactctttgtatagttctccctttacacagtttccagtctctccttatttaatcttacacttatggggccgtatccctccagtcaatacctgccaatcttcaaatgactccgtctcttctgcaggctcttccactattttccccagttgaccctagtagaacaactgttagtcacttgttttttcagctatcatcttgtgtatcattctcatgaatttagtcttttcttcctcgtcacctccacactactctgaaaacacttgcactttcagttcattccagaccttcatagggttcctgccactgcctatggcaagaatccattccatttaaactccttgacctttcactctattggtcacacttgttgcttcaaacatcattcaagcaaagattcccagatggcacttcctcatgacaccagttcttatttatctacttactctttgtattctctttccttctttggttgtaacccagcttaactcacatctctctactgcatatgcagctctgccatcttctggtgttcctcattctggccctctttaatgcccttccctacccatacatatatatgtatatgtgtatatatatatatacacacacacacacacacacacatatatatatatatatatatatatatatatttttttttttttttttttttttttagacagaattatttcactcttgtcacccaggctggagtgcagtgtggcctgatctcggctcactgcatcctccacctcccgggctcaagtgattctactgcctcagcctcccaagtagctgggatcacaggcacctgccaccacgcccagctactttttgcatttttagtagagatggggtttcaccatgttggcgaggctggtatcaaactcctgacctcaaatgatccacctgtctcagtccccygaagtgctgggattacaggcatgagccaccgtgcccagcccctacccacactttatattccacactccagcctaaatcctacatcttttcatcttttagcttccagcctccatcttctctttctcttcccctgtgatattttcattcatgtttccctaggaaatgtctgtcacttttagccaatcctcacatagcagagtaacttctaggcaacttcagtggaacactgtgcaatagtctacgatatcttaactgtcagtcatcctttcacttgccatctctctcttttttctttttttgagacrgaaactcactctgtcacccaggttagagtgcagtggcgtgattttggctcactgaaacctccaggattacaggcatgtgccactacgcccagctaatttttgtatttttacaaaaatttttagtagagacggggtttcaccatcttggccaggctggtctcaaactcctgacctcaagtgatctgccagcctcagcctcccaaaatgctggaattacaagtgtgagccactgcacccggccttaccatctctacagaaatagatatagacttttttacttcactcttcataatcacccattccccatctagtagcaataatccattctctggacaaactacatgttcacactctcttaataaatcaagcctaatatttctaaagttgccatctatagcttttttgttgttttttgttttttttttttagatggagttttgctcttgttgcccaggctggagtgcaatggggcttggctcatgttaaattgtcagagttgtatattaacaaggagagttgtgtattaacaaggagagttaacaaggctcaccaactcggcttaccacaacctctgcctcctgggttcaagtgattctcctacctcagcctcccaagtagctgggattacaagcatgggccaccacgcccggctaattttggatttttttttttttttttttttagaagacacagtgtttcaccatgttggccaggnnnnnnnnnnnnnnnnnnnntttcttttctctagcttactttattgtaagaatacaatatatattacatataacataaaacgtgttaatgaactatttttgttatcaacaagatgattaatagtaggttattagtgatattttgggggagtcaaaagttacatgtgaatttgcagctacatgggggttggcactgttaaccccatgttgttcgaggatcaactgtacaagatgcctatagtactgttattcataattgccgcaaatttttttttttttttttttttttttagaagacacagtgtttcaccatgttggccaggctagtcttgaactcccaacctcaggtgatccacctgcctcagcctcccaaagtgctgggattacaggcgtgagccactgcacccggcccatctatagctttttatcagcattcatcagtttataactttcctatcaagcaagtcctttaattagccattccctcaaamgctttaagagctagtctgctgctgcctcctactgaattccttgctccttaaccctttctgtgtatttcccatgcagccgaccatttagacctagacaggataccccattctaaatctttattccacacctgctctgccagtaggcccttccttatgtaatattttctttcctttgcttccagtctcttatttcatactctcttatgacttttggcccagcaatgctgtcttaccttcctgttgatgtgtgtcattccttagtgaccaactccttttcatctgaggacaactctaatgttgctttccagtaccattcctccttccctttctgaatttgtcctagagaaaaactccctcccaccatttgtacagcattcccacagactcaacacgattttccaggtaggtgtgtattgcttattttggcactcactgcccagctttcctcgatgtcctacacactatgctgcacccattgcttctcagttcagtccagacctgcatagactgctgcagttagcctgtacagatccatctcttttgccttctttctaatcttttgccctagtgacatacccttttctttaattattattctaacaaagctttcyggaaatacctcataagtgtctcttactttgtcatggtctcccccaggtggttgagacctggcagctccctcccacctttcccactctgccctttgccacactgcattttctgtaccctggcccaactcacatgtccctctcctgtcttagctgccagcatctatcttttctctaattcgctgggttcttttcatacaaatctccttagtggttgactctcattttcagtgaatcctcacaagacaagcttaatttcagagaacagttttaatgcagatcttcagggcattctttcctgattctctttggtatttgccttgctttgtctgtgtaactctcatatttacattatggcagtgcattcagtattttcttgctatggaaaggcccccgcatcttgcctcctcgccccatttcgtcatcctctccagcagcttcgacagattactgcctagacttccttagatccctgtaacctctcattgtatcaatcaaaccatttaagtaaaaaaattcccaggaacattatctctactaacaccattcctatttacttccttaatctctttctctgtatcaggtccttatatgtaagtgtcttctgtctttacctccacataaaactcagcccctgtgcccagtctgtgatctgccttcatacctgatgttgtctctttgtcctcctcatttgctgtagcctctctgcttaattggaaccacactgggttgctataattaatgtctctcctgactcttcattctaacttgatcatgaccttttcccctaccatattctgtatctctttcatggtttaaaaaaaatgcctcacctgacctgttctggccttgtgttaactttcacttctttccccttctctctgaagaaaatcctatcctaattaaaccacagtcgttcttttctcaacccctaatggcattgaaattgattctgcaggcttgataggttcattctttcctatatgggaaaacccactgccatcgtctgttttcagcatattctgttgaatccatctgctctctgaattcagacccattcttcatagtccccaccagtggcttaaattaggcaccttatctagcttatctctaacctttcaatctcttgactgcctcagctcaccagagcctgttggaaaatcatttgaaatacaaggtattttacaatttattcctaaacaaattatcttctcagcacctaggcattagcatgcctcttactgtttccagctgcccggtggactttctggcctctttccttttgcctgtttgtacatcttcctctgcttgccaaagctcttttgcatcttttgagagccagttaaactattatatcgtttcacattttttacagttttcccaggctatttgttaatcccgcaccctcacatggcactctcttaaaacttaaaggatctatggcattgagttgtaaagtcatagatagatcacacacacacacagcccacacacttatttaactcctagacagctcctagagacagagatcatgtctcagtcatctttttatccaagtgtctggcacataagcttatacctttacgtgtaatgtcaacatgtattgacagtcactacatgtgtggatggatgaatggatggaatttaaagtcaagactgagcagatgaaagtcttattacccaatctgtcgtatatggtcttcacatctgagcctgttctttcctctccttgcctatcccccaaataaytttttaactctcccaatatctaatattttttgtacctataagctttttccagaccatagacaagatcctaaatgccttttcttcatccctgcttgctaaatcccctccttcaaacatttcagaaaatactgtctttactttttataaagacttcactttccaaaaatgtacccccacctccatttcttattacttaacaccacttgtgtgaaaacatacaactgcccacttgcttttccatttaagacactgactttaccaatastagaaactcattactgacctactcactttaggctgaaggttgacagataaagcaagttctctctggtgatctgtggacccgccatcagtccacaatctaaagatagtattgagatgctgatgagattggtcaatgttaatctgatgatctgtatgctctttaccacaggttttttttttgtttttttttttggtcaggtcctacagcagtggttctcaaaatatttatttttcaacatttaggyccctttgataggcatggcaaaaagcccccaaaagtacctctctgctgctttcttcataccaatagagaaacagtctgcccatgttatcatttctgtactgctgtaacccacagcgtggaatagactttacattcatgctttgtgagactgccttcctgacccgcttgtaggctgcttttgagaaccactaccccagacaacagggcatgtgtgtttaactggaaaatgtggaacacagtgctgagtacagatggcacttcctaagaaatgatggaaacgtctcccttgcactccccactgatgcaggtttgcctcccttctyctccagttgcaggctcctttagctgcaccatgaagtttacagtccgggactgtgaccctaacactggagttccagatgaggatgggtatgatgatgagtatgtggtgagtcttcccagcatagagactttctttgacaccttcacaacactaagtgacttctgccttgagagaacatttttctaggagcatctgacataaacttaagggatttctattcttctgaaacagatgacaaattaggaggacctggactaaccctcctctgtaactggacagcaccaggccagagagaattgagatttaccacttcatcattaaaacaaactcacccttttttttctttataatagggataattaagagatgaaaataatgacatgattttcattgagatcagttttatttaaaatgatttggggagggggttggttttgttttttggttttttgtttttgcttcagcagctgttagtttatagccagatcatggattaaaaagccttcacagaatggagggaaaactttttttaaaaaatatcaacctcttagtgaatgatcagagggtaccgtgtgcccagaactcagtggtcaagtgtgggtgcaacatgactactctgtacctcagggctacagatgttgatctgaggctcttgccagatgttctgttttcttgctttcctttgctaagggctacaacattagatttatccagactacagaacttaaactattttggtggtagagttttctctaggctccggaggaccatattgactagttcctttatctttgccctataacagaaaggacttttctttactgactgcttattacccactagctggaagatctcgaagtgactgtgtctgaccatattcagaaagtactgaagcctaactttgctgctgcttgggaagaggtgggagatacctttgagaaagaggaaacctttgccctcagttctaccaaaacccttgaaggtgagacccattttgctatcagtatattgcctgataacagtataacacctaacaggcatatttgttactccagaagaactcctttaaaaaaaaaaaaacttcataaatctcttacttaaaaggccagcaccctgtcttcatcatctaattgatcagccattttctagtccagtagtagcctccctctacacatcaccaacaacccccttcaccaacaamcccttccaccccagctcccagcatacactggtgcagagggagatccctgtgctttactttcctaatactgtctcatacatcttctcaacacagaggctgtcaacaatatcatcacatttctgggcatgcagccatgtgagaggtccgataaagtacctgagaacaagaattcccattcgctctatctggcaggtaagaagcttccatcagattttccttccattttcttgcaaagcttaataataggatatagatgggcatcttatgccttgctgttgtcccatcatsccattatatgagtaacaatttgatacccagtcaaaatgaataatttgttttgcatgctattcttggttattcttttaagatgtacatttggcccaaaacaaatctctccaacagataccaaggccaccaccaacattccttttgagtactccaaattggtatttttgaataccttctatgtacctggtttcatgggaatataaaaatatatatatttggaatttatgtttgtttaggattcagtttccacaagtctctggaaaagctaaactaaactaatagaaaggagatgcagggatagcatgataaatttcattatccagtgcttgttttgggttcttaatatggttttccttacttttttctctcaggtatattcagaggtggctatgatttattggtgaggtccaggctggccttagccgatggagtgaccatgcaggtgactgtcagaagtaaagagagaacacctgtagatgttatcttagcttctgttggataaatgcttactggacaagaggaaactgatgcacactacatggtcagtgggcttttaggctagtggcatcagtttcccagaatcagacttttgaagatgaatgactttggagaagcaaattaaacatttggccctgagccagcagatcaagcaaatgtctatctttgcgcatgggttgktttttttttttttytttttattctacttggtcagctttgggacgatagtgcagctttgggtgatcttgaaaatcaaatactatcctatactccagctgcttaacttcattttattctttaatgtgtacctgaaagctcctggcaatgctggaaaatttttatcccagaggggtgggggggaggggggaggggaagccagagtccacttttgtcacaattcatttttattaatagaaaataaacacttattccagtttcaaagttgttatacttgaagttgctaatttaaaaaaacgaattttaaataatcacttaataatcctgctttgactaagacaatgaaatgtggctttaaaaaaaaagtattcagcaccatttgctcataggtctttcagagtttgttcttaaagtttctggaactttcctgtctgtaaagtaacaggaattactgagctacattggaaagcctctctgggacaggcagtggggagttaagcagtcatcataaaggaatcagtgtacattcagcatggtgacttgactacacaacaatcccttcccctctactgtagctcaagagagacatgcttctaaccactgaggtatgaggagtctcagactgttatttgctgttagaattggtcttcccagctaataacagtacatctctggcacagatgctattggtccttaatgtcctgtgattttaggaaatagtttggatttagttcaatttattcagaaaccaaacgtgtttaattagcttcactactctggcagagtaagggtatgctggtttagtatctttataaaatatatataatgtataggtaaatcatagtcttaaatcatacctaaaatactgtatcatttaaaccaatatctattttaacaaaatgtttataactaaaaacagctgatgaaacactaaatccaaaggtatgacaaagaggactcagctctgtgttgcttaaagaacttttaaaaggcatgtgcccataacgtcattcgaggagagggaaggagccccccttctcctcctccttactatagaattcctgttgggggtgggccagaaattagcacttctaaatatttcagagaagtccaaagtgttaaaaaaagtcttttatgcaaaagaacgtctttctgcatcagtgaatagtaatgctcatcagaatttcctaatagcacaaaaaacaaagccaagtctatacatttgatcagatatcaaagtaatgggaggtggactattatgtcaaccttagtcagagctcctgctggcttcttcctatacactgttcaccaatttgagtaaagtggactttgtgagagaattatgtttgatggccaggacctcttttgggcatttcttcctaagtggaatacacaacagataagggagtaggggaggtaatacagggaagctactctttccagctcagaaggagttgatgaagcccatatatgcattcaagaagcccatgggatcctctagctgtggatagtggctaatgtggtcatccagaatcgacactgtggaccgcggcagcgttttcctagtggaagagaacagcacgcaggtgaacttgaggctggagcgggagggatgtaagccagtgggaagccccagtaaatgaccctgtggacacaccacactggaaggagccaccaaagagcttattcaccttctactctgaaattgtatcttaggcagataaacttgccaattccatttatacaaactagtttttaaatgttcataatccaacaaacaacaacttgaaaatataacacttttgcaacaattgtcaaagcaagatgactttcagctccttagagaaggatgaagcatcaaacaagtggatcacacagcaactcactgcccaagcagagataaccaaggatcttcccttaatcccaggaggagatgagacagggggtattttatttaaaattatatgcaagctgtttactactagcttgtatccagtaggccacaggaaggtatggaacattcttatgtgacataatcaagatttcatattctgataccttccaagtaagtacctagagagaatagcaaccaatgagaaggcacttttccacaatgagctcttctcaatctctccttgccatctgctcagcctaaaccaatgaattggctttacaatcagactaaaacaaacaaacactttgtaggtatatccactttcaacctttgactcacatgagagctttttgtacaccaaggaatatgtagcagtcatgacagtgaaaacagactatgtataaatcaagagaacgtataactgaatgtcttgatactacaattatgttagaataagattcctcaactcaatctttttattgtttcctggatgaacagccagcgaggttaaagacaatggctagagccaatagccctcaacaggcaattctgtttaccactgtcaggatgagatactaacaaaacatagacttctctcggggagactcacctgtacagctccaaaaactctggatagggatttacaggatccaatggcccatagataaaatgaactagaaaagagaaaaggaatgaaatacttaacagctctcacatctgttctactcccaccctaaaattaactcctctccgaaaagaaatgttttcttcttcctttttttattataataggcaaggtctctctctcccttgctcaggctggagtgcagtggtgcagtcatagctcactgtaacctcaaactcgttggcccaagcgatcctcccacctcagtgtcctcagtagctgagactacatacaggtgtgcaacaccacacttggctaacttttaaattatctgtagagaaaaatttttctcactatgttgcccagagtggtgccaaactcctgggctcaaccagtcctcccgcctcagcctcccaaaaagctaggattacagacgtgagcatcctcacccagcccaagaaaatattttctataaataattttttgtgtgatacaaaacctagcttgttttattaggtaacctctaaaaaactgctaggcacgtaccagttcattcattggacacatctcctcctacagacaaccatttggtccctcatccagctctcctgcaccctggaccaaatgggatatgcccaactttcaacatcctctaagtccaggatactatcattctttaagtctctcttcagttataacagacccttgacatttgaaatcaaccaataatttcctgagcactaatcactgtgtgtgaaacaccataatttttttttaaatctgtaagaatgaaaagacaaataagcacaaaccacctatagcctcttgattagtaatccaaacagccttctgtccgagcaattcagcatgtaatgtggcagtcactgacaatgcacaccacagaaatcagtaataccaactacctttacagtaatgtctcagctttttatatacttcactctacacacacacatcactgttccagatgtcatgagtacagttgccagtaaaataaaggatacccagaaaatttgaatttcaggtgaaaaatgatttttttttggtgtaagtaggtcccaaatattgtacaacatatacttaaatactaaaaaagcatttgttgtttatctaaaattcaaatttaactgggtatcttatatttttatttgctaaatctggtaaccctaattgtataaaggagttgcgattactttaaccctatagtccttcagtttcctatcaataatacaaaaatactcactggggatagttacagaggcaagagctcccacccagcgccttctgaacttcttcctctgattgatgtactgtaagagactgtaggacaggtaagtcagcatgtgcagaacaagaaacctttactgttacagggattcaagggcataacgagccacaaggaacacaagatacaatttcttaatccagaagcagtttagcattcctggaaatgtcccacttaatttatccatttctgttaacctctagagttaaccaccatgtagctctagtagtgattatgcctactatcaatataagaattagtgggtttgtgtatttattaagcagggaatgagatctaggaaggctgacagttggtttggattttatgtaactaaaaagcccaggtctgaggttccaatttaggctccaccactacctacctctctgactcaaacatataacacagatctttcaactcggtttcctcatttgttggtttgttttttaaaagacagggtctccctatgttacctaggctggagtgcagtggctagtcacaggtgcaatcatagctcactacagctataacttctgacctcaagagatcctcccaccccagcctcccaagtagctgggagtacaggcatgtgccaaaggacctggctagcctcctcatttttaaaataagaggattgtaacacatgatcttctgtgttgacatctacttctttttttttttctttttttttttttgagacggagtctcactctgtgcccaggctgaagtgcagtggcatgatctcagttcactgcaacctccgcttcctgggctcaagcaattcttgtgcctcagcctcctgagtagctggaattactggctaatttttgtatttttagtagacacggggtttcatcatgttggccaggctggtctctaaactcctgacctcatatgattcgcccaccttggcctcccaaagtgctcaaattacaggcgtgagccactgtgcccagccgacatctacttcaaaattctaagtgtagatgttgatgagcacaaagcttcatctgaccacagataaaatggagaggattcctctttctccagcgtaagacaccactgccacattttagaactcaaactcatgtattctactcattctgcctggcaactccaggacagttatttttgtgaacctcaaatatctcatcttacaaatagtatttactttttggaaaggaaaatataattttaaaagacagtcttaattgttcttcagttttttaatactaaaatgaaatattcagggatcctgttggggcttaggagagggtgggaggattggctccctctaacatacaatccccagcaaagccatcagtaaaaacactggaagctacactgagccaggtggctagaagtcagagtcttatcccaagtagttacagctatcaccacctctgggtcccttgtgaaagtgtctacattctcatttgaaccaaggcatgggaattctttgtacaagacagagaaagagaagtctgccctctcactccccgttgctgcagaaagataggcaaaaggaagagccttgtaccttgagggaggcactaggctactttcacaaccatgattcaatactttgaagcatttaatactaacaaagagtccagtttcactcttattttctatttctttcttcatatagaccatgactttttggtttgccccataggtcatcatcagccttcctgtgatagggaataagccagcaaggaacagaacaagcaatccccactctccacaaaaacacttctctggaaaccaaagcaaagggtaacttcttacctgtcaatgactaagttcccgtcattgttgcggatccctgcccacatgtcccacagctcactctcagagggccgagtatacggcccaaagactggggtgagactgaaagagtccaaaacgcaggaagataagtgtgaggagaactcagaatgttcaatatggctggaacctcagaggccatgcagtctgggccatgcagtctgacccataagtgatttatgaattccttctacttccctggcaagcggccaacacctttgctttaaaatatcaagccttaggatttggcccagaattgtaatggcagcaacttttcacgacattgctctaggccacaatctttgacagtgacacttaccctcgagagaatacaaagaagttcatcagtcgtgtgaggatgggtgacagcacacctccatctttgagtagctggaggggaataagtggaggtaaagctcaagaacccagaggaagatcctcaccggggcaaaaggttttatactaggaactaaatctttagccaaatctcctgctactgaatggtttggtacttggcattttgttttgcctacccgcattcttctctcaaggaagacaaatctatttctaattccatctaagattacttttctacaattcactaaatccct

SEQ ID NO: 94821 - DNA, 26343 bp, Homo sapiens
gggttcatctgccctgggctggccctgcccttccttggtggtgacagatggcaggaagcccctgccccattggttgtctccctactccctgcctcatcctgggtgtccaaggcccagtgtccactggttctgatgggatttgaactccactctctcctgggaggctgcctcctcttccttctctatcccctgggaaaaggctgacccagcccttgggcccaggacacagaggctcctctaacctggccctaccctcgggtggggtatttactgctgggttggcccaaatggtgtgtctttctgggggtggtgacctggcaggagtgatgcgtcagtcacttcctccaggcagatggagatgatccttgacaggtctggtggctggttcggggtctactgaaggctgtcttgatcaggaaactgaagactctctgcttttgccacagcagttcctgcagcttccttgaggtgagcccagggcaggagcctccccacagccccagggatcacctgaatctgcagccactctttgggcctctgttttcctgttcataccctggttcctttgcccctcagcagagtggctgaggacctaccctacttcctccaagcccagaggggaagccggggaagcctcacagcccagaggtgtcctaaggggccttttccttagaagggccatggagcctggcccagagctcacgctcacggttcacacagcttcaccttgtaaggaacaaaatgaaacaaaaaatctcacacacccaggtgagaacaggaacatctggctttgggggactggtgggacccagcgtctaggctcatctaggcccgtctgccctctccagcctctgtgggggaagaggcagtacttcctcgttccagaccctctggccgggagcccaggtcttgggctatggagcagcccctgtgtgcaggcccccacctgcccgccactctcacaggcctctcctctccagaagcccctcccccagacaaaagcctagagggagagaggccggagtccccaggcctggcttgcagcctggctctgcccacgacccgctgcggagtcttgggcaagttctattctccctccgacccttgatcttggtttctttgaattgggagctgcggcaggtgaggggtctcttagagctctttccagaataccatggaagggaaaaatcctaacggctcaaagaagtttgctaagggtcaggaagcaggggatacacgggcctctcctacccgtgtaggaggcaggaagggtcaaagcagaggccagctctcccagactgtgggggaagggctgggggggggaggcccacgaggactggccacagccaccatgcaggaacgtcctggtgtggcctggcctggctctcacagacccaaggcttccgtgtagaatatgtctgtggttattaaacagacaggcctagtggaaacaaccctgccacctgcgtgttctctgagcctcagtttcttcctctggaaagtgggttaaccgcagtacccaactcataggccaccataaggattcaatgaggtgtgtttgcaaagtgcctggcagagagtaagctgctctgtttctcatccttgttattactgttattgagatggttgctgtcgttcttggggcccaagaagggaagccagccctgaagcaaatcctgctggagtgagcctgggcccagagacatggcaggcgggacaggcagctccaggcccagatgctgtccaggagcagggccaaagcaccctctcacttctgggtgtttgattcgggtcactggcctgggttagtgagaagggctggggacaggatgtttccctccctggtgcagcccccagcgccctgggtggccttgggctagaggctctgagtcctcagaagtcaagttcatcaggcctcctgcctgtctgaccgccctgcccccactccatggttttccatcctgtcacttgtagggcggggtcggcgacctaggagggccatgggtggagcttggtctgaggctcaggaagcggatggaggtgggcaccagggacaggaagcctccaatccacccttgcgggccaccccctccctgcctggtgggcagtgcctttatggcctaaaggctggaccctgggggactactgctgacttttgttttaattggaaacaaactggtattaacttcccatataagtacagtgcaaacaacctagaagtttataaagggaaaagtgaaggtagcacccaaccgtcctgccccaccttcactttaacagggaatcaactgctggtagtccttgtgggtccttccagacactttatgtgtgcatttacaaatattatgcatagttatgtatttttaaaaggcaagcaaaggccgggtgcggtggctgatgcctgtaatcccagcactttaggaggccgaggcgggcggatcacaaggtcaggagatggagaccatcctggctaacacagtgaaaccccatctctactaaaaatacaaaaaattagccgggcatggtggcaggcacctgtagtcccagctactcgggaggctgaggcggaagaatggcgtgaacccgggaggcagagcttgcagtgagccgagatcgtgccactgcactccagcctgggcaacagagtaagactccatctccaaaaaaaaaaaaaaaaaaaaaagcaagcaaaaaattatgctatatattgcagtttgtttttagaaattaaaaaaatacatttttaaatatataaaaatatttaaatatatataaaaattgtgtgggctgggtgcggtgactcatgcctgtaatcctagcactttgggaggccaaggggggtggatcatttgaggtcaggagtttgagaccagcctgaccaacatggtgaaacctcgtttctactaaaaatacaaaattagccgagcgtggtagcacacgcctgtagtcccagctactcaggaggctgaagcaggagaatcacttgaacccaggaggcagaggttgcagtgagccgagatcgcgccattgcactccagcctgggcaacacagtgaaagtctgtctcaaaataataataataataataataataatgtgaccattatcttaaaatttttggaaaaatacagttaaaccaaaagaaaaaaagcagccccagatcccatcattccagaaataaccactattaacactaaacactggccaggcacagtgcctcacacctgtaatcccagcactttggaaggctgaagcaggcggatcacctaggtcgagagttcgagaccagcctggccagcatggcaaaaccccatctctactaaaaatacaaaaaaattagctgggcgtggtggcccgcgcctgtagtcccagctactcggcaggctgaggcaggagaatcacttgaacccaggaggcggagcttgcagtgagctgagattgaaccgttgcactccagcctgggtgacagagcgagactttatctcaataaaaaacaaaaaaccaaaaacactaatcaccgtgataggcaaaaggcatttccttatttatttttttgcatcttttaaaatattgtgatatggtgtcatatttgaaagtgataaagcataaaaatatcatgaacctcttgaactcagtccccacttaaagaccagttactgtaacttgcatacctctttgattcctcccccattgttcttgacttttgcttttatttttatttatttatttttgagatggagtctcgcactgtcaccaggctggagtgcagcggcacgatctcggtcactgcaacctccacatcctagggtccagcgattctcctgcctcaacctccagggtagctaggactacaggcatgcaccaccacacctggctaattttgtatttttttagtagagactgggcttcaccatgttggtctggcttgtctcaaactcctgacctcaggtgatccgcctgccttggcctcccaaagtgctgggattacagggctgagccaccgcacccggtctatttttattttattttattttattttatttttttgagacggagtctctctctgtcgcccaggctggagtgcagtggcacgatctgggctcactgcaacctctgcctcccgcctctcaggttcaagcgattctcctgccttagctttccaagtagctgggattaagtagcgtgttccaagtaagcatgtgccaccacgcctggctaatttatttgtatttttagtagagacggggtttcaccatgttagccaggctggtctcgaactcctgacctcaagtgatccgcctgcctcccctcccaaagtgctgggattacaggcatgagccaccgcgcccggcccctattgtgtagtttttacttatcttccaagacctctttttcactccttgtgtctctaagattcatccatgtaattgtagatcattgattttaccctgttacatattattccacagtgtgaaccttccattgtataaaacaattccattctcttgttgatggatatttggggtttttccccatagcgatgctgctatgaacctccttgggcacatctgcaagaatttctccagggcatgtgtactcagctgtggaatgcaaatgtttacaactttgtttccaagacagtttttttttttttttttttttttttttttgatagggagtttagcccttgttgcccaggctggaggctggagtgcaatggcatgatctcggctcactgcaatctctgcctcctgggttcaagtgattctcctgcctcagcctcccaagtagctgggattacatgtgcccgccacaacgcctcgctaatttgtgtatttttagtagagactggaggcggggtggggtggggggttgggggagggggtttcaccatgtggaccaggctggtctctaactcctgacctctggtgatccacccacctcagcctcccaaagtgctgggattacagccactgggcctggctggcagttctttaacttgctttcttcacgtaaatatcctataaatatcctggccatcctttcctgccaagacatactgacctgcatccttctttttttttttttttttttttttttttgagacggagtttcgctcttgttgcccaggctggagtgcaatggcgtgatctcagctcaccgcaacctctgcctcccaggttcaagcgattctcctgcctcagcctcccgagtagctgggattacaggcatgtgccaccacgccaggctaattttgtatctttagtagagacggggtttctccatgttggcctggctggtctcaaactcctgacctcaggtgatgcacctgcctcgacctcccaaagtgttgagattacaggcgtgagcgaaccaccgcgcctggcccgcatccttcattttaacagcctcctcgtgcacttcggcaggctgtgccttaacttaagcagtcccctagcaatggctacttaagttatttttccctatcacgtagagtgatgtcatggatgccctggtaattacaagaaggaacatcttaagttttcccagctctgtgaagttattcttctccctattttccagaggcagggagaagggaagttatgcgctaaggctgcgcagctggcgaatggcagaggttaacttgaatctgagggtgaaccctaagtttgcccaggtgactacagggtgcaaggcagggagctggaggccctctgtggggagcccaggtagaaactccactgagtgcaagcacagcgtgctccggaactcagtttccccatccggggtcatggtggcaataaagagagctagaagtgggcccgatccacactgcagggagccgaaaggctgttgtattttggtggtcaccccgggctgcccagtggggtgaccgaggcgctcaccaggcggcggcacccgggtccgcctcccctttcccttccccgcccgcgccgcccgtgggcggagccacccgcggccccgaggctccgcccacctcccaggcctgggccgggccgtgacggcggcgctaggacccggcgggccgcgggtgcggcgaggcctgggcggcctgaggagcgcggaccccggcgctcggctcccggcgccatgtgagggggctcgggggccgcggggggccgggcgctccccgccggaggtgagcaggcgccgcgcgggagcaggccgcgggggcgggggcggaggcgggggctggggcggagggcgccgggagaggagattgctaatcgccggggatggggatggatgcgggtcccccggcggcacccctagaccccttcccccttggtagccgcgccccgaggttccggtcctcgcgcccagggtctgtcgcggggtccgctgggcctcttgccgccgactaccccgtcagcggtcctgcctctcttttcttcccagctggggttagggctccggacccccggagtgcaggagttggggagggggatgaggcgaggcgcgcgctgggtgagccccccaccaggtggacgcacgggctcagcgtcccgcatcgtcttggatttaggagcccccctcccccttctccctggagccctcctcccacgcgggttcgtgggggcgtcccgatctgcgggaggactcccggggctggaagaaggaaagcccccaaacagagggcagggtgtggcccccaccctcggctcccgctcagctcgcctgcacgtccagccttgggctgagtccatgctcctggcccagcgctcggggctgccgcctccccagcgtgagcaagccgctccccaacaggccggcacccctagacccccgccctggtgcckgtgccgagccacgtcctgggcacacactccatggcctctgacccgttccagccgagagggatcctccagggagacgaagtcaggctcagccctgggcagctccctgtaaacaaggctctggagccggctctgggcggccccgcaaggcgctttgcctctctgaacctcagtytccttatctgtaaaatgggcaacaagagctcctaccatgcattgcctggattcagtgcgtgggtgatgcttagaacgcattcccacacattccttgatattccgggaaagtcgctgcactggggtcaggggaggagtgyttcactgacacactggagaggcgggccttgaacagtgattaaccacaagactaacagctgttggcattgtgggagcactttcttttctttctttctttmttttattttattttatttatttatttttgtttttgtttttgagacggagtctcgctctgtygccaggctggagtgcagtggcaccatctcggttcactgcaacctccgcctcccgggttcaagcgattctcctgcctcagcctccggagtagctgggacaacaggcgcacgccaccacgcccagctaatttttgtatttttagtagagacggggtttcaccatattggccaggctggtctggatctcttcacctagtgatctgcccacctcggcctcccaaagggctgggattacagacgtgagccaccgcgcccggccaatgtgggagcactttcaagccccgcgtgtcccttgccacatctgcttgaatccttccaacaaccccttgagttaccgactcttattgttcccatttcacagatgaggaaactgaggctcagagaggtcacatggcttgctcgaggccccccagccagtragtggtgaaaccgggattcgcactggcagctgacatgctgtactgaccatggccttctcagagcaggattgtgacggggcggacsagggggacggtggtcctggctgagggcacagctcgggcaaaggtgggaaagtgggcggygggcaggggrcatccgcaggaaagggtggccacgcgtagtaagatataggcggctggacccctgggcgccttgaatgccaaggtctcagggcagatggggccaccccaggattctggactcctgtcttttgctctaacggtctgtgagggcaagaacaagccgctccctgcttctgatgaggccccgttttctgctctgtaccgcagggcctggactagataggagtctgggcctccctgactggcagtgaggggcagccgctggagaaacccgaagccgagctccggatgaggggcgctcccacggggagggggcggggttggagagggggcggggccatgatctaaccaatcaggagcgaggtgtgtgtgccaagcctcctctggcccgaggttctctggctattcctggtggccgtgtaggagtaaacagcggctaggtcaaagggctcagagaatacaggaactgagaggcccctggagcaggggacggagctgaggagggccccctaagccccagtttcttccctctgcactcctgcccgccctgcccccggcctgtctgctggaggtaggctggacacagtacattttccctttcacaggtggggaaccctggaaaggagctgggttttggttgtgggagaggaagagattggggtgtgcggagcagagctgggcyggcctcctcactgccaggtcttccaaaggcccccccagccaccccctgagactgtgattacagccatttgacagatgaggagtcagccctggcagagactgtcgagcctggactagaaccgagcctctcagacttgagtctgtgcccttagcccccgagagatcctgcttgttaatgcactaattcattcagcgatattcctgaatctccgtggctgtggaggcacagggaaactgagtgaggacctgggtgggctgtatcccgcaggcagctcttagcctggggggatgggaggacgtaggggagttcstggtccatgccaggcttggaggatgagtgggagtcaggaggccataggagggagggcgttccaggccaacctgagagagagccagagcagaggagttcgggggcctacaagcggtgttgttttattctgacaccacagggacccaaggcagggtttagagcagggtgtgaatggggctcctactgcgtggaggtcaggtcctccagcaggggagccagctttggccctgccagctgccttggtgtggraaggcccctgcttagggaggagaatgggcagggctctgccgcyaccaggctgtgtgacctcaggcagattcctggcctttctggccctcagtgtctccgtctgcaaaagggatacagtcctgagccttaaagttctgggtgcatagaagaactagtgcggggcagagaaggtgtagcctttggcttgctggacccaaaggaccgaagccataataaccctttctggtggcttgcaggtgtgaacccacatccctgcccccagggccacctgcaggacgccgacacctacccctcagcagacgccggagagaaatgagtagcaacaaagtaagtctgccttcatttcttaaccccattgagcctctcacttccctccatggaacgrgttcctttggacctgtctcagaccccagccaccacgagtctcttcttccccgcaagaagctgcccatgcctgggaggcccagatttaagccctggtttggccactgatcttctgagtggcttagggcaagctcctgcctgttcccgggcccagggtcagctctgccttcccaggcctgacggtctgtctgtgatggtcaaggactagccgaggtgactgtggagtgctgtgcaggagagaggggtgggcaggtggaggtgagcgggaaatggggcaagggtgcactgatcagagtcaaaggtgatacagcccgagcatgaccctgagaatgtcaggattccccatcattctttcattcattcattctttcctaagcacttactacatgactggccctgyatgccccttccctaggatccactgcagccttggtggagcctgargtttggaagtgggatggggtggttgtattaatttgagtttaatcaggaaaaagaaactacacagtgattaaacggaaaagtttaatgcaaaaaattattgactataataggacactagagtaacaagggattggaattctgaggaatacaggaatagcagatattaatataaggagcacccctgccyccataaaggctgagatctgggccttgctgaagaaggcccagctatggcccactggatggctccagtacagaactggcctggggaggggaagccgccagcctccaggtgctgcaggtggttgagtgtactgtaggagctggacttcggagaagctgtgatcacagcgggagccagaagcaataagcctgacttgctggcactgctggcctctgggcagtgggtaagatgcccttactggagaggccgtgtgcactgaaggagcctccctagcaagcctaccagaaccaagaagcaaatgcttttcctcctgcagtgtctgtccagcaccctctactcacaaagtttaatatgcagctaactgacaagggaaaatatttaaagggcccagatccatttccacagagcagacaaaaaggataaatttggagctagaggcaatacattggagagttactgttgggggaagacctagaccctctcactcagatgtcccacctgtctctagacatcctcttagcagcagctatagggaatcctgacatattcaatccagtccagcaaaccctcccggagaaccttccatgttccaggccctgccctgggatctaggatacagtggggagcaaggctgacctagtcccagagctcacggtctaattggagggatgggagtttgaatgcagtatgatcagtgttgtgatggggggactgaggtggctgaaggaggccttcctggaggaagtagtgcctgacctggtctgcaacaaaaagcaggagttaaccaggcatggtaggtggcaaggaggtggggcgctgagcctgcccggcagctgggccctcactgacctctcctctctccaggagcagcggtcagcagtrttcgtgatcctctttgccctcatcaccatcctcatcctctacagctccaacagtgccaatgaggtcttccattacggctccctgcggggccgtagccgccgacctgtcaacctcaagaagtggagcatcactgacggctatgtccccattctcggcaacaaggtagcgcagctgctttggggagctcctccctactgcccagcatcaccactccctccacctgttctttcctaaaggaaaggtggaccctgagagtcaaggccctgcctccggtgatttcatcttgctgcttgctgtgtgaccttggataagtgygctgcccctgtctgggcctcagttctctccaagtccccacccttattgctaatatcctaccatctcctgaatcagaatccttttgaaaatgtgtttctgttttcactgctctctgtctctgctggggagcccacacaggcttgggagcagagcactgggacatttgacaacacaaaagcagtaataataccggctgccttttatcaagtgcgtgtgtgtgccaggccctttgatcaccagtaatcctcagacaagccctgtgagggcagcattattatcttccttggtgagatggagtaaccaaggctccgagaggtgaagtcacatgtctaaggccacacagtgagggaaggaagaagatggtattttcctacccsctgctaagatgcagctgcacagagaggccaaagtcattcctggggacttctgttggccttgggtagccatgaaattcagattgtatttctgaggttcaccctgtagtacctctttctccttcctcactgaccctcctatattttcttcagggccttcgcatgcagagtgtagagcccgggctctggacacaccctcactaggaaagggcacattagcaggtgtctggagacaggttaacacctaagtgagtctttctctaccctaagaacccttgaaagcggaataaaaatgggacagcttgagtgtgggtgatgtggaaaggagagacagagcctggcttgcagtgcttccagcatcacaggggaagccaaaaaaactagcactcagaaaagtgggagtgccagtcgaggtacgtgggatgtgttgctggatcttggagtaagggctcagggaaggctgccttggggagggtggtatttgagcttagccttaaagggtgaatgggaattccgtgggcaaaaaatagaccccagagagtatgtggttccaacccattcatttcagccatggaaaaacaagcccagagtggctttcacaccttccttaataacaaggtggttcttgtttctgggtgctgtggaaatgtcatgggtgctttttggaagatgtcttctttggagagctgggaatctgtggtcacatagactttgtgacctgctgttctcccacttgttgactctgccccaactgaatggccttcttttggttttcagtgtaccacctttatttccacattggagcctttgtgctggctgtttctcctgccttgaatatgtttccctaggtggtccttcttcatccttcacatctcagctcagagagacgtctctgttacagccrgacagcttcttgcctgctgcccaggaaaagccaatacactgagactgcgggtgttgcagcagagaaagggtttaacaatcgcagggccagccaaatgaggaggcgtgggatagttctcaaatctgcctcccccagaatttggaagccagggtttttaaaggatagtttggcaggcagggggactagagaatggttggggatgaaatcataggggtgttgaaactgtcttcacctgccgagtcagttcctgggtgggggccatgggtcactggtctggttggcatccattgatctaccagattgcaaggtctgaaaaatatctcagacactcaggttttacaataatgatgttatctatgttaaaaacaacgatgatgttatctatattttaaaaagcaamctaagaaacaatgrctggttataattcaactatagctacatcttagcagaaaagcaagctaagagataatgactggttatggtttatgcctacagcttgacagaaaggtgtgcggggggtgagacaatcaattcttagtgaccaccttctatcgaactgactatatgcaggcaatcatgcatctacgaagagaaggacaaaggaaaaggaaaataagtaaaacaaatgattttactacacctgtatcctagcagagtccaggcctctgtctcagttgttaccttgtggccttttattaactttacaaagtcagttttagtccccaaacaaggtggagttcagttttgggaagcggctgttatcatctttgcttcagagttaaactataaagtaaattcctctcatagttagcttagcctatggacaggaatgagcaagggtggttagactgtgaggtcagaaacaggatggagtcagttatgttagattcctctcactagattcttttttttgttttgttttgttttttgagatggagtttcgcttttgttgcccaggctggagtgcaatggctcgatctcgggtcaccgcaacatctgcctccggggttcaagcgattctcctgcctcagcctcccgagtaactgggattacaggcatgcgccaccacaccttgctaattttgtatttttcatagagatggggtttctccatgttggtcaggctggtctcgaactcctgagctcaggtgatccgcccacctcagcctcccaaagtgctgggattacaggcgtgagccatcgcacctggacttccaggccaccactcctaaagtgccctggctgcagtcgctctttggtcacttgcccctgtttcccctcccttcccctcccctccctctcccccctctctgtcccctccccctgtcttcttcccctccccctccccctccccttctccctctcctctcctttcctttcctttttcccctttcctttcctttttcttttccttcttctttcctttccttgtttcttttctttctttcttcttacctttctttatttcgacagagtcttgctctgtcatctaggcttgaatgcagtggcacgatctaggttcactgcaacctctgcctccaggttcgagcaattcttgtgccttagtctcccgagtagctgtgattacaggcacgcgccaccacgcctggctaatttttgtattttttggtagagatgggatttcaccatattggccaggctggtctcgaacttctgacctcaggtgatccgcctgcctcggcctcccaaagtgctgggattacaggcatgagctacaatgcttagccatttgccactattttctttttttttcctggcatgtattatgtgcattcttatctgtctccccacctgtttcttgaaggcagaagcctggtctgttttgctccttgctctgccccaggacttggccattaaccagcttgctatcaatgtgtgctgaatgtggaatgaatgggctcagtttccctgtctttaaaatgggcataacaattcctgggtcctggaggcctggatgtatggagcacagggccagcacagagtggcygtgataatgttgactttccttatccaccagacactgccctctcggtgccaccagtgtgtgattgtcagcagctccagccacctgctgggcaccaagctgggccctgagatygagcgggctgagtgtacaatccgcatgartgatgcacccaccactggctactcagctgatgtgggcaacaagaccacctaccgcgtcgtggcccattccagtgtgttccgygtgctgaggaggccccaggagtttgtcaaccggacccctgaaaccgtgttcatcttctggggrcccccgagcaagatgcagaagccccagggcagcctcgtgcgtgtgatccagcgagcgggcctggtgttccccaacatggaagcatatgccgtctctcccggccgcatgcggcaatttgacgacctcttccggggtgagacgggcaaggacaggtaccagcctcctgcctgccccctctggccagcactgtgctccttctcagcatgccccatccagagggcctgttgctcccagcatgcactgctctgaggggtagtcaagtcccgcygtcctctggttgggcctcctaggagagttctcttcatgtccagctgttcacatgggtcctttccagcatgctctgcatggcctggtttgtccaagagggctttctcctggcataccttgctgtgagggcacaagggctcccacccagcatgctctgctctgaggttgcacagtcagtcctagcatctttctgagagaagctccccatagtgtacccaatgtaaagtcttgactgttcccagcatgtcttgccttaagcacacagttgctcctggcatgctctgctccagcgatgcatcactcccagcatgccctgctgtgactaatctccctaggaaagctaggccagtgctgcccaatagaaatctatgtgagccacatatgtcatttattttcatagtaatcgcactttaaaattagtgaatagctgtgtgcggtggcttgtacctgtagtcctagctactcaggaggctgaggcaggaggatgacttgagcccgggaggttgaggctgcagtgagccaggatggtgccactgcactccagcctgggtgacagaatgagaytacatcttacatctccttaagaaaaaaagtagtaaaagcaactttaatatatttttaacccaatatgttcaacatatagctcctgtacatattttgttagatttatacctaaatatttaaaaaattttggagctattataaatggcattaacttcttttgttcccaattgttaattgctaatatatagaaatggcatatagaaattgatttctgtggctgggagcggtagcttatgcctgtaatcccagtactttgggaggccgaagtggacggatcacgaggtcaggagtttgagaccagcctggccagcatggtgaaaccccgtctctagtaaagatacaaaaaattagctgggcgtggtggtgcgcacctataatcccggctacttgggaggctgaggcaagagaattgcttgaaccggggaggtggaggtttcagtgagctgacatcctgccattgcactccagcctaggccacaaggcgagactccatctcaagaaaaaaaaaaaaaagaaaaaaaagagaaattgatttttgtgtgttgatcctgtatcctgtaaccttgctaaacttacttattggttctaggagattttttttttttttttttgagagggagtcttgctctgttgcccaggctggagtgcagtggtgtgatcttggctcactgcacctccacctcctgggttcaagtgattctgctgcctcagcctcccaagtagctgggaccacaggcttgcgccacacacccagctaatttatgtatttttggtagagacagggtttcaccgtgttggccaggctggtctcaaactcctgacctcaggcgatccacctgccttggcctcccaaagtgccgggattacaggcgtgagccaccgtgcccagcctgttctaggagatttttgtagactctttgggattttccatgcagataatcatgtgacatgcaaataaggacaattttatttcttcctttctaatctgtatgcctatttcttctttttgctttattgcactggctaggattttcagtacaatgttcaattgtattggaaatggtgagagtggacttccttgccttggtcctagtcttagggagaaagtattcagtgtttgtttgtttgtttgtttgtttgtttgtttgtttgttttgagatggagtcttgccctgtcacccaggctggagtgcagtggcacaatctcagctcactgcaacctccgcctcccaagttcaagcgattctcctgcctcagcctcccgagcagctggaatcacaggcacgtgccaccacgccagctaatttttgtatttttagtagagagggggtttcaccatgttggccaggctggtctcaatctcttgacttcgtgatctgcccgccttggcctcccaaagtgctgggattacaggcatgagccactgcgcccggcctattttttttttttttttttttggagaaggagtctcactctgttgcccaggctagagtgtagtggtgcgatctcggctcactgcaacttccacctcctgggttcaagcaattctcctgcctcagtctcccatgtagctgggactacaggcacgtgccaccatgcctggctaatttttgtatttttagtagagacagggtttcgccacgttggccaggctggtctccaattcctgacctcaggtgatccgcccacctcagcctcccaaagtgccaggattacaggcatgagccactgcacctggctaagttttaattttttgtagagatgaggtctcactatgttccccaggctggtcttgaagtcctgggattacaggtatgaaccaccacgcctggcctcccttcttttttccatactacctaagaaatgcagtgtgtatttacacgtacagcccatctcaatcacacatggctggtggccactgtagtgtgagcacagctcttggttctgggctactccttcaggccttgctctgaactgcagtcactccagcatgaacttatctgattagtctccccttaggagtttgcttctagcatgggcacaactgtttttagcatgctctgcaatcatagtcactcagcctgcccaactgtgacccagctccccaggagacagttcatttctagcatgccctgttcccattcttcccctcaaaggagctccctccacacccctcacctctgcctggacagccctctgccacatgccatgctcccatcagcgaggctggacttggggtaaccaaagtgggagtggggccctgatgagtggatgggaggagttccagggaactccacgtgggtgaccctgggtcacctgctcccatctctccctgcatgtgccctcatcgtgacccctctccatccccagggagaagtctcattcgtggttgagcacaggctggtttaccatggtgatcgcggtggagttgtgtgaccacgtgcatgtctatggcatggtcccccccaactactgcaggtgagccctccttgccagcrccctcccaggacaacacccaggcactggccgcaggatggagctctaggggctggaaaccttggctgaaggtgcctttgagggcctctgcttcattgttttcaaactgttcttcagagatctaggcttcttctccttcctcaggggcctccactccaagctccgccagagtttatttattaataataactattagtagtagcatcatatgaaaagcccactaggggacagctatactttactgaatactgaccaggtaccaagcatggccacatgtagtctctcacttactcctcacagcaaccttacgggataagaactgttattcttcccattaattaaatgagaaaaactgaggagtatgttttatgagtagccaaaggtcctccaaacagtaggaagaggggccaggctccagtgctcacagccctcaccactgctccacactgccgccttcttagggaaaggaaaaagtgccactgcatttaaaaaaaaaaaaaaaaattggtggttacacacctagtctaccctgcacccattttatggatggggaaaccgaggccccaggaggcatggggatttctcctattgaggtcctatrgtaagcgaggggctgaaagggcaaggaccctgcyagcgctcaccttgccctgatgacgcccgtctgctctgtcccagccagcggccccgcctccagcgcatgccctaccactactacgagcccaaggggccggacgaatgtgtcacctacatccagaatgagcacagtcgcaagggcaaccaccaccgcttcatcaccgagaaaagggtcttctcatcgtgggcccagctgtatggcatcaccttctcccacccctcctggacctaggccacccagcctgtgggacctcaggagggtcagaggagaagcagcctccgcccagccgctaggccagggaccatcttctggccaatcaaggcttgctggagtgtctcccagccaatcagggccttgaggaggatgtatcctccagccaatcagggcctggggaatctgttggcgaatcagggatttgggagtctatgyggttaatcaggggtgtctttcttgtgcagtcagggtctgcgcacagtcaatcagggtagagggggtatttctgagtcaatctgaggctaaggacatgtcctttcccatgaggccttggttcagagccccaggaatggaccccccaatcactccccactctsctgggataatggggtcctgtcccaaggagctgggaacttggtgttgccccctcaatttccagcaccagaaagagagattgtgtgggggtagaagctgtctggaggcccggccagagaatttgtggggttgtggaggttgtgggggcggtggggaggtcccagaggtgggaggcyggcatccaggtcttggctctgccctgagaccttggacaaacccttccccctctctgggcacccttctgcccacaccagtttccagtgcggagtctgagaccctttccacctcccctacaagtgccctcgggtctgtcctccccgtctggaccctcccagccactatcccttgctggaaggctcagctctttggggggtctggggtgacctccccacctcctggaaaactttagggtatttttgcgcaaactccttcagggttgggggactctgaaggaaacgggacaaaaccttaagctgttttcttagcccctcagccagctgccattagcttggctcttaaaggrccaggcctccttttctgccctctagcagggaggttttccaactgttggaggcgcctttggggctgcccctttgtctggagtcactgggggcttccgagggtctccctcgaccctctgtcgtcctgggatggctgtcgggagctgtatcacctgggttctgtcccctggctctgtatcaggcactttattaaagctgggcctcagtggggtgtgtttgtctcctgctcttctggagcctggaaggaaagggcttcaggaggaggctgtgaggctggarggaccaratggaggaggccagcagctagccattgcacactggggtgatgggtgggggcggtgactgccccagacttggttttgtaatgatttgtacaggaataaacacacctacgctccggcttcgtgtcctgtgtcgcctgggtcgagcacagccttctggtccagcgctgcatgcggcctcaggaccacgtcttccggttgggggctcccagtaaagcgatcctcagcttcttcagcagccagtggccagtgaggtgtgtatttttgcatcttgagtggagacctgggggctctggggatggtgggggcgtgcggagccaggcccgtctggcttttcctgtccccacctcaccctgcctgtgtgaccacgggcaagtcacttcgcctctgagagccccaattccttcaagggcaaaaggggaccagacactgccctcaaggagctcaggttccaggaggggaggagccccgtggtacactaggaagaattcccacagaagctgggaaaagagtttgagcagtgaatgcagaaggggtgaggggaaagacatcccaggccacagagccagaggtctctcagctccttaagcgtctggggacctgatggctgggagctgagatttcctgccaaacccagcaggagggagcctggcggggctgcaacgctggcaggagtgtggtgagcggtggttgccaccagcctctctgcaaaagggctgtgtactccaggttggcaggaggcacggggtctgtgactccagagattacaaactgtttgggcagataagatgccctcggaggcgaggcctaacaaagagtgactgtgtaagacatgggcaggcagcctgctgggatctcccagggtccccgagctgctggggacaggaaagagaacccttctgggcactgggccagccaggatggtggtgaccggggctgagaggcatgaatggcaccttgcatctgcctctcaattcacgtagccaataagcagccgcatgccatgcactgtattaggcacagttgatgagggtgagagtgtctggtgggaggagtggcccacagagaagcctcatggtgggatccccagcttcacccagtaggcagtgaggctacagcaggagggagcagtgagagatgagactgcccggggccagatggcacaaggcaaggccataaatgtcagtctgaggggggcaagagccttgatctttcttgcgtagagaagtcaaatgggaccacagcaggatgggcaggaggctgacaggtggcatggcgcagggcccaggggccgccagacacagtaatggtggcagtggggctggggggctggaaagattgggactccgtgtaaagtctacatggggagcagaaagccgtgcgtgggcatggggatatgggaatatggcacccatccaaccccatgcaaaggcttctgggaacctgggtccaggcagaggtttttttttttttttgagacagagtctcactctgtcacccaggctgcagtgcagtggtgcagtctaggctcactgcaacctctccctcatgggttcaagcgattctcctgcctcagcctcctgagtagtcgggattacaggcgcataccaccatgcccagctaatttttgtatttttagtagagacagggtttcaccatgttggtcaggctggtctcgaactcctgacctcatgatccacccaccttggcctcacaaagtgctgggatttcaggtgtgaaggtgtgagccaccgcatctggccttccttgtggtttttttgtttgtttgttttgttttgtttttttgagatggagtctcactctgtcacccaggctggagtgcagtggtgcaatctcggctcattgcaacccctgcctcccctcaggagtgtgaaccagggtgatctcccactcctgacctcaagggttcaagtgattctcgtgcctcagcctcccgagtagctgggactacaggcacttgccaccatgtctggctaatttttgtatttttagtagagacagggtttcagcatgttgcccaggttggtcttgaactcctggcctcaagtgatccacccaccttggcctcccaaagtgctgggattacaggcgtgagccaccacacccagccccagcagaggtttcgaggtagaatttctcccagaatgctgtggctcttctgtctgtccactggggagggggaggtcagtaagaggtgcatcaggagggggtcggttccccagggggatgttcagtggagcatcaggaggtgggactctggtgggcctagtccccaactcctcaatctctcaccccctcagtgggacccagtggagactggcccactcattgctaaagtgagcttcctgaagcccctctcatcacagccctctgccctgaaaccttcactggctccccattcactggccagctccaaacttacagacttgtctggcgtttgaggccttcctgcacctccatctgcacctgcacccctctcccgggtgccttagtgaggctggtgcttcctcatctctgtgcagagggccttacccccacccctccttgggagggggcgcctcccaccagctgcaaacctatgagtggcagccgctcctctctgggcttcccgtccagctgtttcctgcatccatttgtttcctgcggatgctcagtggttcccactgagctcagccccaccagccaggctccctggggcaatccccaatcccactacgtgctgactggtgggtccacatgtgaacttcagagtgaggaggccctggcacatctcctgcaaccgccatgccagcttgttttcaagccttggaatttttttcccttcccttcccttcccttcttttcttcccttcttctcttccccccccctcttcccttcccttccctccttaaacatccattcttcccttcctttcttcccttcccttctttccttcttcccttcccttcttctcttccttttttcccttcccctcttccctccctctcttccctccccctcttcccccttccctcccccctttacttcccttccctcgccctcttcccttccctttccttcccttcccttacttcccttcccttctttccttcccttggtcccttcccctcttcccttccctctagccttcccttcttcccttcttcccttccccttcttccccaacccttcttcccctcccccggggccctaccatcgcctatagaccaatgcgaagggtgcgttacattaagtagaacgggtatactgtccatacctttttagacggtgtcttgctctgtcactcagactggagtgcagtggcatgatctgagcttactgtaacctctgccccctggttcaagcaactaggattacaggcgtgcaccaccacacccagctaatttttatatttttagtagaggtgggccagggtgatctcacactcctgacctcaagtgagctgcccgcctcggcctcccaaagtgctgggattacaagcatgagccactgcgcctggctggaattttttctttaaccaaaatattttcattttaattttgttcctaaatgtcacaagctacaaaatattttaaaaaaattttttaattagtttcatttttatatgtttctgtttttagattttttttatcataaaacaaataatacaaatgatataagatagaaagggagggtattgccgagtcctattagggtataatcttccagatctttcctccatgcaattttttctttttctgagacaaggtcatgctctgtggctcaggctggagtacactggtgtgatcacggtttactgtagccttgatctcctggacttgagcaatcctcccacctcagcctcccaagtagctgggactataggcaggcaccaccatacttggataattaaaacttttttttttttttttgtagagacagggtcttgctatgttgcccaggctggtctcaaactcctgggctcaagtgatcctcctgcctcagcctcccaaagtgctgggattacagatgtgagccacggcgcccaggcttcatgcaattcttttttctttcactattccagtttttctctccctttcttttttttctttccttaggttatacctgggaaataaaattctgaaacgttaatattccagaattggtagaaaatccatagttcacatgcaaataaaacggatacttaaaattgattttttaattttaaaaatttatttattttattttaaaaattgtggtaaaaaacgtgtaacataaaattaatcatcttaacaattttcacactctgttttggataacagagctccaaaactttgtcattttgcagatctgagactctgtacccattaaacagcaattcttccttcctcattctccccagctcctggcaaccaccattctacttttttttctatgagtttgactcctttagatacttcaatgtaaaggaatcatacagtatttgcctttttgtgatgggcttatttcacttacataatgtccccaagatttatccatgttaaagttattttttaatatatataaagtaatagacgcttgttgtatggaaaagcaaaaatgcttgggtggctgggcactgtggcgcgcacctgtaatctcagcactttgggaggccaaggcaggaggattgctggagcccaggaattttaggctgcggtgagctataattttgacatagcactccagcctgggcaacaaagtgagaccctgtctctttaaaaaaaaaaaaaaaaaaaaaaaaaaaagcgtggggggctgggcacagtggctcacgcctgtaatcccagcactttgggaggccgaggcaggcagatcacttgaggtcaggagttcgagaccaacctggccaatatggtgaaaccctgtctctattaaaaatacaaaaattagccgggcgtagtggcacgtgcctgtagtcccagctactggggggtcttgagaatcgcttgagcccaggaggcagaggttgcagtgagccaagattgtggcactgcactccagcctgggcaacagagcaagtatccgtctcaaaaaataaataaataaaataaaataataataataataataaaatgccggctaggcacggtggctcacgcctgtaatcccagcacttttggaggccaaggccagcagatcatctgaggttgggagttcgagaccaacctgaccaaagtggaggaaccccgtctctactaaaaatacaaaattagccgagcgtagtggcgcatgcctgtaatcccagctactcaggaaggctgaggcaggagaattgcttgaacccgggaggcagaggttgcggcgaatggagatcacgccattacgctccagtcttggccacaaaagcaaaactccatctcaaaaaaaaaaaaaaaaaaaagaaaaaagaaaaagaaaagcctggggaagcctttaagtaggaagtggaagtgtcatctccagccaggcggtcataggcacacacctgccttctctgtcctgtttcatttcacccactctaagatgttgtcagtttgattgtaagacaatgtaattttaactttgtagagttacggtgcaaaaaaaaaaaaaagtctgagaatatattttacacacacacacacatttgcatgtttagagtcttttttaaatttactacttttatttaaaaaaaaataggggccgggcatggtggctcacacctgtaatcccagcactttgggaggccgaggcgggtggatcacgaggtcaggagtttgagaccagcctggccaacatggtgaaaccccgtctctactaaagatacaaaaagttagccgggtgtggtggtgcatggctgtaatcctagctactcaggaggctgaggcaggagaatcgcttgaacccaggaggcggaggttgcagtgacccgagatcacaccattgcactccagtctgggcgacagagtgagactccatctcaaaaaaaaaaaaaagaaaagaaaatacagacagtgtctcactatgttgcccaggctggtcttgaactcctggcctcaactgatcctcctgtatcggcctcccaaagtactgggattacaggcgtgagccactgc
